United States Patent Application Publication US 2022/0102000 A1 - sequence listing, part 14

SEQ ID NO: 2828 - DNA, 27551 bp, Unknown
  16S sequences of unknown bacteria
aagccttatcatgcaagcatgaacggctttttgaccttttgaccctggcatcattatgtagaataaggttgtcaattccccggaagtgttctataattgggataaatagctgcaccatgcagctatctgtgtgtaaggaagtattcggaaaggacggtagggtgtgcgaaagagagagcgttataaacgactgattatgtttcttgcgacggtactgatcgtggcggtccagaccggcgtgtttgcatatgcgtggtttcacgactactatacgaaggaagtcatcggaaggatgtacgggtactggggtcactgggcgctgcttgtgctgtatgcggtgatggtggtgctcgtatcgaagctgttttcggccttcaaggtcggctacatgcgcatattggatgtgattctgtcacagattttttccgtgctggtcgtcaatgcgtttgaatatctgcagctggctctgatcgggcggtggcgttttctgacacatctggagccgatgttgtgggtcacagggatcaacctcatcgctgttgtgctgtgggtattttttatgcgagtcatttacgctcgcatttatccgccgcatcaggtgctgctgatttatgataaattcagtccgaagtctctgattcataagatggaggaacggaaggataaatatatcgtgaccggtacgatcccgctttcagccggtatcgaccggatcaaggaggaaataccgaagcatcaggcgatcatgatcggcgaccttccggcacatgatcggaacatttttctgaaatactgttttgagaaaaatatccgctgctactgccagccgaagatatcggatatcatgatcatgtcatcagagaagattcatatgtttgatacaccgcttctgctgttccgcaactgcggactgaccgtggagaagcaggtcatcaagcgtatttttgatgtggtcgtctccggcctgatgctgatcgtgctctcaccgctcatgctgatcattgcgctgtttgtgcatttttatgacggaggcccggtattctacaagcaggagcgactgacgaaggacggagcggtatttctcgtctataaattccggagcatgcgtgtcgattcggaaaaaaacggcgcgcgcctggcgatgaagggcgacagccgtgtcactccggtcgggaaagtactgcggaatatacattttgatgagctgccgcagctgatcaatatcatcaaaggtgatatgtcgctcgtcggcccgcgcccggagcgcccggagatcgcggcagagtatacgaaggagattccggaatttccatatcggctgaaggtaaaggcaggattgaccggctatgcacaggtgtacggcaagtacaatacgacgccgtatgacaagctgaagctggatctgacgtatatcgaaaattattcgtttctgctcgatctgcagctgattgcgacgacggtaaaaattttgttccagaaggaaaatacggagggggttgaccagtggcagacaacggcatcaaagcgggagaagcagtagaagtgctcgtatcggtcatcatgccggcatggaactgtgcagggacgattgggaaggcgatcgactcggtgctggtacaggatgttccgttggagctgatcgtcgtaaatgatacctcgccggatgatctggatgcggtaatgaagacgtatgcatcagatccccgtgtccgctatgtgaaaaatgagcataacctcggcgcttccggcagccggaaccgcggtgtagcgctggcgaagggaagctatgtggcatttttggatgcggatgactggtgggagaagggcaagctgaaaaagcagatgcagcttctgactgcgactcaggcggtgctgtgttcgacgggcagagagctgctgacgccggatggcaggcagaccggcagagtcatcggcgtaccggaggagatcacctaccggaagcttttacatcacaattgtattaactgttcctccgtcgtactgcgtactgatgtggcgcgggagtttccgatggagcacgaagacagtcacgaggattacatactctggctgcgcattttgaaaaagtatggacgggcagtggctgtgaatgagccgctgctcaaatatcgtctgagcagcaaaggaaagtccggaagcaagcttcagtcggcgcggatgacctaccgcgtgtatcgctacgtcggaatgagccggtggcagtcgcttgtctgcttttgtatgtatgcggtgaatggcgtgtggaaatatgcgcgggcttactttctcacttgcacgcttctggtgtctgtgctactataaaaaacaaaacgaaaaggagaaaacctatgattcagaaactgattgcaaatataaagaagacaaatgcaccgatcgtagtcggactcgatccgatgctttcctatattccggaacaggtaaaggcagctgcgtttaaggaatatggcgagacgctggaaggtgcggccgaggctgtatggcagtacaataaggcgattgtagatgaagtatatgatctgatcccggcagtgaagccgcagattgcgatgtatgagcagttcggaattccgggtcttacagcttttaagcgaacggtggactactgccacgaaaaaggactcgttgtgatcggtgatgtgaagcgtggggatatcggctctacctccgcagcttatgcgacagcacatcttggtcaggtgcagatcggcgcagcgatggcgactccgttcggcgaggactttgcgaccgtgaatccatacctcggctcggatggcatcaagccgtttctcgaggtgtgcaaggctgaaaagaagggactcttcattctcgtaaagacatccaatccgtccagcggcgagttccaggatcagctgatcaatggccgtccgctctacgagctcgtaggtgagaaggttgccgagtggggagctgagtgcatgggagatgagtacagctacgtcggcgcggtcgtaggtgcgacttatccggagatgggaaaggtactgcgtaaagtcatgccgaagtcgttcatccttgttccgggctacggtgcacagggcggaaaggcagcggatctggtacattactttaatgaggacggacttggcgcgatcgtcaattcctccagaggtatcattgccgcatataagcaggaaaaatatgccgcttacggcgcagagaatttcgcaaaagcgagccgcgcggcagtagaggatatgatcgcggacattaacggggcacttgaacgcagataagcattccccgcttcaagtgcgcgaagcgactgcgttcatgagcaagtagcgaagctaggccctgtcagcagagctgcagggatggattgcgaatgtccgctttacagaagatagaaaagtgaagaaccaaatcatagatgcgagagacaaaggatcagtctggcatgtatgaataaagaaaaggacaggaaaatggcggaaaaattcaaagagaccgcgcgggtgatttcccaggaatcgctcggcgggcagatttacagcatgtggattcagacagagcagattgcagcggcagcaaagccggggcagtttgtttctgtatattgtaaaaatgaggcaaagcttctgccgcgtccgatcagtctgtgtgagattgaccgggaaaatggcaggctacgcatcgtctatcgtgtgaccggtgaggctaccggtacggaggagttcagccattatcaggccggggatgcgattgagctgctcgggccgcttggcaatggatttccactggagcgtgcaaaaggaaagcgagtgttcctgatcggcggcggcatcggtatcccgccgatggtacagctggcaaaggagctggatgacaaggcagtggcgatcatgggttatcgcaatgcggatacatttcttgaccgggagctttcggagcatgcgacgctctatgtggcgaccgaagacggaagccttggtacgaagggtaatgtcattgactgcatcagagaaaatgacctcaaggcggatgtgctctttgcatgcggaccgactccgatgctgcgtgcactcaaggcatatgcgaaagaagcaggaatcgagtgctggatctcgatggaggagcggatggcatgcggaatcggagcttgtcttgcctgcgtctgcaagtcgacagaggttgatgagcattcccaggtaaagaacaaacgtgtatgcaaggaaggtccggtatttctggcggacgatgtggagctgtaggaagaggagaaaacatggcagatatgagtgtaaatatcgccggagttaccttaaagaatccggtgatgacagcatccgggacctttggctccggaatggaatacagtgagtttgtggatttatccagactgggagcagtcgtgacaaagggagttgcaaatgtcccgtggccgggcaatccgactccacgtgtggcagagatccgaagcggtatgatgaatgcgatcggcctgcagaatcctggtatcgacctgttctgcaagcgggacatcccgtttttgaagcagtacgacacgaaaatcatcgtaaatgtctgcggacatacgacggaggaatattgtgagacggtagagcgcttggcgcaggagccggtagatatgctcgagatcaatatttcctgcccgaatgtaaaatgcggcggcatctctttcggacaggatccgaaggcagtcgaggcgatcacggctgagatcaagcggcatgccgcgcagccggtgatcatgaagctgagtccgaacgtgacagatattaccgagattgccagggcagcggaggcgggaggcgcagatgcactctcgatgatcaacaccctgaccggtatgaagatcgatattcacaggcagacatttgcgatcgcaaataagaccggcggcgtatccggaccggcagtgcatccaatcgcggtgcgtatggtttatcagacagcgcaggtggtgaacattccgatcatcggaatgggcggtgtccagaatgcagaggatgcgatcgagtttttgctcgcgggagcgaccgcagtggctgtcggtaccgcgaatttccataatccgatgacgacggtcgaagtcattgacggcattgcggattatatgaaggctcatcaggtggaaaaagtcactgacctgatcggggcagtacacgggtaatatcagttcgaaaggtaaaaaaagtgaatcagttttcaagaacagagctattaatcggaaaagaaggaatcgaaaagctggcgaacagccgggtggcaatattcggtatcggcggggtcggcggttatacagtggaggcactggcgcgcagcggagtcggagagtttgatctgatcgatgatgaccgcgtttgcctgacaaatatcaaccgccagattctggcgacgcgcagcaccgtggggaagtataaggtagatgtggcgatggagcggattctcgacatcaatccacgtgcacaggtacacgtctacaagacattttatatgccggatacggcggatcagtttgatttttcagtctatgattacgtcgttgatgcgatcgatacggtgaccgggaagcttcagctcgtcgagcaggcataccgtaccgggacaaggatcatcagctcgatgggtgcaggcaacaagatggatgcgagcgcctttcaggtggcggatatctcgaagacaagtgtctgcccgctggcaaaggtcatgcgccgggagctcagaaagcgcggcatcaaaaagctgaaggtcgtttactcaacggagccgccgatcgaaccgaaggagacggaagaattaagctgtaaaaaccactgtgtctgcccgccgggaaccgcacggaaatgcacggttcgtcgtcagataccgggcagtaccgcgtttgtaccgtcggtcgccggactgattatcgcgggtgaggtcgtgaaggatctcatcaaagatgtgcggtaacgcaaaaagatataatagaagaaacagcgaaaaacaggaggatccataaaatggaaaattacaagcaggaatttatcgaatttatggtagagagcgatgtgctgaagtttggtgattttacgttaaagagcggacggaagtctccgttcttcatgaatgcgggcgcatatgtgaccggttcccagctgcatcggctcggacagtattatgcgaaagcaattcatgataattatggcactgattttgatgtgctcttcgggccggcgtacaagggaattccgctcgcagtcgcgaccgtgatcgcattcagcgagctttacggcaaggagatccgctactgtgcgaatcgcaaggagctcaaggatcacggggatgcaggtatcctgctcggcagcaaattaaaagacggcgaccgcgtggtcatcattgaggatgtgacgacgtccggaaagtcgatcgaggagacattcccgatcatccgtgcgcaggcgaatgtggaaatccggggtctgatggtatccctgaaccgtatggaagtagggaaaggcggcgtcaagagcgcgctcgacgagatcaaagagctgtatggatttgatgcaaaggcgattgtgacgatggaagaggtcgtagaatatctgtacaatcgtccgtgccagggcaaggtacggatcgacgatgcgatgaaagcggcaatcgacgcatattatgtagagtacggggcaaagtagagcctgcaacatccactttgacaggaaggtcagaaaggagtgaatggaacatggataaaaaagagaaattgtataagaccgtggcaaattccgcaatctggaatctggtgatgggtattgtcgtgctcgtgaccggcattacctccggcgtacttctgctgatcagcgcagtccggttgatgagaagtaaaggagatattacattctgatggcgcagacacttcgcagaggcatcaagctttccgggacattattgttcggcgcgtacgtcgcggcactcatctactgtcttttttttgcggagggctatggacgggttgacggcgtgtacgactataatgtgcgcccgttccgggagatctggcgttatctgcgctactggaaaatcctcggcatccggaccgttgttttaaatctgggtggaaatattctcggctttgtcccgttcggagcactgctgccgcttatggtgcgtgatacacggaaggcatggaaggtcgggttgctcggactggagatcagtgcgctcgtcgaattttcccagctgatctttcgggtcggctgctttgatgtggacgatatgatcttaaatacgttcggggcgctggcagggtacgggtgcttctggctttcgcggaagtggttttttcgccggtttccggaggaggagatgagataagcagcgtttttaagcacaggaaaatgcggtgcccggggacggataagctacagattggagaaatatatggcaaaaagacaggtatattcctttgaagaaaagaaatattccgcaaaccagatcgcttcggcggttctcggtgtgttgtcggtcatcgttctggcggggctgctcgggatttcgtttctgatgaagggaatggcaaatacgtggatcggtgcggttggctttaccggaatcgtgatggcagtctgcggcctgtggtatgggtttgcgggctttaaggacgattccaaatcgtatttctgcagcaaatgcggaacgatcctgagcactgtggcgattgcgggatggttctttatcgtgtgtctcggactggcaggataaagagcgcaaacgtcggcaggttcgctgcctcaattgcgcagagcaatacgcaatgaagctattcggttatgacacatcataaggaggaatccggttatgggaggcttccttatgattttaccgaatcaagcaaggcccctgtttcaattgcacaaagcaataagcggtggggcagcattcggttaatgagcaagtagcgaagcggattgcgaatatccgttttataagcagcaaagtggattgcgaatatccgcttgacaaatggcaggtgaaaatatggaacagacaaatcagaacgatacttatttacaggagcggtacagtctcgcaatggaacggatcgaagggatccttgaagaaaagacggtgtccgcccctttttgtatttattttcaggcggtagcgaagtttttactggagacgaaggctctgagagagaagctggtgccggagaaggcagaagcgtatactcttgaggaatggcagcagatcaactatgagatgtatgcggatattcttccggagcactatgcccaaagctttggtaacccggaatatgcggtggagacgctgggagaagtgttcggaaagcttttaagctttctttacacggaactgcgtgcgctgcagatctatgtctatgaggagcggctggaggagaccgtcatatgcctggagctttttattgaggtgtacaattgcttcgagcgcaccccgcttccggagtaccgggagattcagcaggtcatttactggttcttaagcgactacagtgaactttttgtggcgcaccggattcaggaggcgatcgacccggagctggattttgcgacccggattgtgatggagtccgatctgacggatctgcgctacctttaccgctatggcgaatatgtatcggaaaatgaattaaagacggcggaatttttaaatacactttcagaagaagagatcgcggcgatggcagatacttatacggagggctaccggatcgggtttgtccttggcggcaaggatctttcgatcaagcgcaccgtaaatatccgctatcagctcggatttgagcgaatgatccgcaaagcgatcggaaattttgcaaagatggggctgaagccggtcatttaccgcgcggcagtgagcacgctgaacaagcgccagacgatgcgcatcggctacagcggggcagtgccgaacaagcagtttgagtacgatcaccgtgcagacaacgcggtatatctggataagaaatttgccgagcgcaagcttggcgtgatgcggacctcctacgaaaaatggaagcagctcgcggcatggcatgcaggtccggcggtcgtggagaccttcggcgagacacccttcgtgccaaagagcaatccgtacagctatcagctttccgagaagcagcagaagctgcaggtatcctgtgataacgagtcggcacagatcacgaaccagtatatcataggcagggagcggagctttacgatcatcgcctttcctgtgccggagatcggcgcacagtttgaggatattttccgtgagacggtacggatcaatacactggactatgttctttaccgggacattcagcagaagctcatcgatgtgctggatcaggggacgtccgtacacatccggggtgcgcatggaaatgagacggatctgacggtggctttacatccgctcaaagatccggcaaaggagacgctctttgaaaactgcgtggcggatgtcaatattccggttggcgaggtgttcacatctccgcagcttgccgggacaaatggactgctgcatgtctcgcaggtttatttaaacgagctgaagtatgtggagctgaaggtatggtttaaggacggaaggattgagaactggagctgcggtaactttgcggatgacgaagcgaaccggaactacttcttcgaaaatgtcatgtatcaccacgagacgctgccactcggtgagtttgcgatcgggacgaacacagcggcctactgtatggcgcagaaatatcagatcgcggataagctgccgatcctgattgcggaaaagatgggaccgcattttgccgtgggtgatacgtgctacagctgggcagaggatacaccggtctacaatccggatggaaaggaaatcattgcgcgtgacaatgaggtatccattctcagaaaagaagatccgtccagggcatattttggctgtcatacggacatcacgatcccgtatgaggagctcggcagcatcgaggtcattcgggcagacggcagccggattccggtcatttcgggcggcaggttcgtcgttccgggcacggaggcgctcaatgaatcattggatgaagcaggaaaataattcccggaagcattgacaaggggaagcatagttagtagaatgagttcggttttagaataagaagaacaacagaaaaaggagaaagtacgatggcaaaagtaggaattgtgatgggcagtgattcggacatgccggtgatgcgcaaagccgcagagatgctggaaagattcgggatcgagtatgagatgacaattatttccgcacaccgggagccggatgttttctttgagtatgcgaagaccgcagaggcgaagggcttcaaggtcattatcgcaggagccgggatggcggcacaccttccgggcatgtgcgcagcgattttcccgatgccggtgatcggtattccaatgcatacgacttcgcttggaggaagagattccctctactccatcgtacagatgccgtccggcattccggtagcgactgtggcaatcaatggcggtgcgaatgccggtattcttgcagcgaagattctggctacgtccgaccctgagctgctggaccgggtgaaggcttacgcgcaggagctgaaggagcaggtggagcagaaggacgcaagattacaggaagtcggatataaggcttattaaggaggagaaaatggattacaaaaaggcaggagtggacattgaagctggttaccgttctgtggagcttatgaaagagcatgtaaagcggacaatgcgtgaagaagtacttggtggactgggaggcttttcgggcgcattttctctggcgaagatcaaagagatggaggagccggtgcttctttccggtaccgatggctgcggcacgaaggtgaagctggcatttcttctggataagcatgatacgatcggtattgacgccgtagcgatgtgtgtgaacgacattgcctgtgccggcggggagccgttgttcttccttgattatattgcatgtggcaagaactatccggagaagatcgcagcaatcgtcggtggtgtggcagagggctgcgtgcagtccgactgtgcactgatcggcggcgagacggcggagcatccgggactgatgccggaggatgagtatgatctggccggctttgcagttggcgtggtcgataagaaggatctgatcacaggagcctccatcaaggctggagatgccctgatcggtatcgcatcgaccggcgtacacagcaacggcttttcgctggtccgcaaagtatttccgatggagcgggaggtactcgatacctaccatgatgcgcttggaaagacgctcggtgaggcactgctggctccgacccgaatctatgtaaaggcgttgcgcagcgtaaaggaagcaggcgtgcgcatcaagggctgcagccatatcacaggcggcggattttatgagaatattccgcggatgcttccggatggcgtgaaggcagtcgtgaagaaggacagctataagatcccggagattttccggatgcttgcaaaggaaggctccattgaagagcagatgatgtacaatacgttcaatatgggtattggcatggtgctggcggttgatccggcggatgtggatgcgacgcttgccgccctggcaaagaccggggatcaggcatggctgatcggcgaagtaacagacggcgaaaagggagtcgagttatgttaaggctggcggtgcttgtatccggaggcggtacgaacctgcaggcgattctcgatgcgatcacagccggaagtgtcacaaatgcagaggttgtcaaggtcatcagcaacagccggaaggcgtatgcactggagcgggctgctgctgcggggatcccgacggcctgcgtgacacgcagggagcatccggatgcggaggattttgatacggcactgctggcggagctgcaggaggcacaggctgatctggtcgtgctggccggctgtctcgtcgtcatttctcagcgcatcgtggatgcttatccgaaccggattatcaacattcacccggcactgatcccgtccttttgcgggacgggctactatgggctcggcgtacatgaggcggcgttggcgcgcggcgtgcgtgtgaccggggcgacggtgcattttgtagatggaggcacggataccggaccgatcattttacagaaggcagtcgaggtaaagcagaacgatacggcaaaggagctgcagctgcgtgtgatgcaggaagccgaatgggtgattctcccgaaggcaatcgacctgatcgcaaatggcagggtgacagtagaaaacggacaggtaaagattgcagaggcataatacaaacgcagaccggcgatcaccgggagaaaggcggacgtgagatgaaaattttgattgtgggaagtggcggaagagagcatgcgatcgcgtggaagattgcgcagtcgccgaaggcagagaagatttactgtgcaccgggcaatgcgggtattgcagagtatgcggagtgtgtcgatatcaaggcaatggagtttgaccggcttgcagcttttgcgaaggagcacgaggtggacctgacggtcgtaggcatggacgatcctctcgtcggcggtatcgtggatgtcttcgaggcgaaagggcttcgggtattcggtccgcgcaaaaatgcggcgatcctcgagggctccaaggcattttccaaggatctgatgaagaagtatcatattccgacagcggcatatgagaattttgacaatgcgaaggatgcgcttgcgtatctggagacggcaaagtttccgatcgtgctgaaggcagacgggcttgcgctcggaaagggtgtgctgatctgtaatacattatcggaggcgcaggacggcgtccgcgagatcatgacggacaagaagttcggtcaggcgggcaaccggatggttatcgaagaatttatgaccggacgggaggtatcggtgctgacgtttgtggacggaaagacgatccgtatcatgacctccgcgcaggatcacaagcgtgcgggtgacggagataccgggctgaacacaggcggtatggggacgttttctccgagcccgttctacacaaaagaaattgatgcgtggtgtatggagcatatttaccagccgactgttgatgcgatgcgtgcggaaggccgggagttcaagggtatcattttctttggcctgatgctgacggcggacggcccgaaggtgcttgagtacaatgcccggtttggagatccggagacacaggtcgtgctgccgcggatgaagacggacattgtggatgtgtttaatgcctgtgtggacggtactctggaccagatcgagctggagtttgaggacaatgcggcggtctgtgtcgtactggcttcggacggatatccggtcagctacaagaaaggctttgtgatccacggtcttgacgcatttcaggggaaggatggctactatgtgttccacgctggtacagccgtttcgccggaggggatcgtgaccaacggaggccgtgtactcggcgtgactgcgaagggtgccagcctgaaagaagcgcgtgcaaatgcctatgaagcggtgaagtggattgattttgaaaacaagtatttccgacatgatatcggaaaggcaattgacgaagcataggagagtaagtaagaatgaaaggcagaaaaacagtatggaaatccatccttctgacggtgatgctgcttgtatggacgtgcatggcagtaccggtactggcagaggaggcatccggggataattccttatcctcgcttgggatcacgacggagggcgtgaccgtgtcaccggatttttattacagtacgattgagtatcaggtgacggtaccgtccgggacttcccggctggagctggatcctgtgacatcgaattccggagcatcgatcattggcatcgacggacaggacatcggcagtgacggaacgacgacggtggcgatcacggtgcaggcggcaaatgacaatcagatcacgtattatctgtatgtgacgacggatacgacgacgcaggcagccgcaccggcagcagagacggaaactgaggctgtgaccgaggcgcagaccgaggcggagccggagacagaggatccgcgctatgtaaaggtagaccggaatgccctggaggaagcagagaagacgatttccaccctgaagacagagaccggtaattatcgtgaccgcgtgacacttctgacgagaattctctatggaatgatcgccctgtgtgtgatcctgctctttgcagtgatcaatctggcgctcaagaagaaggatctgaaggcagagctgcagaactatatgggctatggctatgatccgggcgcaggtgaggcggatagcggctatgctgcgcaggccggttacgacaatggcggctataacgcgacgcagcagggctacgacaacagcggatacgatgcacaggccggttatgacaatagcggctatgacgcacaggccggttatgacaatagcggacatgatgcacaggccggttatgacaatagcggctatgacgcacagaccgattttgaggatccgtttgaacagcagcagccactctcaaaaaaagagcagaagaagctgaaaaaggaaaaggcagagatgacggacgatccggcgactgtgccgaagccatccagagcaaagaaaaaagcaaagcagatgccggagtatcagcctccgcagccggagcatcagtatcagcctccgaaggagaagacatccgagcatgtggaagtcaatatgatcgatctgtaacggtttggttataacggagcccgcgggggatttcacacagctgtgtgaagtctcctgccgggctctttgtggttctggcggttgacataggaagcgttctgttatatcattactatcacaagggaggtacagctatgctgatagagatagatttccagagcgatgaggcgatatacatgcagctgcgcaatcagatagtactcgggattgcgacatccatgctgcaggagggagatacccttccttccgtccgtcagcttgccgatgacatcggcatcaatatgcacaccgtaaacaaggcttattccgttttgcgccaggagggatttgtgacaatcgaccggcgcagaggcgccgttgtggcattggatgataataaggcacaggcgattgtggagatgcagaaccgtctccgcgtgcttctggcaaaaggcatctgtaaaaatattacccgcggggaagtacacgcgatggtagatgagtgctacgatgcgtgggagaatgaggacgcgtaaaataaattgctaacagacagagcaacaggaggaagacttacatgcagacagactatacacagagcgcccggaaggctctgaagctggcagagcgggcggcgaaagcatgccatcacagctatgtcggctcagagcatctgctgctcggcctcgtacaggagccggacggtacagccggtgtgattctgagaaaccataaagtagaagggaaaaagctctcagagctgattgcgaagctggtagctccggatcagatcgtgctctcaccggaggagggctggtcgccgcgggcacaggggattctgcgagacgcagaagagctggcacatttttttgaacacagggagatcgggacggagcatatcctgttcgcgatcctgcgtgatgtggagtgtgtggcgaccagacttttacacacactcggtgtgaatttgcagaagctgtgcactgatattgtagatgtcgcgggacttccggaggaccgttaccgtgagctgatccggcaggcgaaggcgggtgccgaggagggaatatccggcaatacgccgaccctggatcagtacagccgggatctgaccgggcttgcttctgcgcacaagctggacgtgacggtcggaagggaacgggagatcgagcggatcatccagattttaagccgccgtacgaagaacaatccatgcctgatcggtgagccgggtgtcggcaagactgcgatcgtcgaggggctggcacagcgaattgtaaatgaagaagtgccggagccgatgcgcggcaagcgtgtcgtgacgctggatatggcgggcatggtggcaggatcgaagtaccgcggagagttcgaggagcggatcaagcggatcattgcagaagtagtcgacagcggagatgtcctgctctttgtcgatgagcttcatacgatcatcggggccggcggtgcggagggcgccctggatgcgtcgaatatcctgaagccgtccttagccagaggcgagctgcagctcatcggtgctaccacacaggaagagtaccgcaaatacatcgagaaggatccggcactggagcggcggttccagccggtgcatgtggaggagccgtctgaggaagagacactggagatcttaaagggactccgtccgctttatgaaaagcaccatggagtcacgatttcagatgaggcgctggaggcagccgtgaagctttctgtgcgttacattaatgatcggttcctgccggataaggcgatcgatctgatcgacgaggcgagcgcgcgccatcagcttggctatttccatgcgggttccccaatcgagaagctgcaggaggagtatgaggagctgttggcagagcgtgagacggcgatccgggaaggccgatatgaggatgcgaaggtgctgaaccagaaaaaggaagccgcaggggaaaagctggatcggcagaagaagcggatgcacctgaagcagagcagccggacccggatggtatcccgcgaggacatcgaggcgatcgtatccgtatggacgaagattccggtgcagcgcctcgcagagcaggagggtaagcgtctccttgctttggatgctgagctgcataagcgtgtcatcggacaggaggaggccgtgcaggccgtggcaaaggccgtcaggcgcagccgtgccgggctgaagaatccggcacgtccgatcggatcctttctgtttcttggaccgaccggagtcggaaagaccgagctttcaaaggcgcttgccgagaccgtgttcggggatgagcaggcgatgatccgcgtcgatatgtcggagtatatggagaagcacagtgtctcccgcctggtcggctcaccgccgggatacgtcggatatgaggagggcggtcagctctcggagaaggtgcggagaaatccatattcggtgattttgtttgacgagatcgagaaggcccatccggatgtattcaacatccttttgcaggtgctcgacgagggtcatatcacagacggtcatggccggaaggtcgatttcaaaaatacggttctgatcatgacgtccaatgcgggggcgcagtcgatcatcgcgccgaagcacctgggctttggtaccggcaaggatgaaaagaagaactatgaggcgatgaagagcagcgtcatgcaggaggtacgccgcattttcaagccggagttcctgaaccggatcgatgagatgatcgtgttccatgcactgacgaaggatgagatttaccagatcaccggacttttgcttggagagctgcaaaagcgggcaagggagcagctggagatcaccttgaagatcagtcctgcagtgagaaagcatatctctgaaaaaggctttgatgagaaatacggagcaaggccgctgcgccgtgccgtgcagaatcagatcgaggatgtgctggcggaggagattctctccgggcgggtgcatcgcggcgataccgtacacgtcggtctgaaaaaaggaaaaatagtgttcggatcagagacggaaaagacagcacaatagccaaagaaaggctggaattttggtcagaattatgataagatagcgtcatccagggggcgaccccgcgcgaatgaaaaacataccaggaggacatgagacatgtcagtaataaaagatcttatatgtacagaagaagacggcacactcagcttcggcaattacgagctggcagaaaaggcaaagcgttcggattatgagcatgagggcgatctgtataaggtaaagaccttcgcagagatcacgaagcttgagaagaacggaatgttcgtatatgagtctgttccgggtaccgcagtccatcatttccattctactgcaaatggtgtttcctttgaggtagagggcagggaggatgcacagatcattctcggactggaagaggatgcagagtacaagatttacattgatgatgtcaatgccggcacgatgaccacacagctgggcggcaagctcgtcctgagcgtggagatcggcgcggtggatgaggttccggtaaaggttgtgaagttataaatgccaaaagcaaagctattatttttctgtcagaactgcgggtttgagtccacaaagtggatggggcagtgtccgggctgcaaggagtggaatacctttgcagaggagccgcaggcagcagtaccgaaaaagacagcagcagggagcgtccgaaaggatgctcctcatccaaaaacactctcagagatagaggtgtcacagactgcgcgtatgacgactgggatgggggagctggaccgtgtgctcggaggaggcattgtacagggctcccttgttttagtcggaggagatccaggtatcggaaagtcgacgttgcttttacaggtttgccggaatctttccgcggcagggaagaaggtactttatatctcaggagaggagtcgttgcagcagatccgtctgagagcggagcggatggggacatttaccgatctgcttctgatcctgtgtgagacgagccttgagacgatccgggaggcaatcgcacggattcagccggaggtcgtcattattgattcaatacagacgatgtacaatgagaatgtatcctctgctcccggcagtgtctcgcaggtgcgggagtcgacgggggtgctcatgcagatcgcgaaggggatgaatatcacgatctttatagtcggtcatgtgacgaaggagggtgtggtagccggtccgcgtgtgcttgagcacatggtcgataccgtgctttactttgaaggagaccgctatgcatcctaccgcattttgcgtggtgtgaagaaccgtttcggctcgacaaatgagatcggcgtctttgagatgcgtggctcaggactggcggaggtgacgaatccttcggaatatatgctcgaagggaagccggagggtgcgagcggctcgatcgtggcctgtacgatggaggggacacgtccggtgcttctggaggtgcaggcgcttgtctgtcagagcaatctggcatttccgcgccggacagctgccgggacagatctgaaccgggcgaatcttctgatggcagtgctcgaaaagcgtgcaggtctgcgcctgtcctcctgtgatgcctatatcaacatcgcaggcggtatccggatgaacgagccggcgcttgatcttgggattgccctggcgatcgcatcgagcatgcgtgacatgccgatcgatgagaagacgatcgcttttggcgagatcggcctaagcggcgaggtgcgttccgtcacgatggcagagcagcgcgtgcgtgaggcgaagaagctcggttttacgaccgtgatccttccggcgggttgcaaaaagcaggccgcacgggtcgaggggatcgaactgattccggtgaaaaatgtaagagaagcaatccaggcgattctgtgagaaagagctgacacgaagcaggtgtggaagctggctgtgccggaactcaacagtgcaaaaagcgctttacggcagaatagagaagaaaaaacagggcatactctcagatgaaaggagtgtgacctgtttttatgaaaaaagaaaaagaaatcccggcatgggaagagttaagtccggatgaccgaatgaaatatgaaattgcagaggagctcgggcttctggaaaaggtgaggacaaacggctggcgctccctctctgccaaagagaccggtcggatcggtggtctgatgacaaagaagaaacggattctggcaaaggcagagtccgggaaagcatgacggaatcattcttgaattcatatgagaaaaggaacaggagttacattatgataaaaattctgatcgtagaggacgaggagccgatcgcgaacctcatccgtatgaatctggtgaaggcgggctatcagtgtgagatcgcttcggatggcgagctggcggcggatgcgatctcggagcggtcatttgatcttattttgctggatatcatgcttccgaagctgaatggctacgaggtactggaatatgcgaaaagcgtggatactccggtcattttcctgactgcgatgggagcgacggggcagaaggtaaaggggctgcggctcggcgcagaggactatattgcaaagccgtttgagatcgcagagctgctcgcccgcgtggagacggtgctgcggcgatgcaaaaagacggatcggcagctgcgggttctgaatatcgacattgatacggattcgcgcacggtgctgcaggacggacatcccgtcgatctgacgacaaaggagtacgagcttctgctcttatttttgcgtaataagaaccgggcgctgtaccgggagacgatctatgaaaacgtatggggcggcgagtacagcggcaccgggaggacggtcgatctgcacgtacagcgtctgaagaaaaagctggggctggaggagcacatcgtggcgatctacaaggtaggctaccggctggtgtgctgaacattcaccgctgacctgcggtatggcctgggggactgcagatggtataccccccggtcggaaatcggcgggcagcagatggatatccgggaaaggaggcgccatgcggctttcatggaaactgttttttattacaacgccgatcttcgtgctgtttctgacgattttcgggatctggatcatacaggacagctttgaccacagcctcagtcaggctgtggagcagtgtatggctgagaaccagacctttcagaattcctatgagctgacgaatcacgcactctctgaggcacagtggaatcagacgacgatcaaaaaggtcgtagcgagcttccataaaagcagggaggccggagacggaaatgcgcgcatttacgatagtgacgggagcattctttacgaggataatgcattggcgctgaagctggagcgcaccgatacagaagggacatccggggaaaagaagcggatcgagacgtccgggcagcggatcatgtcagagctgaccgaagaagaaaataccggctatgtcatcggcagtcaggtcggacagtggtacgtcacggttgtgagccggagcggttccgggatatacatagagacaaccagaaatatttcttcgatatatgagaacagggatgccatgtatgcgcgctatcagatcggtgtaatcctgctgacggtactcgtcggatgtgtgatcttgtttatgctgttttttgtcatgcggaatatgcagaagctttcgcgtgtcacacggcagtttgcgcgcggccagtacgatgcgcgggtgaagatcaaaagtgaggatgagatcggacggcttgcggaggattttaactggatggcagatgcgatgagccgacagatggagcagctgcagtacgaggtcaggcgacaggaggaatttacagcggcctttgcccatgagctaaagacgccgctgacgtcgatcatcggctatgcggatacgatccgacagatggagctgtcgaagaaagagacagatatgtgtgcggattatatcttccggcagggaaagcggctgcagacgctcgcctacaagctgctggagatgacgatggcggacaagcaggagattacgctgcaggcaatctcagtgcctgaatttttgcgggagatccaaaagatagcggcagagtccttaaaggaaaagcagctgaccttgctggaagaagcagagccggggctgatctacggtgaccgggatctgctctcatcgttgtttttaaatctggtggacaatgcgcgcaaagcgtccgatccgggaaaacgcatctggctcaccggacaccagaggcaggacggctatctgatttttgtggcagatgaagggcgcgggatcccaaaggatgagctggcgcggatcacagaagccttttatatggtggataaatcgcgtgccagaaaggaaggcggagcgggactcggactggcactttgccagaagattatagagctgcatggtgcggtgtggcgctttgaaagtgaggtcgggcaggggcttagggtatccgtcatgttttgggacccggagcatcagaagccacgcgatggccggaatacgcgacggccgggagcagcacggcaaaagcatgatttgcgggaacaggaggacggatgtgaaaaagaagaaaagctggaaacacatcttagaatatgagcttggtgtgctgatacttgtcgctgtcctgctggtcgcatggttcggaccggatctctatgcatcgtggcaggatcagtcacagaacgggaaggtcgtatgctcgtcccgtgatgagatccggttcctggatacggattccctggatattgcaggcaggatggtgctgctgcgggatgcgacgtatctgaactggtatgagaatgatgtttattatgacggaagcaggatgacacaggaggagattgagcagctgctgattcagcgtccacgttcacttgcagaacggtgggtggaggcaggcgtcatgccggagcaatttgtcaggcagatcccacggacgcttcaggaagcggatgtcctggaggagggaacctcatcagggatctattcagtggtggttgatcagaacgtattaaatgtgctcgtgcttaattatgtaaagtctgccgacgtatatggttcgccgtcgattgtcgggcttgtgctggacgcggacaaggatattctgtactatgcggcattttacgatccggactgctgggactggatggcgaagcggctgggaggagatgcaaatgcgcaggatgcggatggctcggcctatgccgatttattgtatcgctataaggataagaaggagttaccggagcatatcgtagactgtggagaccttgcggcagtgagcagtgcagagagtgccgatgtagcggatgaaaagggcctttccggggatacctatggcctgtatcaggattttaccttgcagtatgagcgttttaacagtactgcacgtgtagcgctgaccggctttaccggcaagggctatggatggtctgtcgccttgggtacgccgctctggaaccatttttacaatgagattatggattattccgaagggacgccctgctataatggtacagcagaggattggtttattgatccatatgcaacaggtggcggttctgcaaatgagctgccgtataatgaagaggcatatgatgatggtgactgaaaaacttcacatgatacaaatctgatacaattctgaggagattttgatacatcttccttttataatcctttctgcagggtaaggaatggcctgcggggaggatttttgtatatgagcacagaagaaaaagcagagaatatttgccggagcatcgggatcgcgatgtacgtgcagaaagaggatgcagatatgcaaaaagaaaggtacaaaagcatgctttttccggagcagcacagatatgcaaaaagaaaaccgtgtggggacacgaaaaggagcaggaaggagaaagcctgtaaagaagacagaagggtatacaagagaagcggggacgaaggcagaaaaaagaactgtgaaaaaaagaaaggatccgtacatgcacagcctgaaacgccgctgcgcacttttggcggcgctggcgctcgtactgggcgggatggtcgtggcgcggccgtatctgaaacgctataccgttccggtgggcgggcggacaatcacggataacagcagctacatcacagatgcgtctggcctgccggtacagaatccgctgattctcgtcaataaagcaaatccactgccggacgactatgaggtggatctgcactggctgagcaacgggacgtgtgcggtatcgtccctgatctacgaaccgttgagtgagatgctgacagatggaaacagtgaggggctgcagtttgtcgtggcgtccggctatcgggatgtggagacacaacagcagctgcttgacgaggatatcgaggcagatatgcagaacgagggcatgagctggcaggaggcttatgataaagagacgatggagacgatgccgccgggctacagcgagcacagtacgggactggccgtggatctcgtggcgctggactatcagatcctggatggcgggcaggagcagacgccggaaaatcagtggctgcaggaaaattgcagccggtacggcttcattctccgctatccggaaggaaaagaagcggtgacagatattcattacgagtcatggcatttccggtatgtcggtgtggaagcggcacagaagattatgagcagggggagtacactggaggagtatcttggagcgtattaaggagagcaatgcgatgaagacagtgggggaattaaagaaggtactgcggcagcgggggttactgcaggaaaatacagaaaatttaaaaaacaggcaggcgctggaaaatgaccgcaggtgtatggatttggaatgtgccggaagcgaagcctcatatgcggaaccagaagccgatccgcgcatcgactggctgacctttgattcccgcacggtgcgggagcatactgcatttatctgcaagggcgcggcgttccgaccggagtatctggaggcggcggcacaaaacggtgcggtctgctatatcagtgagacagccatagaaccgatagagacagatggcgcagcaccgttgatcccactgctcgtcacagacatccgcaaggcgatggcggcggcctcggcctggttttttgactatgagaagggacgtccgatcctgaccggcatcaccggtacgaagggaaaaacgacgacagcgtggtatttaaaggcaatactcgatgaatgggagagggagctgggtgcgccggagaccgggctgatctcgacggtagaaaattatgacggagtatcccgcagtgagtcggtgatgacgacgccggaagcaccgacgctgcacgaacatattttacatgcgaaacaaaaaggcatccgctatatgacgatggaggtgtccagtcaggcgctgaaataccgcagggtgcgggagcttcagtttcaggtcggcattttcctgaatatttccagagaccatatcagcccgaaggagcatgtggattttgaggattatttcagttcgaagctctcgctgttccgtcagacggaggttgcctgtgtgaatctgaatgcggactatgcggaccggattttaaaggcggcgcacaaggcagagcgtattgtcacctttggcatgaaaaagcacgcggatatccgctgcagcgaaatccggacggagggacggcacttaagcttccgtgtcacctgtgaccggttttcagagcggttcgagcttggaatgaggggaaaatttaatatcgaaaacgcactcgcagcgatcacagcagcctatgtctatggtgtaccggtcgcatgtatgcgccgggcactgcgaaagacgctggttccgggaaggatggagacctttgcgagcagtgatggaagaatctgcgggatcgtcgattttgcgcacaaccgcctgagctttgagaagctgttcgatgcggcatttcaggaatataccgcttaccggaggatcatcacggtgtttggctgtccgggcggcaaggcactgaaccgccgccgggagcttggaatcattgcagggcttttttcggacgaggtgatccttacgacggacgatccgggtatggaagatccggaaggcatttgtgaagaaatccgtgaatacgtggatatgaccggctgtagctgtcatctggtggcagaccggaaaaaggccgtggagcaggccgtagcgctggcaaaagaagatcggaagaaccgcacgctgatcctgctgctggggcgtggcagtgaaagatttcagcagatcggcggacgttcacttgcatcaccgacggatgcagagctgatggcagaagcgcttcaggcgtatgatgcgtcgcgaaagtcgggggaggcgtcctgttccggaaaaattgcaggttaataaaagagggcttgcgcatacagattccgggcaatataattaaaaatagtaactgttcagagccaacctccaaaatgctacgcatttcgtcggtgtggcgtatccgccaaataaaatttcaaaaacaggcttaaaaatgcaagcattttccgcctgttttatgaaattttgcttggctctgaacaattacaaaaaatagaagaaaagcggataaagaatatccacttaaggtatagaagagaaagaggacgcccatgaaaaatttaaatgccgatctgaaaaacggaacctttttgcaggtttatctgctcacaggagaggaggcctatctgaaaaaccgctataaaaagcgtctgcgtgcagccatcgtcggggaggacgacctgatgaattttactgcttatacaggaaagggaatcgatatccgtcaggtgatcgagacagcggagacgatgcccttttttgcggagcgcaggctgatccagatcgaggacagcggatttttcaagaacgcctgcccagagcttgcggaatatctgccgacgatgccgaaggagacatacatggttttcgtcgagcaggagatcgacaagcgcgggaagctctacaaggcggtcaaggcacaggggcggatcgtggagctggggcggcaggacgcgcgtactttgacgacctgggtgcttggaatgatcaaaaaggaaggaaaaaatatcacacaggatgccctgaatctgtttctggagaagtccggcgatgacatggaaaatattgcgaatgagctcgaaaagctgctttgctatgtgcaggacgccacggcgattgaacgggcggatgtagaagcgatctgtacggtgacgacagagaacaaaatttttgatatgatccgtgcagtggcggaaaaaaggcagaagcaggcgctggagctgtactacgatctgctttccctgaaggagccgccgatgcggatcctctttctgatcgcgcgtcagtttaatcagatgtatcagatcaaggatctgcgggagcaggggtatgacagcggtgcgattgcgaagaaggccggcctggcaccgttcattgcaaagaagagcctcgcgcaggcatcaaaatttgagaaggacacgctcagacaggcagtggaggactgcgttgagacggaggcggcggtaaagagcggccgccttggagaccggctcggtgtggagctgctgatcgtgaagtacagcagctaaatgctgcatggaagtatgcgtttatatcagatgtgaaatgactcccacctctgtaggtggcgagcaacaaatcagtatcagtggtgggagtcaatc

SEQ ID NO: 2829 - DNA, 32759 bp, Unknown
  16S sequences of unknown bacteria
cctctgccgcagtgcccttgcccagggcactgcggtatgccgcaaggagcagtgccggggagtgactgagccggtaggtaaggtccacatccagcggcatgggctgtcgggtaaacacactgcccatccggctctgggcacccaggagtgccgccgcctgacggcaggcctggtattccagcagctgtccggtgagttcccggcgggggtcctcgtccttttcatgcttgggaagcagttccaccgtcttgatatagaccagcctggctgccatctcgatgaattcgctgcccacttccaggtctgcttcctccatctcacgcacagcagcggtatactgttccaccagggtggaaatctcgatgtcgtagatattgagcttgtgccgggcgatcagggtaaggatcaggtcaagagggccttccacctcaccggcccggaaggaaagtttctccatctggcgccccctacacgatcagctccgggataaaggccgtaatggcatacatgccatcaaggatatacccggtgaaatagtagatgatgttggtaaacacatcggtaaagagcagcacaaacaggaaaatggtattgatggctctggcatagcggtaataggtcatcagccagcggcggggcagcagatattccagcaggcggctgccatccagcggcggcaccggcaggaggttaaagactgccagcgatacactgatagaggcgatggtctgcaggatcagcaccatataataaagtgtgtccacatttgcgccgttataatagccccggacccaaaatcccagtgaaacctgtgccaggatcaggaacaggaagcccatgatcagattggcaagggggcctgccatggcggtgatgaccatatcccggcggggattcttgtaatagcgggggtccaccggtaccggtttggcccagccgatgcccaccagcagcatgagcagcgatcccacaggatcgagatgcaccagcggattgaggtcgagccgtccgtcattggcggcagtggggtccccgagggcatagctcacccgggcatgggcgtactcatgcaccggcaggagcagcaggagcactgccgcccggctgaggagattgatcatcattgtattgtccatggggttcctcccgtaaaaaatcagatactgtcacaggatatattgtagcataaacccgctggtttttccaccattcccggggatttttccgccctccgcccgggacagaaaaaactccgcctgccctccggcagacagagttttccacaaatggaaattcagttggtggaaagggcagctgttttgccgctgtccacgtcccggttcagttcagctgggaggccatctcccgcgcgtagagcgccaggcactggtcaaatacaccctccggcaccttccagatcacctggttctggtagtcaaagagctcgtccgtcccccgaaacatatagtacaaagtccccttgggggtttccgcggcgatataatagatcgttccgccggtgaccggctcaaacggcaccgtttcggtgacgctttccagcgccgctgtcagctcttctgcccgatccccgtctttcagggtcaggaacaggggctgatcctgccagttccacacacagagcttcagagtactgccctccggcaccgcaagcggcccggcaggctctgtgccccaggcgtcaggctcgtcctcgggccaggcaagctcagagcgctccacccggggctctgccgccgcaataaacccggacactccacgctggaacgagaacgccagctgatccgttcccagccagtaagtctgtccgttctgctcggtgcagagcccgccgtccagcagcacccggtagacatagtcctcgccgtcatcggtgatggtgagctccacccctgtctgggtccagtccacggcttccggtggggtctggggtgtcagggcgcccagcccttccagaaagccggtgtcaaactccccggcctccagtgccggagaccgctccccatctccggtcaggcagaaggtcgccgcctgtatctccccatcgtaggtgtgcagcacggcatcggtgctgccccactcggtttcggtccgggctgcggcctgactgctcccgccgtcatctgcggctgaggaaggatctccgccctcggtgcagccggtgagcagcagggaaatcgccagcatcatggcaaaccatttggaccgcatcggaactcctcctttttgatcggctgcgcagcggcagccggttctccgatttcatcctatcacatccgccgggaaatgcaaagcggtttccggcaaagccttgcattttgttccgccccgtggtacaacagaattattctcgcaatatttcagagaggaggcaggaggatggaaccctttggccctgatttccggttccgggaggcgccgcccgcttttgaggattaccagcggtttatcctggaacactatgacgccgaggaagtccccatcagcgccttttcccattcgctggaccggatgctgcgctttaactgctttcactcagtcaataaccgcccccggcgcagcatggacgactttgtctttacggcctatctgctgccccgcacgccccggaatgaagaactgtacgaacgctcctggaacgggaaaaagccccactatgtggtgctggagcagctgctcggcgttgtggacaccagctgcgccaaactctcgctgctcatgcatatcgccacgggcatcacacgggaggattatgagagcaaatccccgcgctataaaatctatctccgttccgtggaggcactggaaaaaggcgagtattaaaatttcaaaaaaggcttgcttttcttccggaaatctgatagaataccaatgttgactttaccgatacccagaaggaggtgcagacaaatggcaaagtgcgatatctgcggtaagggtgtaactttcggcattaaggtttcccattctcatagaagatccaaccggacctggaagcccaatgtaagacgagttaaggctatggtagacggttctcccaagtacattcacgcctgcacccgctgcattcgttccggcaaggtaacccgcgccatctaacgaacgctcaatactgtaacacaaaggctgttccgatttccgggacagcttttttgtttgcccggcagatttcctgcgcaaaaaggacccccctcctttttccgaggggagtccttttatatttctgattccggctcagcgggagagatttccctcctgcagccaggtgtattccgattcgtgccggcggggacggcccatcaggtcggcaatggcctgacggatatccttgccctcatacagcaccttgtacacttcgttggtgatgggcatctccacacccagacggcggcccatctcataggcattcttggtgttggtatagccctcaacggtcatgcccacctgcttgactgcctcagcacccgagaggccctgtcccaccaggataccgcaccgccggttccgggagtgcatactggtacaggtcacgatcaggtcacccatgcccgacagtccgccgaaagtctcggtacgggcgccgcaggccacacccagacgggcgatctcggtgaggccgcgggtcatcagcgccgccttggtgttgtcccccaggcccagaccgtccagggcaccggctgccaatgcaatgacattcttgagagcgccgcccagctctgccccgatgacatcatcggtgacatagatgcggaaggtatcgcccgagagggtcatctgtacccgctctgccatatccagattccgacaggctgccaccactgtggtagggattcccttggcgacctcctcggcatggctcggccccgagaggatcacacatggattttccggcagctcctcggcgatgacctcatccatccgcttgagggtctcgggctcaaagcccttggatacgcagaccaccacagctccgggggccagtctgccatgcagctgggccgaaaccgaccgcactgctgaactggggacagcgatgagcaccagctccgcttcgcccagggcagcgaaatcggtgacaatggcgatctcctccgggatcttcacacccggcagcagacggcggttttcccggtcagtccggagctgtgccgcttcgtcctcccggtaggaccacatagtcacctcatgtccgtttgcctgggacatcacagccagcgccgtaccaaagccaccggcgcccagaataaacagttttgccatattcattcctccaaacagcggcgccggaagtttactttccgggacggccgatttttttctcggtgccattgagcaggcgcttgatattctcccggtgcatatagaggatcagcgccacacagatgagcgcgaaggtcacatccagcagcggaggccgcccgatcagccggcattttatgtacaccaggatcgggtaggccgaagcgcccagcaccgaagccagcgaaacgatccgggtgatgaaggcgatgggcacaaatccgatgaacagcaccacaaacagatccgggttcatcaggaggatggcgccgcaggctgccaggatgccctttccgcccttgaagtggaagaagatcgggaacagatgccccagcagcacgccgatggcgcccacccagcccccgtcaaaggggagttccacacccagggaaccgataatggtccgggcgatgagcaccgacgcggtgcccttgaagaagtcgcccaggccggtgagaaaggctgcttttttgccgtaggtgcgcagcatattggtcatgccggcattgccgctgccgtagttgcgcacatcgtcatggtagagcagccgggacacgatcaccgcaaaattcaggctgcccagcagataggtcagcacaaaggcaagtcccatggcaagaagcacatcggaaccaaacatacagaaatcaaccctctttccttacagcctgtattacttgctgtccttgccccgctcccggggaatgatgcggatcggggtaccgtccagaccgaaggtctcccggatctggttttccagataccgctggtaggagaagtggaacagatccaggctgttgcagaagatcacaaaggccggcggcttggtggaagcctgagtgatatagaagagccgcagccgcttgcccttatccgacgggggctgtacccgggcagtggcataggccagcatatcattgagcataccggtggaaatacgccgggcattctgctcacagacatagttgatcaggtcgtagagtttgtccacccgctgaccggtgagcgccgaaataaagatgaacggcacatagctcatgaaggagaagtcattctccagcttcttgcggtactcatccatggtcttgccgtccttttccacggcgtcccacttgttgatgaccacaatgctggccttgccctgttcatgggcatagcctaccaccttggaatcctgctcggtgaagccctcagtggcgtcgatgacgatgaggcagacatccgcccggtccactgccatataggcacgcaggacgctgtacttctcgatgtcgtcatccacacgggatttgcggcggatgccggcggtgtcgatgagcacatacttgccgtgttcgttttccaggatgctgtcggtggcgtcccgggtggtgccggcaatattggatacaatggcccgctcctgaccggtcatgcggttcaccagcgagctcttgcccacattgggcttgccgatgatggcaaccttgatatactcctcgtcatactcttcccggttctcgaagtcgatgtgctcgaagcaggcgtccagcaggtcgccggtgccatgaccatgaaccgaggaaacgggaatgggatcacccagacccaggttgtagaactcataatattccggcggaacatcaccgatggtatccaccttgttgacacagagcaccaccggcttgccgctcttgagcagcatggaggccacttcctggtcgttggcagtgacgccggtgcgcaggtcggtgaccagtacgatgacatcagcgctctcgatggcgagctgggcctggcggcgcatctgggagaggatcacatcattggaatagggttcgataccgccggtatccaccagcatgacctccttgccccgccattcgcagggggagtagatacggtcccgggtcacgccgggggtatcctttacaatggaaagacgctggcccaccagcttgttgaacagggtgctttttcccacattgggacgtcccacaatggcaataatcggtttcgccataagcatttccctccttcttctttatcaaaggacagccatggattgcagactgtccgggagaatcatttcctgcattttcatacgatcattctgagtataccataaattccggcgatttaacaccttttccggctgtatgatgagaaaatgcagacaaaaagccgggcaatcgaacagggattgcccggcttctatcatctttcgttataaaacagatccggcaatgcgattaggcatttacttcgggatccatcttgatcacttctctgcccttgtagaagccgcagttcttgcagactctgtggggaacagtcagtgcgccgcagttggggcacttgctgaacgcaggagcgctgatcttccagacattggatcttctcttgttctttcttgctttggacgactttctcttcggtactgccatgatggcgcctcctcaaatcaaaataaatggtttaatcttcattttcgtcaaggagcgtaagaagcacgctcagacgggagtccacctctttttcctgagaacagttgcaggtcgactcattcaagttcgttccacatttcggacatagccccttgcagtcttccctgcaaaggatccttgttggtagctcaagaagaatgtccattgccacaagctcgtccaagtccagggtataatccccacagacgatgaattcctcctcgtcttcgccggccagctcatgcacaagaatgtgttcaaagttcatagagagatctctctcaacgggggtcaagcagcggtcgcacagcgtatttagcgtaaacgtggccaggtaacctaaagtaactatgcccgttctgttttccaccgtacctatgatatgaaccggctttaccagcggatgccctgctccgtgccgcagatgcgacaggtccagatcgtattcaaacgactgcttttccccagccctgtcgaaaaggtctttcagctgaagaaccatcgtttgaaccctcctcccattccggtaaaacactcgatccaccttgattttgggcgcaaaaacaccgcagaaccagatggtactcaaatattatatatagagaaactccctttgtcaagcggtttccggcaaaattcctgttctttttccgaagaaacaaaacagtcgggtttctcccctctgccccattggcatccagggaaaaacccggctgttttttatgtaaaaccctgcccggtcagagcggagtatcggtcagtacatagcagcccagctccgcggttttaagggtgtgggtgctgccgtcccatacgctgtccagcagcgtgaacaccccgtcctcccacagatagaggtactgcttttccgagcggagggtcagggtccccaccgcctcaaacctgggatctccggtgaagtccaccacttcggctcccccggactgatcccccagtgccgcacgcagcgcctggtccggttcggcgacgcatcccagccggaagcgccgctcctcccccagagccactgtgtaaacagcatcgtttccgaagtgcagggtcacctgctccagctccggatcgaagatcacctcctgccgggtgaaattcaggtactgcacggtatcgtcatcatagtccctgggccagcagtcctcctcataccagatccagctctcctcttcctggacatccaccggctcaaacagcgccttcagttcattccaggcaaaccaccgctccccgtccgcattttcaaaggcggttttataccggatggtgcgcaggccgctgttctccggggagagctccaccgccaggtagagccgtcctgcctcgtccgcccggacttcgaaggtttcggtatactcccgctcctcctcttcgtccagctccgcttccagggtgcagccctcccagaactccgggtcagggatctccccctgggcatcggtaaaatagaaccggtactcccggcccacatggagcagggtctgctcctctgccgggtccagatccaccggcggctctgtgccggccgcccaggacatctgcgccgacagcaccgctgtcagcagcaccgccgcaaacaatcgtttcaccttcattcacctcccgttactgtgccgaggatacttcccgggcaattttgcgctgcatccgccggttgttccggtcctcccggtcaaagatcaggtagaaggtggggatcagcaccagggtcagcacggtggaaaggctcaggccgccgattaccaccacagccataccctgcatcatctccacttcgccgccgaagcctgccgccatggggatcaggcccacaatggtggtcagcgacgacatcagaatgggacgcagacggcgcttgcccgcagtcaccagggcctcatggacttccatgccctcccggcgcagggtgccggcatagtccaccaggacgatggcgttgtttactacgatacctgccagcatgaccagaccgatcagtgaagtcatgctgatggagctgccggtgatatagagggccaggaaggcgccggtgagcgagaagggaatggagaagagcaccaccagcgagaagatcgccgactcaaactggattgccatgacggcaaagaccagatagaccgcaatgagcagtgcctttccgatggagccgaactcactgttcatcatatccatgctgctgccctgtccgagggtgacgccttcggggagttcaatatcctccacggcagccatggcagtctgggtcatattgcggacattggcgccgctcttgggggtggcgctgacagtgaccacatagtcgccgtcctcccgggagatgctggtaggcgaggattcatacaccaccccggcaatatcggtgagagccacctgtccgccggtaccggtatcgatcatcaggccggagaggtcgctgatgtccgaatagcggtcactgggatattccaccacaacgctgtattctgtgccgctgtcggtgaattccatgacggtcatgccgcttagcttgttggatacctggctgagtacctcagacggtgtcacgccataggcgccggacaataccgggtccacttcgatcttggcccggggcgaaccatcggtcagggaggtggacacgctgtcgaactcctccatgccggacagccgttcccggatggattccgaggcggtctccaggtcgccggggtccgggccgctcagccgcagttccacaccgctgctgccaaaggacatggactcctgcttggatacctccaccgagcagtttttcaggccgctggtcttttcacgcaggttctgcacataggtgtcggtatccaccgaggcgtcgtccttgagggtgatggacaccgaaccggcagaactgctgcccatcatgcccataccgccgcctccgccgctgacacgcagggagcagctttccacatcgggatcttcgctgatcatgctctcgatctcttccataatggcgttggtgttctccagatccaatccggagcgggtctccaccgaaacactgatggtgttggtgctgccggcgggcatcagctccatatcaatctgtgtgaacaggaagcccgctatggcaaggcaggcaatggcagaggccaccacagtttttctggcccgcagcgcccggcgcagcagagcttcatacttgccctccagcgcatgcatcatcacatgggaacgggaggtgagcttttccctcggacgcatcttcacaaagagcagcggtaccagcgtgagggcgccgagcatcgaagccagcagcgagaacacaatggtatagcacacatcccggaagagctgtccggacatgccgtccatcatggcgatgggcaggaataccaccacggtggtggcagtggaggccacaatggacgagaataccaggttggcgcccacatggacggcatccacatagtccaggccgtcctcggtggacttgaagcagctgtcgatgacgacgatggagctgtccaccatcataccgatgcccaccaccaggccgcccagggacatgaggttgatgctcatgtcaaaggccgccatgaggatcagggctgccagcaccgaagtgggcatggtgacgccgacgatgaaggagctcttccactcaccgaagaagaacaccagtaccagggcggcaatgaccagaccttcgatgagcgaggtgacaacgctcatgatgttgtcatagatgtcctcaccgctgttgctgatgatctcgagagtcaggcccaggctgctgtcggcattgaactcattgaccagctcttcgatctggttgcagatggatacggtattgccgtcctgctccttggtgaccgaaatgctgatgttctcctcaccgttctgacggctgtacgaggtgcgttcctgttccaccatctccacatccgccacatccgagaggtagatcaccgctccggacggcagcaaaacgggaatatcctccaggtcccgccaggagtcatactccgcgctgccgatgagggtcagggagatgccgccccggttgagttcacccagagtggtttcatattccgccgaggagatggcactggcgatctgctgcatgctcagaccgtactgggtcatggtgtcctcatcgagcagcacccggatatactgccgggtaccgccgctgacctccacatctgccactccttcgatccgttcgatctccggcacgatattgtcctccacataggccacagcgttgtcggcatcggtggtggagatggagatattgaggatcgaactgttcatgctgctggaatccatctgcatgacggtgggatcggaacagtcttccggaagctgcaccatagccagggcggaagtgatgtcctggtacttgtcatcggtgtccacatcgcagccaaattccagcatgatcatggaagatccctcactggaagtggaggtcatcgactccacttcggtgatgcccgaaagagccgattcgatcttctgggtgaccatctcgtccacctcatccggcgaggcatcgggatagctggtcataatggtcatggtgggcatattcatctccggcgtggactccagcggcatctcaaagaccgaggaaacaccgaacagaatcaggctgaccagacagataaagacgcagaccggccgcttgactgaaaaatccggcagagaaaacatcattgagcctccttctgttcactgggggcagtcagggctgcgtcaccggcttccggactggtttccggggctgtttccccctcgccgtccggtgtttccgcggcggaatcctcccccggctgctcagcggcagcggactgctccagttcctcacaggtgacgctggcgccgtccttgaggtcggggtgccaggtggagataacggcgtcctcggctgtgattcccgagatcaccgatacggtatccttgctggtgatgccgatctcgatgtcatgccggacggcagtcccgttttcgtagacatagacatagggctggttctcatcgtattccaccagatcgatgtccagcagcagggtctcctccgccttggcggtggaagcgcgcaccttgacagcgatgccggtgcggtcggttcccagatcctccaggggctgggcggtcaccgagaagagaccagtggtctcatcggcctgcaccgacagctcggtcaccacagcggcatactcattgccgccatagatgatggtgacctcatcgcccagtgagagggccgaagccgcctccgccgacacatcaaagttcaccacctgttcgccgtcggtctggatcacataggcggctgtggcgggcgaagccatatccgattcctccaccgacttggatacgatggtgccggataccggcgcggcgacattggcgttttccagtgcctccaccgctgcttcataggtgttcagcgcctgctggatggtataggaggccgagccctctccatcttcgccgccggtcaccagctcatagctctcccgggcatattccatatcgtcccgggcgttgctcttctgggtcttgtaggtctcctccaggcgctcatattccttgtagagggaattgtagtcgctgatggcgtcatcataggcctccttggttctctctacctcagcctgctcatctgtggtatcctcacctgctgcctccgcgtccgcaagggcctgctgggcattctcccaggcggttttggcctggttcttttccgaacgcagggtgtccagctggtcctcatattcatcttccaggtcctccagattgtccgaggcggtctggtagctctgggcgctggaattataggatttttccgcgttgagcagggaggaatccgccgaattcagggccgactggtactgcagataggcgctgtccacctgctcctgcaggtcctcggtatccagggtgaacagcagatccccttcactcacggtctgtcccaccgaagcataggtctgtgtgacctgggcctgggtgggggcatataccttgatggtccgggccgcttcgatcttgccggcaaattcactgttccggtcgatactgccatattccgcataggtcacctgcaccgaaatggcgctgctttgcatctcaccggcggctctcccggatggtgagcagcattctgcacctctccagtctggaccattgcagcgaactgcccggctgccgggaattctccctggacgaacagctccgacggtgcctgctggaactggagccccactggacccggaagcatctggaactggatctggagctgccggaggtgcgctgtaccggctcggaggaactgtgccggcagatctggcagaacctctactccaacgccatcaaattcacgccggacggcggcaccatcaccacccggatcaccaccgaaccgggctgggtgaccgtctctatctcggataccggcatcggaatgcccggggaggtgcagaaacacatctttgaaaagttctaccagggggacgcctcacacagtaccaatggcaccggccttgggctggcgctggcaaagcggatcaccgacctgcacggcggctccatctcagttcgcagcgccccgggcgagggctcctgtttttcggtgcggctgccggtgcagcccgcctcccggcggctctgtgccaaaccaggtcaatcataaaaaaggagccgtgggtctcccctgttcggggaaaacccacggctcctgccgcagtccgtttccggtcagccgggaacggatctttttttacttatagtactttacagcgcccttgaagaccggctgatacttgtggccctcaatgttgcggtatacgccctcggagaagcgctcgaagtgcgccatcttgccgaatacacggccgtccggcgaggtgatgccctccacggcgtagctcgaaccgttggggttgtattccactgccatgctcggcttgccgctgagatccacatactggctggcgatctgaccatttgccaccagctcggcaaactgcttctcgctgcagacgaaccggccctcgccatgggacagacccacagtgtagacaccgcccagttcgcactcgctcagccagggagaccggttggaaaccaccttggtgcgcaccatagtggactggtggcgtccgatcttgttgaaggtgagggtgggatcgctggccttgatgtccacaatctcgccgtagggcaccagacccagcttgatcagagcctggaagccgttgcagataccgttcatcagaccgtcccggttccggagcagctccatcactgcctcggtgacagccgggctgcggaagaaggctgtgatgaacttgcccgagccatccggctcatcaccgccggagaaaccgccggggatggagacgatctggctctgacggatcagctgggcgaaggcgttggccgactcctcgatctcagcggaggtacggttgcgcaccacgaagatctcgggagcagcgccctccatggcaaagactcttgccacatcgtattcgcagttggtgcccgggaatacggggatcagcacacggggcttggcgaatttttcgctggcagcgatcaccatgccgccatcccagcgcacttccggagcagcctccttgggggtgggcatgtggtagggatagacgctgtggagggtctcctcccagcggccccgcatatccaggccgccgatggtctcgccgtccagacggatcataaagtcctcggtggtatggcccagcagctcgccgccatcacactcgcccacgcactccagcaggatagcgccgtgcagcggagcaaagacacggtccacatcggtgccctcttcaaaggcaaaggcaaagccgatgccgttgcccagagccatcttggtgatgccctcgcagatgccgccggcacccactgcccagccggttaccgctgtgccgtccgcaatgcggtcccggacagtgtccagcatggtgcgcaggctctcgaagtcaggcagaccgttttcgtcggtcttgggggcgaacaggtaaaccggatgtcctgccgccttgaactcggtggagatgatgcggtcgatcttctgggtggaaaccgcaaaggagatcagcgtcggaggaacatggatgtcctcgaagctgccgctcatggaatccttgccgccgatggcgccggcacccagctccagctgtgcccgcagcgcgcccagcagagcggcaaagggcttgccccagcggtcagcgtcccggcccagcttctcgaagtactcctggaaggagagccagcagtgccgccagtccgcaccggctgcggtgagcttggcaatggattcgatcacggcatacatggcgccgtggtaggggctctgctcggacaggtagggatcgaagccccaggccatcatcgagcaggtggtggtcttgccgtccaggacggggatcttggcagccatcacctgagagggggacagctggtgcttgccgccgaagggcagcagcacggtaccgccgctgatggtggagtcaaagcgctgtaccaggcccttctgggaggccacattcagcgagccgacccgctgcatccagcgctcggaggccgaaccggtctcctgctcgggctgacgcagagcgggggcagctacttccaccgaaatatgcttggcagcgccgttggagttcaggaagtcacgggacaggtccacgatggtgcgtccgttccagtgcataaccagacggttcttgtcggtcaccactgccacgggggtagccgagaggttctccttctcggcagcggcgatgaagcggtcggcgttctcagccgaaaccaccactgccatacgctcctgggactcactgattgccagctcggtgccgtccaggccctcatacttcttgggcacacggtccagctggatatccaggccgtctgccagctcgccgatggcaaccgatacaccgccggcaccgaagtcgttgcagcggcggatcagacgggtgacctccgggttgcggaacaggcgctggatcttgcgctcctcgggagcgttgcccttctgcacctctgcgccgcaggtggtcagcgactgggcggtatggctcttggaggaaccggtggcaccgccgcagccgtcccgtccggtggcgccgcccagcaggatcaccacatcgccgggggcgggaacttcccgtaccacagcgtcagcgggagcagcacccatgacagcgcccacttccatacgcttggctacatagccggggtgatatacctctgccacatgaccggtagccagaccgatctggttgccgtaggagctgtaaccggcggcagcggtggtgacgatcttgcgctggggcagcttgccgggcagggtctgggaagccggggtgaggggattgcccgcaccggtgaggcgcatggcctggtatacatagctgcgtcccgacagcgggtcacggatggcgccgcccagacaggtggcagcaccgccgaagggctcgatctcggtggggtggttgtgtgtttcattcttgaacatcagcagccagtcctcagccttgccgtcgtgatccacggtgatcttcaccgaacaggcgttgatctcctcgctctcgtccaggtcggtgaggatgcccgcccggcgcagttccttggcgccgatggtggcaagatccatcagggtcaccggcttgttcttgccggcatggacagtcttacgcagttccagatagttcttgtattcctcggcaatgtagtcacagccgatcttcacatcgtcgatctgggtggcaaaggtggtgtgccggcagtgatccgaccagtaggtgtcgatcatcttcacttcggtgatggtggggtcacggtgctcggtatcccggaagtaggcctgacagcagagtgcgtcgtccagatccatggcaaggccctgggtacggataaactcctccagaccggcccggtccagagcggtaaagccctctactgtggcaacggtctccggcacagcatagcgggcctccagggtctcaggcatctccagcgaagcctcccgggattccaccgggttgatcagataggccttgatccgctcgagttcctcatcggtgatgtcgccctccagtacatagacccgggcattctgcacggtgggacgctcgcacagggtggcgagctggatgcactgggcgcaggaatcggcccgctggtcgaactgaccgggcaggtactcaatggcaaagaccttgccgtcaccggcagggagctcgtcatagaccatatccaccgggggctcggagaagacggtatcccgcaccgaatcgaatacctcccggctgatgccctccacatcataccggttcagcagccggacatggcggagcttcgaaagcccgagatcgttccggagcgacgccagaaccccggcagcctccacggcaaagggttccttcttctccacatagatcctgtaaacagacatattgcacaactccttaaacctctgccgcccgaaagcggcgttttttgttttgcactgtttttcctgttctatatcgtcaatccctgtcctgtcagggagaaacggctctgttatccgccaaagacgccggtacagccctccggaccggcttcggtaatccggaccggaaggagctctccccggcggtcatccgcacagcggacccgcaccggggtgtagttgggagtatagccccggacccagtccggctcccgcttcttttcaatcagcaccatctgcacagtgcccacctgggcctcgtaaaacgcccgggcgctgccggcggtgatctctgccagttccgaagcccggcggcggcgctcctccatgggaaccgggtcgggcatggaagcagccgctgtgccccggcgctccgaataggggaagatatgtaccatggcgaaacccatctcccggacaaagccgcaggtctctgcgaactcctcgggagtctccccagggaagccggtgatcacatcggtggtgatggcgcacccggggaacttctcccggagcgccccggcgatctcccggtagcgggcagtggtataatggcggttcatccgggccagattggcgtcacagccgctctggagcgagagatggaactgcccgcagagctgcggcactgccgccagccgtgcgatgtccgcatcggtgagcagttccggctccagggagccgatgcgcacccggtcgatgcccggcaccgaggccgctgcctccaccgcgtcagggagacgcagccccagctcccgtccgtagagggagaggttgataccggtgagcaccacttcccggtagcctgccgccgccagtcccgctacctcctcccggagagcggagagctccttggagcgcagcggcccccgggcatagggtatgatgcagtaggcgcagaactgggtgcagccgtcctggatctttaggaaggcccgggtgtggccttcgtcccccagggcctccagcggctcgaagggctcgctcttctcatggggcagcacccgcaccagccgctgccggtgggtgaggtactcctccaccgcgtccaccaccgcccggcgctcccgggtgcccagcaccaggtcggcttcgggcagttcctcggcggcatggggatcggtctggggcaggcagccggtgagggccaccactgccagcggatgttcccggcgcagccgccggacgatctgccgtgtctttttatcaccggaggaggtgacggtgcaggagttgacgatgtagagatccgcctcctgtgccggcggtacgatctcatacccccggcggcggaacagctcctccatggcctgggattcatactggttgaccttgcagcccagcgtataaaatgcggccttcatcgtccacctccatgtgggaaatcaaaatggcggcaaaaatcctgttatttctgccgtcctaccttagattataaacaatccggcaggaaattacaatctcaccgggcattccgggccgcatttcccggcagtttggacagtttcacacaaaaccggaaatttcccggcagcttttaagcgatttccccattcccgggctgtcaatttctttgggactgtgctatgataaagacaaatccaagcggtacggaaaggaaggaagcgtatgatcttcgcaaacaaaggctgggagaatactcccgaagctgcccggctggcctgtgactatgcccgggaacacggcatcaaacatgtggtgatcgcctccaaaaccggctataccaccgacatcttcatggacacctttgccaaggcaggtgtggatgcccactttgtgaatgtcacccactgctatggcgacctgggccccggtcagtgtgagatgacccccgaaaagcgccgggagctcaccgacaagggcgtgactgtcatcactgccacccatgccctctcgggcgcggaacggggcatcgtcaacaagtacggcggcgtcaccccggctatcctcatggcggacaccctcaagatgctcggacagggcatgaaggtgggcgtggagatctccctgatggccatggacaacggcgctgttccctatggcgaggagatcctggcggtaggcggctgcggtcatggcgccgactatgtcatcagcctgatccccggccactccaacaacctctttgaaaccaaggtcatcgacatcatctgcaagccgagaatttcctgacccctcccgaaaaaagacagctcccgggctgtcttttttctttttcctgccggggatcacagctatttgtcccctttgccgcatagatataaagggatcgtatccgatttttttgcggacaaaggagtgctgacctatgaaaaaacacctgtgcagagctctgctggctctgacgctggcactggcggtaacgggaaccacccttcccaccgcctgggccgctgaatcagaggagaatgcccctctggactgtgcctccgccctgctgatggaagcggaaagcggacgggtactgtttgaatacaatgccgatgaccgccatgccccggcctccatcaccaagatcatgaccatgctgctggtctgcgaggcggtggacgccgggcagatctccctggacgacattgtcaccacctccccctatgcctcctccatgggcggatcggagatctggctcgagccctatgaaaccatgacggtggacgagatgctccgggccactgccattgcctccgccaatgacgccgctgtggccctgggggaacacctggcgggcactgaagccatgttcgccgataagatgaaccagaaggcggcacagctgggcatggactccacccactttgtcaacgcctgcgggttggacgaggagggccactacaccaccgcccgggacattgcagtcatggcaagggaactgcttcagcaccggtggatcaccgactacaccaccgtctggcaggataccctccggggcggcgaaaccgaactggtgaacaccaaccgcctggcgcggttctatgacgggtgcatcgggctcaagaccggcaccaccgacgatgccggctgctgtgtctgcgcggtggcggagcgggacggcatgaccctcatcgccgtgatcctgggcgccccagacagcgacacccgctttgagagcgccaagagcctgctggactatgggttcgcaagctatgctctggccccggcccccgaagtggaggatcagctctcgccggtgccggtgcgccatggcaccgaacccacggtggccccggtgccggacgctccggagggcattctggtggagaaggcccgccggaacgacctgacctgcgaagcggaactcctgcccgaagtggaggcgccggtggaggagggacaggtgctgggaagcgtcaaagtcctccttgacggcgaggctctgacagaatatgatattatcgcctcccaggcagtgccccgtatggaattcggtacggcgttctgccggctcctgagcgccctttgcggggctgatgtagagtaaatcaagaattatttgttaaaaatcaataaaatgattcaggggagtaaagtatatcttgaaaaaatgaacaagatagagtagaatagtgttaaagcacaaaggagtaaaaaagatgtccctgattttagatgaacagtttttgagcggctttgttacccagtcggaactggacgcgtacaccggacggcttgcggcagcgcgggagcgcctgcacaccccggacggacagcccaagggctggcgcaccctcccgtgtgataccggagaggaacttctctcggctgtggaaaccgcagcccggacaatccgggaagaggcggacatcctgctggtgatcggcatcggcggctcctatctcggtgccaaggccgcactggacttcctgcccggtgccaatggccccgaagtgctgttcctcggcaacgatatgagtccctcccatctctcggaggttctctcccggtgtgaaggccgggagatcgccgtcaatgtcatctccaaatccggttccaccaccgagccggccattgcgttccggctggttctggaactgatgcagcggcgatatggcagcgaggctgcccgcaggatctggtgcaccaccgatcctgccagcggtattctccggcagatgtgtgaggaagagggctggggccggttcgaaatcccccgggatgtgggcggacggttctcggtactgactccggtgggactgcttcccatcgccgccgcgggacatgacatccgggccctgatggaaggtgcccgcaccgcacagcggctctatgatgagccggaccatgatctgcttctcaatccggcataccgttatgccgcgattcaggatattctttcccggaagggaaaaagtgtggaactcttcggcgcctatgaacctttcgccagcggtctttcccagtggctgatccagctgtacggagagagctgcggcaaggacggaaaggggctgttccccgcttcggcgcagttttccaccgatctccactctctgggacagtacatccaggagggccagcgcatcctgtgtgaaacagtgctggactttgccgataccggctgcggtctaaccgttccggtactgggcagcgaccatgatggtctgggttatctggaaggcagaagcctgagtgagatcaaccgcattgccctgatggcgactgccgaagcccattggaacggcggcgtaccggtgacgctggtcaccgcaccccgacgggacgcacagaccctgggcgaactcttctacttcttcgaactgagctgtgctgtatccgggtatctgctggggatcaatcccttcgaccagccgggtgtggaacagtacaagcgcaatatgttccgtctgctgggcaagccgggctataccggaacagaggcaaaataaagattgttgtaatcactgtattcgttacagcggatatacaaattaaagtgacagggaggaatttactatgattagactgatcgttggactgaaaggcagcggcaagaccacaagactgattgaaatggtcaatgaggctgtggcagcggaaaagggcgatgtgatctgcgtggaaaagaccaccaagctcaacaatgacctggaccgtcgggtgcgcctgatcgacatggacgactatgaggttggcaattttgatggcctctatgggttcctgaccggtctgtatgccgcaaattacgacacaactgatatctttgtggaccagaccctgaagatcgccggcgatgacctcaccgaactggcgaagatgatcgagcggctggacgccacagctgcgaaggaaggctttgccattaccttcactatttcggctgatccctctgctctccctgcagcgcttggtaaatatgtgatctgacctaattcagaaccgtatggaaaaaccggcgcggccctgcggctgcgctgtttttctgtgtcaatctccccctgtgaaaaaaagcggaccgtcctccccggacgatccgcttttttatgctgtttaccgctgttctgccgggactacttcccggaataccgcctgctgccggggcgggatcttcttatccttgtgcagccgtccgaaataccagctgccgaactgcatctcctgttccacccggtccaggaaggctcccaggggcgagatttcggtgcggtcgccgcccaggaagatgcgcatccggtcggacggctgatgggtgatgatgaaatccaccccgccgctttgggtcaggcgttcttccgcagctgccagttcctcggctgtgggcatctcctcactgtgccaggtgccgctctccaggcgctcatccatatcctcgctgactccgccgcccaggaagaataccttcttcccctccagcgtcaggatcgtcccgcgttcggcatagagcagattcccttcaatgcggcgcactgtgccgccggcatactcctcctccgggaactcccggagcatgggcaggttgtcatgggtgccgtccacaaagatggtggtgtacttctgcttgccgatcttccggcgcagcttcagttctgccgggcttccatcccatacaaagccaaaatccccgcataccagcagggtatccccttttttcagccgccggagcgccttgtccgaaagccgtgccggatcaccgtgcagatcacctgttacataaatcaaagctccatccctcccggggaattgtaaaaatttttacccggcttttaatccccgggcaggtttgctataatgatattgtattgactgttttcctgtgcccgggacagtcccggtgaaaatcccgccggagatgccatatgccggtacagcggtcattgtactgccgttttcctccctggggagaaacagtctaatgcagcgattatgtcatgaagcgaaatggcataatcggccattgggacaaatcgtccggcctgaaagctattataccatgtttttcgcctcgtggtaaaacaggggcatctttttcatctgccctgtccaggacaggtaccggacctcaaaggcccattattatgactgcataccggtcattatatcatattcattcagccgtgggaaaggaatatcaaacggatgcgtaaactcaaaactgtcgccagtctgctgctggctgttgtaatcaccggactttctgccatcacaccagcctttgccgattatgatccgggcttcgatgtggatgccgaagcggtttacttcatcaatctggataccggcaaggtgatctatgaaaaggacgccgataaaaaggtctatccggcgtccaccaccaaaattatgaccgccctgctggcactggaaaatatcccggatctggatacaccgcagatcgagctcaagctctacatccagaatgccctgagcggcaccggcgcttcgctggcaggtattctccggggcgagaccttcacccccagggaactgctctatgcggcgctgctcccctcgggcaacgaagccgccatgatgctcggcgactatgtgggtgacggcagcctggactacttcgccgagatgatgaatgaaaaggccgcggaactcggagcggtcaacacccactttgtcaacgccagcggcatgcatgacgacgaccattacaccactgcctatgatatgtatctgatcaccatggcagccctggagaatgaaaccttccgggagatcgtttccaccaactactactatgccggagaggatcagaacggcaatcccctgcactggaacaccaccaacttcctgatctcgcccggcagtacctattattatccctatgccaccggtgtcaaaaccggtaccaccgatgaagccggacgctgtctggtgagcaccgcggaaaaggacggctatcactacctgatggtgatgatgggtgcgccccagtacgattccaacggtgaaaagctggaggaaaacatggtcttcaagcagaccattgagctctatgactgggcgttcagttccttctccaacaagaccctcatcgaaaaggatgtgggtgtgggcgaagtcccgctgaagctcgcccggggcggcaaggattatctgctcatcaagagcggtgaagtattcaccgacctgctccccaatgagatcgaagccagctccatcaccatggaactggatctgcccgccgtggtgaatgcccccattaaggagggcgatcaggtgggcaccatccgcctgatgctcgccggtgaggagattggcagtgtcccggctgtggcagctgaagatgtggacgccagcctgatcgccaccctcatcgaccagttcaagcgtctgttccgcagcttccttgccaagttcattgtggtctttgtgatcctgagcatcattgcctatatcaccattaccgtcctgcggggccgcaacaagaaccgctattaccgccgccggggctgatttcccagtataataccacagcaattcaacaattcgtataaaaaacaccgggctttccgcagggaaaacccggtgttttcttctattgtcagaggcgtgcggctcagtccgcccggaacagatccgccaccaggacggtgatgtcatcctcccgtccgggctgctgacgctcccgggcagtcctggcaaggtcctccgccagctgctgggccgagagttccgccccggcttccagctgggatttgacccagtccgctccggtggctgtgactccgtccgacaccagcaccagccggtccccctcccggagggtcaggctgctcttttcaaaggcggcgccctccagaatgcccgccggcagcgaatcagactgcacatacccggcccgtccgttcttcaccaggaaggtgggggcggcaccggccttgtagaactctgcccgcccggtaaagagatccactgccgccacatcggcggtggcaagggtctcctccccgctcttgagcagcagcgccgagttgacgatcttcagggcggcatcacagcccactcccgcttccagcagccgccggagcagatcggaggtcatggcgctgtccaccgccgcattgccgccggtgcccatgccgtccgaaaggatcagcacaaaccgtccggtgtcggtggtcaggctgcggtaggcgtccccggtgatcctcgaccccgtttcggtgagctgactggaaccccagtccaccgtatagactgcccgctcctgccagctgaggtaggcatgtccgcccactgtgcgcacctggggcagttccagatcccgtcccagcagttcccccatctccagagccagggctgtcttgtccagcctcggcagtttgagggggttgatctcacactccatcaggagccggttctcccggtccagattgcagcagatctcccctgggtccagtccctgggctgccagacagctccgggccttctcctcaagtttcgcgtcccggcggcagaagttctcccaccgtccggacagctcctccaccagcatagccagcccctcaaactgatcggtgaccacaccccggatctggctgaccttccggcggctgcccagctctgcctggtaccgggcataacccgctgtcagggcagctgccagctcgtccggcgcccggcagacactccggagcgtttcggggatctgtccgctctccagctgaccgtcccggcgcaggatcagcatacagttgttcacagcgtccatggtctggtcgaattcactctgccagcaccggtaccgccggggacatttccggcagacagtatccatggtctgctgccacacatcttccacactgcacaggtgcatgctgcccagcttccgggatacctcccgggtggtgtcgccgatctcccgcagcgcctgggcaaaccgctccatctgcatccgcagagccatccgctcggcggaggtctccccggcggcattctcccgggcgggctggacaaaccgcaccaccttgcccggcagcaccagcacgatcaggcaggccagcaggttttccgccagggcgatctgcatcatccgggaggatggcgaggtcaccgagaccagtgctgtcaccgccagatagcacagcgccgtgggaatgcgcccgaaccggttcgccgtcccagccagcaggccgccggcggcataactgcccatgaggaaggcggtgtccttgcccagcgccagagccaccagcccggcgcccactcccagcacagctccggaagcggagcccccggcaaaggcaaagagcagcactccggcagaggccagcacccgtccggcagagatccccgctgcggtgacctggcccaatccggcggcaatgagcagaaaggtgacatagaggcagcccagctcctcctggtaagcggaggccacccggctgcggaggatcacaaaggaccgggcaaaaaaccaggcgctgcccgctgccagcatggacactgccactgccatgagcagacgataggggtcaccgcccagggcgaaggccgcagccacccctcccaccagcatgcagccccctgccagcacagccggcgcctggggaatgcgtttccacaggctgccgctggagagggtccaccgcaccccgcccagcagcaggatggcggcggcatattccatggcactgcccggcgccgggaaccagaggtatccgaacagcgccccgaacagtgccggcaggaacagtccctccggcaccgcggcagccagcgccaccccgaatggagcaatcccgcccaggatatgcgctccggcaaagacagcgcctccggcggcagctgctgccatttccaatgcgcgccggtactgtccggcggtctgcctgagcctgtcccggatgggaagcccggcataatcggttctgttttgcatacgctttcacctgtttctgtgcataacctgtccgtttccggtcaaaaatttcccggaatccgggcaggcctgtccatttatagtattttatagcctgattataactttttgtatagtgcgaaagcagtcagaacccggtgtcgaaacccggtatgtccccgggaaaacgaatggtttttcttgacaaacatacccctgagagatagtattattagtaagtatctctttgtgcggtttctgcaagccgcctgtcaataaacattccaaaacggaggctttgaccatgaaatttgaccatgtacgcacccgatttgcccccagtccgaccggctatatgcatgtcggtaacctgcggacagccctgtatgcctatcttactgccaagagcatgggcggtaaaatgatcctgcggatcgaggatactgaccaggagcgtcaggtggaaggcgccgtggatattatctacaacaccatgcgggacaccggcctgctgtgggacgagggtccggatatcggcggtccggtaggcccctatgtacagagtgagcgcatgggcatctataaggaatatgccctcaagctggtagagctgggcgccgcttactactgcttctgcgacaaggagcgtctggaggaggtccgggagctgcagaaggcttcgggcattgctccccagtatgaccgccactgccgcaacctcacccccgaggaggttcaggctaagctggatgccggtgaaccctatgtaatccgtcagaaggtgccgctggaaggcactaccacctttgatgatgtagtctatggctccatcacagtggaaaacagcaccctggacgatcaggtcctgctgaaggctgacggcttccccacctataactttgccaacgttgtggacgaccatctcatgggcatcacccatgtaatccgcggcagcgagtatctctcctccgcccccaagtacaacctgctctatgaggctttcggctgggagatcccgatctatatgcactgcccgccggttatgaaggacgccacccacaagctctccaagcgcaacggtgacgcctcctatcaggatctggtggctcagggctacctcaaggaagccatcctcaactacatcctgctgctgggctggagccccaagagtgaaaaggaagtcttctccctcccggagatgatcgaggcctttgatatccatggcatttccaagtccccggcgatctttgataccgtcaagctgcgcttcctcaacggtgagtatatccgtgccctgacccccgagcagttccatgacatggctctgccgtggattcgcaagggtgtaaagcgggaagatgtggacaccaagctcatcgcttccctgctgcagccccgctgcgaagttctgggcgatattcccgagcagctggacttcattgacgagctgcccgactactccaccgacctctatgtgagcaagaagatgaagaccaacgaggagacctcgctggagatcctgcgtcagatcctgccggtgatggaggccatggacgacttctcggacgaggctgttcacactgccatgttcgacctgattgccaagctgggcgtcaagaacggctatctgctgtggccgctgcgcattgccctgagcggcaagcagtttacccccggcggcggcgtggaaattgctgcgatcctcggcaaggaggagagcctgaagcgcctcaagaagggcatcgaaaaactggaaaaccgctgaatcaacccataagaaaaaggctggaatttcttccagcctttttgttatgcctgggcagagctgtcgggcgtgaacagttcgtccacccgcacccccagctccgcagccagatggaacgccagtgccagagtggggtcatacttgttgttctcaatggcgttgatggtctggcgggatacgccgcagcgccgggccagttcctcctgggagagcccctgttcccgccgcagatcccggatctggttcttcatagtcagtcaccgtaccgtcttttatagtagcagagggaaacacagtagaccagcgccgctgtcatcagcagcaccagcggattcttctcccccatgggaatgccctgggtgatgcttcccgccacacccagaatgatctccagcagcagcattcccacaaaggcggaaaaactggtgcttccggcatggagcaggatcagcctgcggcgttcatcgccctggcgcaggatggaaacaaacatcaccccggtcagccccagcagcagaaagaatcccgcaaagaaaagccagccccaccagggcattgcctgtgctgtattcattcttcattcctcctttgagatgtcaaattctttttacatctttactgtatcacaccaaaggggaaatgtcaaatactttttacatatttgaaagttgccccgctaaagcggtttctacttttcttccacccgggtttgtgctacaatagaaacagtattttccggcggatttccgccaaaaggagttgaggaaaatgcagttccatcgttccgcccatgccggatcgctgcggcccaccgccgccaataaaatcctggacatgggtgctgatcccgccatcatttcgctggcagcaggcaatcccgcacccgaggcctatcccatcgccgcggtacaggacatcacccgccggattctggaggaggagcctctggaggcgctccagtacagtgtcccccagggcgatccgtccctgcgccgggctgtgaccgactggatgcggtcccgctatggctgcggcagggagtttgatgactgtgtcatcgtctccggcgctcagcagggcggcgatctcaccgcccggattctctgcgatcccggcgacatcgttctctgtgaggagcccaccttcctgggctgtctggatgccttccgtgctgcgggagcccggctccggggtgtgcccatgcaggaggacggcatcgatgtggacgcactggaagctgctctgcgggaaggcggtcccatccgtttcctctacaccattcccaacttccagaatcccaccggcatcaccatgtcgatggaaaagcgccgccgggtctatgaactggcagtgcagtatgatattctgatcctggaggacaacccctatggcgatctccgcttccgcggggaagccctgccgcccatcaagagcctggatgaaaccggtcatgtgatctacatgggcagtttttccaagatcctggctccgggggtacgcacgggttatgtccttgcccaccgggatctcattgcacagtatactaccctgaaaagcgcctgtgatgtccattccaatatcctggcgcagaagatctgttaccggttcctcaccgaacaggatatggatgcgcaccttgccggcctggccgcagtatatcgccgcaagagtacgctgatgctcgatgcattcgaccgctgctttgacagccgtgtggcccgcaccgagccggacggcggcctgtttgtttggtgtaccctgcctgagggctgtgattcccagccgtttgccgcgtccgccgccgaagccggtgtgctggttgtgcccggagccggattcatgaccgacccggaaaccatcagccgcagcttccggctcaactactccaccccttcggatgaggccattctccggggtatggagatcctgggccggctcacccattctctgtaattcaatgacgattttggaggaataaataccatggataatcagaatcagaaaaagccggttgtattctcgggcattcagcccaccggtgtgatgacactcggcaactatctgggcgcgctcaagaactgggtcaagctccaggacgactatgactgttactactgcatcgtggatatgcatgctctcactgtacggcaggacccggtgcagttccgcaagaatatcctggatgcctatgccctgatgctggcctgcggcattgatcccgaccgcagcactgcctttatccagagccatgtcaagacccatgccgagctggcctgggtgctcaactgcaatactcccttcggggaactgagccgtatgacccagttcaaggacaagagccagaagcaccctgacaatgtcaatgccggtctgttcacctaccccaccctgatggcagcggatattctgctctatcaggctgacctggtaccggtaggtgtggatcagaagcagcatctggaactgacccggaacattgcccagcgcttcaaccaggcctatggcgataccttcgtagtgccggacggctatatccctgctgccaatgagggcgccaagatcatgtccctgcaggaacccaccaagaagatgtccaagtcggacgagaaccccaacgccttcatcaccattctggatgacaaggataccatcgtgcgcaagttcaagcgtgcggtcaccgactcggatatggagatccgctatgccgagggcaaggacggcatcaacaacctgctgaccatctactcggtggtaaccggcaagagcattgccgaagcagaggcggagtttgccggcaagggctatggcgacttcaagctggctgtgggcgaagcagtggcagaccatctgaagcccatccgggatcgctttgccgagctgcgttcggataaggcccagctggagagcttctaccatgccggtgctgacaaggccctgtatgtttcccagaagaccctgagcaaggtttacaagaagatcggctttatccgctgacctctatacgaatagtaaaaaacagggcggaatatacagttccgttctgttttttgttggatcagcagacctctgcctgtatggagccgggctgctgttccatgtgctgtgtgcaatccagcccaccgcccgcatgcttccggcgttggcaaatgccatccgggcagcaatcttcagacccatgggtgggcgcaagcagcattctgcggactgcgcatccggagtctgtctgtcccccccgccggggccatggaaagctgtcctgcaaatgctgtccacagtcgaaaatctgtgatattctatccggttattccaatccgtatagtgacttctgtgcgcagtaaaagccggtcagagacggtcacccctctcccctgc

SEQ ID NO: 2830 - DNA, 14349 bp, Unknown
  16S sequences of unknown bacteria
gaagagtgcgggaaaacgcgggagcgttttcagagggggcgcagggaaggaaccggaacaggaagcggagaggcggcgtccggaggtggaagagtgcgggaaaacgcgggagcgttttcagagggggcgcagggaaggaaccggaacaagaagcggagaggcgccccttgtgcatcctccccaataaccgtcgacacggttcttcaaaattcggcaggcaaatcgtggcacccaccctttccaccatcgcctgatttgtggtacaataaaaatgatctgtgacatgggaaggaatagctgtcgcagccctgccggcgcagagagggccccacataaggctccttgggacaactcttggcaaggcgtcttccggtatgatctggaggtctccaaacaccgtacggcgacggtgcctggaccgtccagttttgggatatttccatcaaagagccgccgtgtatgccgggacagggccacacggcgaaaatcggggaccgaaaaggagacgttgaaattggcggacaagattaccagtgagacgattttcaatctgcaggaccgggtggcgccgctcgacatcatcgcgctgccgggtacggaggagctcggcgggaaaatcaacgcgcatttgcaggaatgggcctgcaacagcggaagggagcaggattcctttttgattccggtcgaatgcccccgcttttcctccggagacggcaaaggcatgattaaggccagcatccgtggcgacgatctgtttatcctggtggatgtgggcaattacagctgtacatacaatatgttcggccgggaaaacagcatgtcccccgacgaccatttccaggatctcaaacggattatccaggcggccggcggcaaggcccaccgtatcaacgtcattatgcccatcctctacggcgggcgtcagcaccgccgcagctatcgggaatccctcgactgcgcggtctcactgcaggagctcgagcggatgggggtgtccaacatcatcacctttgacgcccacgacgcgcgggtgcagaacgcggtccctctcatgggtttcgacaatgtcatccccgcctatcagaccctcaaagccctgttccacagcttccctgacctgatccccgaccgggagcatctcatgatcgtcagccccgacgagggcgccatgcaccgcaacatgtattacgcttccatcatgggtctggacctcggcatgttctataagcgccgggattacgcccgggtggtcaacggccggaatcccatcgtcgcccacgaatatctgggtgattcggtggaggggcgggacattttcatcgccgacgatatcatctcctccggtgagtccatgctggatattgcctatgagctcaaaaaacgcaaggcgggccgtattttcgcctatgccacctatcccatcttcacaaatgggctggatgcttttgacaaggcctatgaggaaggggtcatcgccggggtgctcggcaccaatctcacctaccggaccccggctctccggcagcgggaatggttctgcgaggtggacgtttccaaatatatcgcctatttcatcgccgcattgaaccacgacgtgtctgtcagcctcatcatcgatccccatgaaaaaatcaagaacctgctcgccgagcaccgtgcctgccagggccggtgatatgcaaacgggctttagaacagaaagaatggcgcatgatgaacgactatgatgtcctgatcgccggcagtggtgtggccggattgtatgcggcgctgaactttgcccccgaggtgcgggtgctggtgctgtcgaaaaaggagcggatgctctgcaacagcgccctggcccaggggggggttgctgcggtggtggacaaagaaaacgacgatttccgtctccatatcgcggacacgctgatcgccggcgggtataaaaataatctgcgcagcctggaaatcctggtcaacgaggggccggaggatgtgctgaggctgctcaaagagatgcacgtcgatttcgacagggactcggagcaccacatctccatgaccctggagggggggcattcccgccgccgcatcctgcatcacaaggactcgaccggccgtgagatcaccgagaagctcctggccgcggccatggaaaaacccaatatcacctttctcgattacgcccagctcgtgaatctggtgccgggggagggcggcttctgggcgcagctcctcgttggggacgagccccgggtgctgtcctgttcctactgtatcctctgcaccggcggcatcggccgggtgtatccgtacaccaccaactccgcgatcgctaccggcgacggcatcaccctggcgcatgagatgggtgcccgtatccggaacctgcatctggtgcagttccatcccacggcctttgctgctgcccaagggcgggagcggtttctcatctcggaggcggtccggggagaaggcgcgaccctgctcaacaaagacggagaacggtttatgtaccggtacgacgaacgcggcgaactcgcaccccgtgacgtcgtctctcgtgccattgtgcgggaggcggcccgtaccggcagcgaggacatgtatctcgatatccggttccggggtggggaattcatccgcaaccgcttccccatgatctatgaacgctgcctcgaggaaggggtcgacatcacaaaagaactgatccccgtgtttccgtgtcagcattacctgatgggggggatcgatgtgggggtttacggcgatactacggtggaccgtctgtacgcggccggggaatgctcccataccggggtccacggcctcaaccggctggcgagcaattccctgctggaagcgctggtgttcgcccgccggacgacctacgacatcagccgccggatgcggcacgagggcagcggcctcaccggggcggcgcccgtcctgcggatggagggccagcccttgcatcccgggcaccgcaccgcgatccgccggatcatgcaaaaggcctggttcgtcctgcctgattacgatgccgcggaacaagggctcgcgcaggccgaagagatcctgaaagacctgcagacaggaggctatgccctgacgaccgattttgtggaggcgaaaagcctcgccacggtctgcgtgctcatcctgcgggaggttttggaactgaaaaacggcggagagccggattaaggaggacaatgccatgcagctgcccctgtttgcggtggacgaggtgatccgcaccgccctccaagaggacatccactatctcgacaccaccaccgatctgatgatcccggccgatgcccgcgcttccgcccgtttcctggccaaggcggaaggggtggtctgcggcttggacgtggccctgcgggtgtttgcgctcttagacgacgcctttgaggcggaggtgtatctgccggagggatcgcacgtgagtccgggcgacctcatcgccagagtggagggacatacccgtgcacttctcgagggggaacgcacggcgctcaaccttctgcagcatatgtcgggcattgcgacggccaccgccaaagcggtggagaaggttaggggaacgagggctgttatcaccgacacccgcaaaaccctgccggggctgcgcgccctgcagaaatacgccgtcaccgtcggcggcgggaaaaaccaccgcttcaatttgtccgacggcgccatgctcaaggataaccatatcgacgctgccggcgggattccccaggcggtggcggctatccgggaaaagctcgggcatatggtgaaactcgaggtggagacccgcaacctcgacgaggtccggcaggcgctcgatgccggggcggacatcatcatgctcgacaatatggattgcccttccatggccgaagccgtcaggatcgtggatggccgggctctcctcgaggcgagcggcggtatccgggaggagaccctccgtcccgtcgccgaaaccggggtggacatcatctccatcggcgccctgacccattcggtcacggccctcgatatttccatgaagattcagaaaatatgaaaaaccccggacgggccgtcacggcccgtccggggtttttatgagactggggcggtgtgcatggatgattcgcaaggcaagagcggttctctataaatacagcaggggataaatccgccgtttcttatcatatggctattcaaggagagagaggaaccgccgatatacccggatggtgaggctgtacagcccttatatggcttcggcggcatcgcccgccggctttatttcgggggctttggagtcgtaaaaccataaaaataagccgtgtccccggaaccatacggctggggtacgcggctattttttatggggaaggcggtaacggtatagaaatgccctcgcctcctccggggatgagaacgaggccgtttcaccggtgatatattgcacggcgtcggtccattccgccaggggataatccctgccggcacagccggcgatcgcctcgcgcaggagcggcaggcggctggatgcatggagatcggaaagatattcacagccagtggccgtggccagacgttccagcagcggctcccggttctccgccttcatacgctcacctctatgggttgaattgacgcgctgccacgctcccttttggatgaaaaatcagacttttccaaccatgaccctggagtggggaaaaggctcgaaatagcgcgatttgcctatacatatcttttatatcacacgtggaggaatttgtctacctttttgaccatttctctaaaaaaatcaggccatctgtcccacccacttgaaaaaggtctgatgggtcaccccgagctgtctggccgcctcccgtccgctgatttctccttttttccaatcatcgtagaggagaaaaaagcggccggggatttccttttctggccggccgaaccgaacgccccgttccttggccgccgcgatcccctccgcctggcgctgccggatgctttcccgttccttctgcgcgacataggaaagcagctgcaggacaatatccgcgatgagggtgccggtcaaatcccgagtattgcgggtatcgagcaacggcatatccaataccaccatcgcgacccctttctttttggtcagcagccgccattgctccagaatttcctcatagttccggcccagacggtcgatcgactggaccgcgaggacatcccccggcctcagggtgcggagcagccgtttgtaggcgggccggttgaaatccttgccgctctgtttgtccaaataaatgcgttcgtcaggcacgcaaaactgatgcagggcgatgatctgccgtgcttcgttttgctcccgggtggatacccggacatacccgtagagctgtgacataccgattcctccatcttgtctcgttcgggcatagtgttcccgctatggatattttaatcgatcaagatgcccgcgacaaagaaaacggcttgataatcggcgtagatatgtcgggttgcatggcgataaaggcttcggtcggcacatcccgacgactctcctttcttttttcaaaataaaaaggggcggtccgcggaccgcccctttgctatttcccaatggctttacgtaatacatcctcgtccgccgcctgccaaggccgcagcggtttagcggatatcctccggatccaggctgttgctccggtaaaactccgtcatctggcgggtacaaaccgcctttaaccgggcgatttcatcccgcttcggcctggagacgtcgggatataccgggggcagcaccgtcaagcgcaggcaaggcttccgtttgaacaggcggtgcaggccggttggctgggcatatgtaataaccgaggggagcaggggcacgttgttgtcataggcataagcgaacgccccgtttttgaaccggcggatacccggataatagaaccgcagcaccccctccggatagatctgcacgatctgccctctgcgcacggcttcccccacggcgtcggagaacgcgggcattttccggaaactgcggggaatcggcatgccgccgaggcccttgaccagatgacggatcagcgggatttcgaggttggactggagggtggcgaaatacaggcgatgatcgaaaaacgctgaccccagcatggtgcagtccagcggatggacatggttgcagatggaaatggccccccgtccccgcagacgctggatgttttcccgcccatggaactggaacccgagcagaaggggattgagaatggcgaaaacaccgagcgcgatgggcttgagcagcgcaaaaaggaaccggtagaacaggctgtccccgagataatcgtaacccgtcccgatacgcagctcgagaggggaccacatgtgcagttcgtgttcgtctgccggggcaggcgtttcctccccggccagggtctccggatactcgttgatgaccatgcacccccgttcctttcacctgatgcgggtttcgtgccgttttctggctgtctgcctcacgaaacggctcggttttccgcgattgcttcacggaacatgtcttcgatctgggaaacacagtggtcgatgtcgtatgcccgtccgtgttcggcgtagcggtgttccatccggcggcgttcctccggattgtccagccaatagtcgatcttttcggcaagctcattgctgtcccctgcccggaacaggctgcggtcgtccagagcgaattggggcgtcgcggatttcgggctgtttgcgatgatggggaccagcccgctcgcgaacgcttccatacaggaaatcgcctcgatttccacatcggcggcgtggacgtagagatcgctcatcgcaagaatgtcgagcagctcggccttcgggaagaagcggacaatgggaggattgggcagctttttggcccgccctagcagcgcctcccgtttgggcccctgcccggccagcacaagctgaatctggtcccgatgtgcgcagcggtcgatcgcgtcgatgagcacatcctggcgtttttccgccgacaggcggccgatcatcaggatgacgattttcccttgaagctcaggggatttgtctttttttcgatacacaaaatcggaatcgataccgttggagatcacgtgcagtttggcggtgtaaccgttcttttcaagctgcgaggcgatgaactggctgggacaatggatatgggtgaatttattgtaaaagatggttttgaatccctggtaaatcgctttgttgatgccgcgggcgtttccaagcccgatggaagaggtgatgttctccggctggacatggaaggccgccgtatggggaaccccaagctggacggcgactttttctccttcgatcgagagggggaagggcatgagaaaatgcaccacctcggcccagcggacggcctcttccagcgtggttttgttgggacgggcaaagcacatgccctgagacttgatcaagccgtcgaaaatgggcacccggaattcccggacggcatatttgtcctcccggtcttcccccgtgcagacgacccggatctcgttgccatgccgccgcagggtgtcggcgaaacggcgggcggatatggtggtgccgttgttatcgttgtcgaattgatcgataatcagcaggattttcacacgggcttcctcctcacgccgccgttctggcggatacaagccgaatacgtcggggcttttggtaaaacctatcaattcagtatatactatatgcggcttgaaatcaagtacaacttggaaatttttggaaatttgaaggaaaaggaagaaaaaagtggaaaaacagaccatggctttcgaagcggtgatccaaaaggtacccgatatcgacggagcctatgtggagattcccttcgatgtccgggcggcttttggaaaagggcgggtaaaggtgcatgccaccttcgacggagtaccctatgacgggttgattacccgcatggggacgccgggccccatcctggggatacgcaaggagatccggcgccggatcggaaaagagcccggggactgggtcgccgtgacggtgcgggagcgggaatagccgggtttccaggttgtatgagcggagcgcctgtgatatactgagtaaaacgaccagctttatcccggccggaccgccgcacagttgagaagggacgagacatatggagcagatgtggcccgacggccggtttttgcagcgtttatcgagcggattgccgtttctggaaccgtttttgtccgggagtggcgccttgcctggcgatttcgcgtcactggcggctttcgtgcgctgcttgattcccctggaccggatggccttgctctgtccggaggaggacggacgggaggcatccgtcacccagtggggaagtgaggcagcggacgaggaagcctgccggatccgtctgctggccctgctgccggaactcctgtccgcggcggatccggacgatccgggagaggagcgggttctggcccggatcctggaggaggaaagggcttggccggatgcggggagccggacagcggctttccccatccgccgccagggacggctgcgcggattcctggtcctgacccgtcaaacggggcaagccttccagccggaggagatcgggctgatgcggacagccgccgagctggccggtgcgatgctgactgttcggagcacgccggaggaatcgcggctgcaaagctgggtgttcaacgaaatgatggacagcatgaacaccaatctgtatatcaccgaccccaaaaccgaccgcatcctgttcatgaacaaaaccatgaaacgggccttcggattggaggcgcccgagggcaagatctgctggcaggcgctgcaaaaggggatgaccgagcgctgcgcgttctgccctgtccggcagctcttcgagcggcgggaggacgaggaattccccgcctgccgttgggaggagcacaacaccctcaccggccggacatacgaaaactacgacagtctgatgcgatggacggacggttccctggtgcatttccagcagtcggtggacgtgaccgaggaccggcgtctgcgcctgcaggcgcggctggatgatctgaccgagatgatgaaccgccgggcgggcaaggaggagctggccaggaccctggaggaggcccgtcaggccggcctgccgctgacggtgtgcatgtatgacgtcaacgagctcaaggaggtcaacgacacgcacggccacgtcgagggggaccggctgctccagcagatttcccgtatcgtcagggaaacgctcgggccgcaggactacgccttccgtctgagcggcgacgagttcgtcattgtgttccagggaatcctggaggacgaggcgggccggaaaatcgagagtatccgcgaacggctgagcgaggaacagcatcggcaggggacgccgtacgaagtggggttctgctgcggcatcctggaggtcgggccaaaggatccgatcagcctgcccgacctgctcgtggaagtggacgcgcggatgtacgagcagaagcgctggttccatatccgccgggcagaggagcgcttggaagcaggggacggcgtccgcgcggaaggcggcaccggcttcgcctatgacaaggagcgcctgtatgacgcgcttgtccggagcaccgacgactatatctacatctgcgacatgcggaccaacaccttccgctatccgcccgcgatggtggaggaattcgggctgcccggcgaggtggtccccaatgccgcggcggtatgggggtcccatgtgcatgaacacgaccgcgcggctttcctggagtccaatcaggagattgccgacggacgcaccgacagccactgcgtggaataccgggccaggaaccgccggggcgagtgggtctggctgcgctgccgtggccggctggaacgggatgaacagggcgagccgcggctgttcgccggattcattaccaatctgagcaaaaagaatcagatcgaccatatgaccggcctgttcaacaaatatgaatttgagaacgccatccgcacccggatccaggaccagccggagagccggctgtgcgtcatgctgctggggctcgacgagttcaagcatatcaacgacctgtacaaccgggaattcggggacgaagtgatccggatcgcctcgcagaaagtccggtccttgcttccgtcgaacgcggcggtgtaccgcctggacggcgatgaattcggcatcgtcatccgggggggcgggaaagaggagatgcaatccctcttccgctccatccaggaatccttctcccgtcagcaggaatatgatgggcaaaaatatttttgtaccctgtccgccggcggcaccctgtatccggaggacggcaaaacctatctcgatttgtacaaatgcgccgattgcgccctcgattatgccaagtcccggggcaaaaaccggctggaatttttcttccgcgagctccgtgaccgccgcgcccgtatgctggatatgaccgagcgcctgcgggaatccattgagcacgattttgaggggtttgagctgcattatcagatccaggtccacgccgattccggccgtctcaagggagccgaggcgctcgcgcgctggcactgcgacacatacggcgccgtcccaccggccgagtttatccctcttctggaggagagcggcctcattctgccagccggccgctggatcttccgcgaagccgtcgccgcctgcgtcaggtggcagcggaaggccgaggatttcaccatgagtgtcaacctgtcctatctgcagctcaccgacccctcgttcatccgcttcatgcaggagacgatggagcgggcgggggtcgatccctgtcacatcattgtggaactgacagagagttatatcgcttccagcatccggtccctttcgcgggttttcgccaaaattcgctccctgggcctgcgcatcgccatggacgatttcgggaccgggtattccgccctcgaaattctcaagcagtcccccgccgatatcgtcaaaatcgaccgcgcgtttgtaaaagatatccaaaacagccattttgacgcgacctttatccgctttatcgtggagctctgccacaatgtggggatcaaggtctgtctggagggggtggaaaccccggaagagtacgaggccgtgcggcatatgcggctcgattatatccagggctatctcttcgggcggccggttccgggtgaggaattcgaccggctctgctgaggcagcggcttatgcgcggatatgccggatcgggctgtcggtaaaggagaaaaagagaacccgagtgcacagaaaagcgtggtgggtgctccgtaagcaggggcggtactggcggggacgccgagccgccgcgattcgggtttccacccggcaaattgtcggcaagctaaggcggcgggtcccccagggacctgccgcctgtttggcgctattttgaaaccgtttccacccgcagcgcccgcatggcgttgaggatcgccagcaccgagacgccgacatccgcgaacaccgccgcccacatggaagcgacgccgcaggcgccgagaaccaggaccagcagcttgacgcccagggcgaatacgatgttctgctggacaatccgcctggttttccgcgagatgcggatggcgtcggcgattttggagggtttgtcgtccatgagcacgacgtcggcggcctcaatggccgcgtcggatccgagcgcacccatcgcgatgccgatatcggccctcgagaggaccggggcgtcgttgatgccgtccccgacgaaggcaagggtgccgcgcccatgcttttccccgagaagctgctcgacatggtctaccttgtcggccggcaggagtccggcgtgcacctcgtcgatgccgagggcttccgccacgctttcaccgaccgccggctggtcaccggtgagcatcacggtttttcgcacgccctgggatttcagggcggcgacggcgtcggcggcgtctggcttgatctcatccgcgatgacgatgtgcccggcgtattcgccgtccaccgccacgtggacgatggtgccggtccgatggcagttccggtaggggatacccatacgctccatcagcttgccgctgccggcctggaccagccgtccatccacccgggcgctcacgccgtggcccgggatatcctcggtgccggtgacacgagaggcgtcgatttccttatgataggcctcccgcagggagcgggagatcggatgatcggaatagctttctgccagagccgccagctcgagcagccggtcctccggcaggatatcggggtgcacggcggtgacggtgaaggttcctttcgtcagggtgccggtcttgtcgaacaccacgatctccgcccgggacagggcctccaggtaattgctccccttgaccagaatgccccggcgtgaggcgccgccgatgccgccgaagaagcccagggggatggagatgaccagcgcgcagggacaggagatgaccaggaaaatcagtgcccgctggatccagatgccccacgcttcctggaacagcaggggcggcagtacggccagcaaaaccgccgccatcaccacgagaggggtgtagatacgcgcgaatcgggtgatgaaattctcggcccgggcctttttgctgctggaattctccaccagatcgaggatcttggccactgtggactccccgtaaggcttgctcacccgtacccgcagcagtccgccgatgttgatgcagccgctgatgacagcgtcgccggggccggtttcacggggcagggattcgccggtcagagcggcggtgtccaccgtgctcctgccctccaggactgtgccgtccaaagggatacgttcccccgatttgaccacgatgacatcgcccaccgcgatctcctcgggatccgcctgccgcagcccatccggcgtttcgaggttggcgtggtcagggcggatgtccatcagggcggcgatggaggaacgagaacggcccacggcgtagccctggaaccactcgccaacctgatagaacaccatgaccagcaccgcctcggggtattctccgatgcagaaagcaccgatagtggccaccgccatcaggaaattttcgtcgaaaacctgcccgcgcaggatattccggagtgcccgccacagcacgtcgccgccggcgagcagataggggacaaggaacaagagcaggcggaggattctgcgggcaggaatcagcaccgcggcgagaagcagcgcggcgccggcaagaatgcggcagagggtctggatctgtttgcggctcatgtgagatttcccctttcgtgggaccgagatcaggcccggatgatacagttgggttcgatttttcggcagatggccgcggcgctgcggagaatatcgtccatgcgggattcctccgcctcgattgttagcttttgcgtcataaagcttacggagacgttctgcacaccaccgagtttgcggatcgcgctctccattttggccgcgcagttggcacagtccagtccgtccagtttccaggtctttttcatacggcaggcatcctttccttcattgatcgtgcgggccggttatgtgtataagcaggataaagccatttgccgggccgccggctattcggccacatgctccatcccttgcccgagaatggtccgcacatgcccgtccgccagggaatagaagaccgttttaccttcccggcggtatttgaccaatttgctctgtttaagggcgcgcagctgatgggaaatggccgattgggtcatgtggagcagcagggcgatgtcgtacacgcacatttcgctctcgaacagcacgtacaggattttgatccgggtggaatcgccgaatatcttgaacagctcggccagatcgtacaggatctcctcatccggcatctcccggttgaccttatccaccagatccccatgcgcatggataaattccccccgttcgggtacagtaacggtggaggcggccatgctctccatcgggagtggatcgcgctcattcatagtgccacatccaatcatatgaattattgttcatatattattatatctaatttttccatgttgtcaaggggagttttaaatttttttgatagcttgaaaatcatgcaaacaccaggggaaagaccggtgccgaggccgtcaagagatgtactggctcccgttccgcatgtgcctcgggtttgttaaaaaggggaaaggggggtggcccgcaggccagactctcgttgcggtgtgtccgcgcattggacatcccttttcattaggacaacgttttatatgcgcggacaaactccaacacgccctgcaaaaacgggcctagcctg

SEQ ID NO: 2831 - DNA, 7575 bp, Unknown
  16S sequences of unknown bacteria
taaccatatcggtctcgatctcgccatcggacagggtgagcttgagcttgccgccctcttccttgatggcctgtacgccgttcttgaggatcaggcccacgcccttttccttgaggtagcggtgcacatcgcaggccatatcgtaatccagcggagcgatgacatggtcagccagctccacgatggttacagccacaccggcattcttgaggttctcagccatttccacaccgatatagccgccgcctacaaccacagcgctcgccgggaactcctcttccacatactcacggatcttgatggtatcgggaatattgcgcagagtgaatacacgggcattgtctgcgccttccatgggaggacggatgggagcagcaccaggagaaagaatgagcttgtcatagctttcggcgtactcaccgcggtccttgctgcggactgtgacagtcttggccttgggatcaatggaggtcacttcgctgttgacccggacatccacattgaaccgggcattgaagctctggggagtctggagggtcagagccgatttcttggtgatttcaccaccgatataatagggcagaccacagttggcaaacgagatgtactcgccgcgttcaaacataatgatctcagcggattcatccagacggcgcagtcttgctgctgcggaagcaccgccggctacaccgcctacaattacaactttcatggaaaagcctcctttttattaaagccttttgtcgatattatcagtataacacacacaggtttgctttgtaaaacagggattgacagaaatccatacttttttccgggttttgcaggcaaagcagcagccggaccatcccagggcggcccggctgtctgtttttttgtgttttatgcccgcttgttcatgccggaatgccgggacgctgcaggctgtgccgctgtgctctgagaacgataggcactgtgtacctgttcccgccccgcctttccctgcaccggagatccggcggcagcttctgtcccctgttccggctgctttggctgctccggtttcccggactgttccggaatttcctccggctgcgggtcccgggattcctccggaagctcctccggcggatgtaccggggtatccggctttttctttgcttcctcccattcggacggaaggcggtcatagtccccgctggcgacaaattcccgcatggaatccgctgccgcgtccaccagacgcttctcccgcatggcaaccttcagcttggcatgaagcggaatggcaggatcgtgctccaccgtctggatgcggctcagcgactgcccgatgcggttcatctgcaggcggtccgcttcctccctggtcttgcaggaacgcagcgccctctcataggccgtctgctcctgttcttcctggagcagctcctgataggcctggggatcgtgctgccggagataggcccgttcctcctcggtcaggctgccgcctgcatccagcttggcccggatggaggccagggtctcgtcccggcggtgaaaggtcacgccatccactgtgatctcgtcctgatggctggcgccgttctgctggcgcaggtgccacagcccctgcattttcagcccgctgatataggaattcaggctgttgatggttgtaaagtccatagcccctcctttctccatgaaagcccctgtaatttccaatttcagaatacaccactcggcgcagaaattcaaggaatattatgtctaaaattcacaatcacattattttattgtgcatttctttccctatggaattgccggaactgcataatttctctgccggcagtcccgcgcttttgacaaattccatataaattccccgaagttccccagtccgtcctgtacatccacgacccgatccggtataataaaaacagcggacatctggaagaaaatgccggaaagccgctttatttaccgcacacaggccatcctttgacctcacaccagtgaacatacaggtatcaatcgaggaggagttcagaaatgggacagtttttcagtgacaatgtggagaaagcgctccagtatatctattatgaaaacaagggctatgcccggcatggtcaggagggattccagctgctgaccgatgcttcggctgccggggacggcgatgccacctgtattctggcacggtgcctgtccggtccgcagtatgtctggaagggcttcggcttccctgaggagtcggatgaaaaggtggaagccctctaccgtctggcagtggaacagggcagtgccatcggcatgctggtcgccatccgcagcggcgtactgagcgtaggtctggagcgcaaggcgcccatcaccctgcaggaagcctttgaccgggttctgaaaaacgcagccggcggcgatgccttcagccagtatgtgatcggcaacagctacttctggtgggatttcctgcgcatccagcagaagtccgctgaggatttcccctcccgggaggctttcaaggcctatctgaaggagaatatcacccagtgtgaggactggttctggaaggcattccggggcggcatctatctggcaggcaacaacctctacaactactacctcaacggcgatgaggacattgtagcgccccagccggacaaggccaaggacatctaccagatcggcgccgagatgggatacccggttcatcagatcatctgcgctcagaatgccgagcaggccggtcagatggaagaatcccggaaatggtaccgcaaggccgcggaaaacggctatccgaacgcatggtatcaggtggcggcctggtatgagaagggaatcggcggcccggccgatatggcagaggctgtttactgctacaagcagtcggcagagagcaatgaaaccggcggtatcaatgtgctggcggaatactatttctatggcctcaacggattccccaaagatcctgccagagctttccgttactgtcagaaggcgatggaccttggcagcacctacaaccggcctatcatggcccgctgctatctggagggctggggcactccggtggactatgccgaagcctatgtgatggcttccaagtccagcagctggtcgaacggcgccgagagctgctatgtactgggacgcatctactgtgatggcctgggcaaacccgaagacatcggcaagggtgtagaattcctgcgccagatcagcgatcatcaccccgaggcacaggaggaactgaaaaagtacaagaagggactgttcggcggctggaagcgccggtaaccccttaaacacaaaattccccggtcggtctgaccggggaattttcatgaaagaggactgccatggcccggcagtcctcttttgtttcagcacagaatgatattctgttattccgctgcgccggcaggagtgccctgtgcttcctgctcccattcatcaaagcgcttcatgacctcatcataggtctgaccgcagatggacggcagttctccgcccagttccacaccggcagcctggaagcccttctgcaccgcagtgcggagggtatcgatcttggatgggtcgccgcccgaaagagcctttgccatatccatgatccggcccgctacggcatccaccgagtattcaccgccctcggcaatggactctgccgcctgacggctctgctccggtgtgacatacagatccatgccgaacagggtgagattgctccgctgtccctgcttgaccaccatcgactggagcatctggataaagcgctccatacgctgggcctgttcgtccttcagctgctgcacctgggcatcggtcagctttttggagtaggtgaccggcttctccgcaccggtctgcacaaaggtgtcccggttctggacagccgcctggttctccgctgtggtgccggtggtgtcaggctccttcttttccgatgccttctccggacgcaccgctgtattctgatatgcagtatagccgattcttgtaatatccatcgtacagccttcctttccgcttacgctgattccgggctgccgtccgcagcagaccatctgtccgcgccgggctctcccggcagactgcggcagccattttcccggctctgaaaccggacgcttcagaaccttttcaatctatatgttcgcccggtggggagaaaagaaaagctgcaaagcaatattttccatttgtaccatggatttccgacaagaccggcaggaatcaccggatctcccgcagaatatttccctgggcatcccggatctgggtggggatcagctccacggtcagcggatagctggtgaggggatactccccggcatggggacgcagaagcccgcagagctcctccaccgtctcacccggcatggacatcgtcagcacgccatcctcctcccagagttccggcttgccgctcaggaactgtactgccgcttccccgccctgcaggaacaggggacgccccttccccagacgggcacgcagcatatttgccagcgtttcgatgtgaccggcgcccagtgtcaggcgggcatgaccgtcctgcaggctgacgcccacctgttccagatagaagaacccggtggaggagccatcctgctccatgccccgcttccagactgcccggaatgcggggtcatccatgcgggaggcacgggagagatccacaatgcccatcgggcaggtcttctccagctctgccaggaactttccggtgttccagcacatgactgcttccagctcatcggcggtaattcccacagcctgcaggaagatcatgtgaccgttgggggtatccatctcccccagcttcgggtcgatctggaacgcaagggctgtgagccgggtatccgattccagggcaatggggctgttgcagtccagatggtgtccggggccgaacggattgccgctggaaaagacatagcgtgccagattctgcagcagattcatgggccagaccggcggttcctcctccccttcccgcttgaggcggaaggtcaattcaaagccaaacccactcacctccgggtcctcgcactccttctggtacagctcggtaaagccgtaggtcacataatgccagtgggggattccctcttcgctcttccagacctccaccccgtccagcggatcattcccgcccaggaagtagggaatcaccgttccataaaaccgcccctcctgaccgggatagagcgcatggagcttctcggaaatcgcgtcaaatccgccctgttccagtgtggtatcgtcctgttcccgtgtgatctcatcgttcatcttgctgttcctccttctgtatgatcctgtatctgcggctattgccggttttcagcccgggcaatcgtctcagcgatctgctgccgggctgttttgatttcacatgcgtttttcatgggacagctgtccgagccgggcaggctgactgctcccctgccgtccggaaccgtttttcccatggttcaggcgaaggtgtcagtcctcatcgccggccttgaagttatagatggggcggatgatcttgactacctccgctgtggggccgatgttgtccagaatatcctgcatgcccttgtaggccatggggcattcgtccagggtggacttgttcaccgaggtggtgaacacatccgccatctgcttcctgaactcggatacagtgaaggactgcttggcgtcggcccggctcatgagccgtccggcgccatggggagccgaacagttccagtcctcattgcccttgcccacacagatcaggcttccgtcccgcatattgatgggaatgagcagctgttctccggccttggcggacacggcgcctttgcgcaggatcatggcatcggtatcgatgtagttgtggatggtggtgaactgctcctccacatggagcttcatgcccccgacgatctcgtccatcatggcctgccggttgagtgccgcaaactgctggacgatcttcatatcgtggatatactgctcaaacagctctcccgatacatacgccagcgtcttgggaatgctggtctgcttgatgtttttgagttttttcagctccttctggatctctttctcccggccctctgcccgcatccgggcaataatcccggcaacggtggcatcatcggttccattgagtaccttatagcccgcctcctgataatagcgggccacttccacgcccaggtgacggcttcctgaatggactacgatatacagatttccctcgtcgtcccggtccacctcgatgaagtggttgccgccgcccagagtgccgatgctcttttcggcccggatgagatccacttgctttgcgcagcagagctggctcagatcaatccggctgaaggaacgatgcgccttggtacggatcgaaaagcccgaagggatcttttcatagatcagcttatccagcttctgcagttccagatgggtttcccggatgcgcactgtttccatgccgcagccgatatccactcccaccaggttgggcaccaccttatcggtgatggtcatggtggttccgatggtgcagcccgctccggcatggatatccggcatcatgcggatgcggctgcccgctgtaaattcctgattgcacagttcctgtacctgtgcgatggaggcgctgtccaccacatcggtgaagatcttcgccccattgtattttccttgaatctcaatcatattgtacctctttgctggtttcgcagggcaaagccctgtcgggtcatcgcatgccatgggactggattgtcccacacatgcctgaacaacagtaacagagtggaaaaacgcagttcggagcccggcaccgccgcagggagggattcttcgttccacagccgaccctgtccctgtgctgcatgctgttctccccggatgcctccggtccgggctgattttcgggtacacggtcccgtacagcctccaatggggcccggactgagacagaccccattcccttctatcataaagcaaaactgtgcataccgcaatccaaagtacagaactttccacagaaaaactccttgtttttccccacaagccgtgctatactgaggtcattcaagccacaaaggagagagtttccggtgcaaaaacgcagtcataagctcctggcttccaccctgcttgccaatgtacagggatttcagtccagacgctatgagcttgcattcctgctgggttccttccagccggactgcaacccccttacctatctgaaagggtccatccgtgcccgactgctgggcggacacaactttaccaattcccgtccctatgttctgacccggctgcagcggctggaacagaaagaccgctggaatctgtggaactactatacgctgggcaaactgacccactatgtggcagatgccttcaccttcccgcacaacgaacactggccggacagtctggcttcccatcatgtctatgaaacccagctgcgcatctatctggcggagcatctgcgggagtatgccttcccggactgttctgcggagcagctggatctgatcccggcactggaagctctgcaccggcagtatctggagagccggaattccgacctcagccggg

SEQ ID NO: 2832 - DNA, 3648 bp, Unknown
  16S sequences of unknown bacteria
ccgatctgctgccagatatagatggtgttctctgccgcgcttcccacagcataggcatcccccggcgagcctgtgggatgggcactttgcagattttccagggtgtcataccgggccagcacggtgaagctgcggccatcggctcccgccgggccttgaggcccctgctcgcccttttcgccctgagggccttgcagccccctctctcccggttcccctgcggggccctgagggccggtttctccctggatgccccgttcgccctggatgccctgcacccctcgctcgccctgagggccttgggggccccgcagtccttccgggccttgggggccctgggggccggtgagacccatgggcccttccgggccacgggcgccggtttcccccttctccccctgagggccctggggaccccggatgctttggggcgccggggcgggaggatcgctttccaggctccaggacaggatgcctgcgctgtttaaactgggcacgaacaccgggccgtgggggccttgtgctcctgtggggccctgagggccggggacgccctgctctccctggacgccctggatgccgtggaccaccgtcaccccgttttcgtcggtgacccggctctgggtgaagcgcagccgccctcgctggggcaggatgttcccctcggggtccagcaccaggtgtccgccggaggaggcggccacccaataggagccgtcctttgtcacttccatctggccgtcgccgttgagacgcagcgcccggatgttttccgacaaaggggcattgtccagggtcatgcccagggcggcgccgatctccccggccccggtttcggccatcagagcatccagcagggcgttgaaccgctgggccaccacttccttcaccagccggtcgaacacctgcttgttctcctggggctcgccggtgagccggtcgggggccgaggccacatccttgcctttgtaatcttcttcctggatcttcagttcttccagcatattctcgctcctttcatttcacattcccttccttggtaaagcgcttgacgatgccgtataccccgaagccctcgttgaggccgtcgtttttcacggtgatctgcaaggtgaggtaccggcccacccgggagccgaagggcaccacccgaggggcgtcgttttcggtgaaatccatgcggctgaaatccagttcatcccagctccagatgtccatggtgctgtaagaaaggtcccggcccaggtctttttctgtacggatgttcacctttacactgcttcgcagataaggcttaatcatgatgccgcttccccggcgcatcatggttttgtactgggtgaagctgccgtcgtcgtcggccttggtgctccaggcgcaggggatggcggctccatcgtcgctgtaccgttccatgcccggaacatcggtgctgaaccggcaaaggcggccgtcctcggtgccgaagaacagatcctctccccgggcggcgatgcaccgggccgggatgttctcccagtgatagcactcgtacacatagtcccccatgctctggctgcgccaggatttttcctggccgccgtccagcaggtagcacctatttcccagggccagcacatacagcccccgccacaccgtggccgaagcattttccagccccttctcccctttcagggcgctgtcgatgaaatagctccggttctgcaccgccttttcctcgctgacgctgctggtgcacaaaccgaacactccttgaggggagagaaacagcggttcatccagcaaggtggcgaaggcatagggggacacggcccccacgccgctgacgccctggcgcaccgggtagatggtcttgccgtccagcagactctcctggcggagatagacggtggcctcctgctgggagggggccttgacaatggcctggtaggaaccgatggcgcaatagcccataatgggggtatcgctgcccacccgggtatagcccaggtcggggaaataggtggggtcgccatagcccgagcggtaatcgaaggaacgcttttccgggttgccgctgaggaaggcgcagcctgcaaacaccgagcagatggtgcactcttcgataacgctggcctgatcggtcacatcgaaggcgatctccaggttatcccgcccggccacctggggtttcgcgggagcggtatcgaaccggatgaatttccggcttgtgtccacggtgaatccggtgatctcctccccgtccagggtgcaggtgacggtacgggtgttgctcacctctccgtccaggtaatagtcccgggccgagccgtcgcagcagaagctgttgcggcggcgtttggtcagcatattgcaggcttcgtaatcggtgccggccccttgggggctgcggccgatggaggtgaggggcacataggcgtgttccttcacccgttcgcaccagggcagcggcccttcctccttgttttcccgcaggcgcatcagctctttgccggtgagcaggtaaaaggccccgtccatggcaaagccctgggagcgggcgctgttcagcccctgccagatgatccggggggattctccctccacctgcttccaggtgtagatggtgtcgccgccgtggatgaccagataaggctccccggccatctcccattcgaagatgccgttgatggggcgattcagctgaaagagggtgcgccagccggggcgtttttccggcataccgccggcatcggacaccaggttgggggcaaagggggaacggctggggtccaccagggccgggtcggtggaaaagtccaccccccggaaccgggcgtagcgggtctggtacattttgggctgggagggtactttgaattgggccatttgttattgcccccttccccaccctgcccagggcaggctttcaaactccgccgttcccggctgacgccgccgctcccgatggttcagctgcaaaaggtcccggccgctttcgaactcattgcgccagatcacggccagctgggcattgtcgtgcttgtacagctgggaggcgatgtacaggggcaaaagggacagggcttccggacaaagagtgaaggtgtggtcgtcgggggtgtccccggtcaccggctcctccagggcccagtaggctgcctggtagcggccgggggccaaaatcaaagtatccccctggcgcacataggagccaatgggccggagcccttcctcctgatgctgatagagccggtccagctcccagtagcaaggcagggaggaaagctgcaaaaggggtgtgtcctcggtcacctccacttcctcctggcggtagatgggttttccgccggtggccagcaggtacaggccctcgttggccgcggggatcatccggcttttgtattcttccgccaggtcctggtcaggcccgtccagcttgtggagcacggcctgtttgatttctccccagttcatttttctcatctcctttccctttcaccttatcacttccaaacggtatttttcgtgcagcgtgacgctgcacccaaaactcgctgaaggctctatgcgttgccaggctcggtgctccgggtgtgataaaccatcacccggaaaaggccgcggtgaattcctggcaaagtgcaaaaaagccccccttgtgcaaag

SEQ ID NO: 2833 - DNA, 3023 bp, Unknown
  16S sequences of unknown bacteria
gcgattgcatgatggaggaaatcgcttattctttgataaccagctcggcgatctggacagcgttcgtcgctgcgcccttgcggacctggtcgccgcagcaccagaggttcaggccgttctcatccgtcagatccgggcgaatccggccgacgaagacgatatcctggtccgaggtatccagcggcatgggatagaccttgtttgcaagatcgtccaccagcttgcagccaggggcggcggcgatgatttcccgcgcttccgctacagagacgggacggtcaaagtgcagcgtcacagagatagaatggctgcggacgaccggcacccgcacgcaggtgcaggaaaccttcagctccggcaggtgcatgatcttgcggccttcattctgcatcttcatctcttcgctggtgtagccttcaaacgcctcgccgccgatctgggggatcaggttataggcgatctgatgctggaacaccttgggctcatatgtcttgccctcccggacagcttcaatctcgttcataagctcgatggggccgcctgcgcctgcgccggagacagcctggtacgtcgaagccgtcatcgtgcggatgggcgaaattttgttgagggcgttgactgccaccagggtgataatggtggagcagttggggttggagataatgccgcggtgcttcttcacgtcctccggattgatctccgggatgaccagcggcacatccgggttcatccggaacgccgaggagttatcaacaaacacacagcccgccttgacgatggccggggccagcttctccgcgatgtcgttctctgcggcgcccaggacaatgtcgatgccttcaaacgcgctgtcgcacgcttcctggaccttgaccgcctggccgcggaatgtcacggtcttcccggcgcttctggcgctggccagcgggcgcagctccgcgatggggaagctgcgctcttccaggatcttcatcatttcctggccgacggcgcccgtcgcgcccaggactgctacattatatttcttcattcggaattcctccttagttagatttcacaaagctattgtacagtacgcggatggcgttatcaaagtccttattgtccacgccgaagatgatattcagctcctgcggcccctgggtgatcatgcggacattgatgccgttctggcccagcgtcgcaaagatctggccggagacgcccagccggtacgccatcttccggccgacggccgcaacgatggagatattctccgtcaaggtaatgctgtccgggttaaacttcttctgcagctcacccatgagcgcatagagattatcgttgacctgcgaggccgggaagaccagagaaaggcagtcgatgccggagggcgcgtaggcaatattgacattatacgcctcaaagacctccaaaatacgccgccagatgcccagctccgaggacatcccatttttcgcgatggtgatgatggagaagtttttcttaccggcgatgccggtgataaaatgcgtctcatcggcagcgtcgtcaaactttgcctggatcatcgtaccggggtgggacgggtcattcgtgttgcggatgttcagggggatgcccttctcccgcacgggaaagatcgtcccctcatgcaggacctgggcgccgatgtagctcagctcgcgcagctcgctgtaggtcacatgaggaatgggctccggattttcgacaatgcgcgggtccgccatcagcataccggagacatcggtccagttttcatagacatcggcatccagcgccgccgctgccagcgcaccggtgatatcgctgccgccgcgggtaaaggtcttgatatggccgtcgggcatcgcgccgtagaagccgggaatgacgacctttttccggcctaccagctccctgagcagggcataggacttctcctgatcgaccgtcccgtcaaatttaaacttcagccaagagaccgagtccaaaaattcaaagccgaggtaatccgccatcagccgggcggagaaatactcaccccgggagaccagttcgtcctgtgtgacggcttttttatccatcttctcccgcagctgggcaaattcgctctccagatccgtctgcagctgcagcgcgtcgcggatctccagataccgctcggtgatcatctcccagacgctgtcgcagctgacgccgtactgcagatgcgcgtagcacagatagagcagatccgtcagcttatggtcatcggaaaagcgcttccccgccgccgagacgacgacgacccggcgggagagatccgcctccacgatggacttgattttttcatactgctgcgcatccgccatggacgagccgccaaatttcaatactttcagcataagattccattctccttatttcattcctgcaaagaagcagcgagcatccttctttaatgcctctgccgcccaggcatgcatctgtgccacggagacgggctttgtcaggatgccctcccccaggtcggccgctttgttcgcctcgagccaggcgtcttctccggcaaaccggacataatagcagtgggtcacgcccgcgttatcgacctgcaccgggcgcatctgcgtgctgtagaaggctttgacgccgcctgcgatgtcgatacagtcctgcacaacattatatgccgttgggaaccggcccgcgccctggccaaagaagctcaggcggccgacgttctcgccttcaaaggtgatcaaattaaagttggacggcactgccgactccggctccgtcgcggcgaccagggtcggctctacataagccgccacacccgctgccgttttcgtccccgtcgcaatcagcttgcagaccaggtttttcgaagagaacgccgcgatatccgcgtcgcacacattgcggatgccgaacgtcggcacatccgcttccgaaagcaggctatcaaaggcgatgttggcggagatgatgagctttcgctggatatcccagccgtcgatatccgccgacgggtccgcctcggcatagcccagcgcctg

SEQ ID NO: 2834 - DNA, 6746 bp, Unknown
  16S sequences of unknown bacteria
aaatataccttgctccttttcatgtgcttagagttccgttaaatcgacgaaggatccggcggataggcttatatcaacacaaaaggtaaaagggattatggcacagcgcttatttcatttgcattttaatactttggcataaaatataccgcaccgaaaattcagatacaatttcgatgcgatattttaaatttactcctcggcagagccgaacaactgcggcagggtgcaaaccgcagatacgcccacaactatatacgctattcttgcacctaaggcggcagaggagccgaagataaaagccactaagtcaaaccccaaaaggcctataagcccccagtttatgccaccgatgataagcacagccaatatcaattttttaaacatagtttcacctctctgccggttattgtgcccggagaggtgaaaattatactgagtataaatttgtgatttattaaaattcaataaactgccctaagcggaaagagtacagcaagcattttacattgtcggtgttaaacaaggcctttgccccgtggcgatacaattcaagctgtttctcgtacctttctttaagttgccccatattttcgacatagtcggttttgtaatctattacggttatccggtttccgttttgcaaaacgcagtccataaccccttgaaccaaaacttcatagccggtatattcccccttgcctgtggcaagctgtgccggatagggcgcgcggaaattcctctcggtgtaaaccttttccgcttttaaaatcctgtctgccaaagggctgtttacaaatgttttaagggcgtttaagttaagcaatttgggctgtacaaggccggcgttttccaatcgccgtatttccccgtacaaatcctgccttgcctttaaaatatccgcatattgggcaaagcggtgcatagcggtgcccttttcggcggcggttatcttgttctcgtttataaaatccggctttgcaagggttatctgtctttccttggcaatttcgcttacggacatttttataggcaaggcggtgcgttcccggttgggatatttaaaggcaagattttccagtatcttttccgtatcagcttggatttccctctgtgggatttccgcctcctgccggctgtcgtcgcaggtttcactgtctgtgatttcaatatctatgctctgtggaatactcctgtcctccgttgccggtgaaaggctgtttgtaaaataaggatgccttgccagggcagaaataatccaggccaaaggatttgccatttttcgcagagcataagcccgaacccccccggccgacttgttaagtaaagccgaaagagatttttccccgggacattcccccgttaagataagggtattttttgcccttgtcatggcaacatacagaaggcgcatttcctcgttggcaagattttcggcgattttatcctttattgcccgaacattcaaagtggaaaaattatagccgaaactttttcgtgcatacatacccacgccgatttctttgtcaaacagcagttttgaagatatgtcttttttattgaatttcgtgtccaatcccgcaacaatgcaaatgggatattccaggccttttgatgtgtgcatggtcataatggaaacagcgctgtcatctgtaatatcgcttttactgcccttgccggaggccatatatctttcaatccgccttaaaaatgccggaagattttctccgccgtggctttgggcgtaattcttggcaaagcccataaaccggcgcagattttctcttttttcgccgccgttttcggtaaaagcaagtcggcggaaatagccggtttttctgcatatttcgtctatgagtttatccgccgaaagaacgcttgcccggtaggcaaaatcttttaaaaattccagcatttttgcggccttttcgcttttcgcaagcgccaaggctctatacagattttcggctttgttttcgttgcgcatttttaaaatctcgtcaagggaaaagccgaatatatccccaaacatggcggcggtaaaatacacttcttccgtggggtttgatattacccttaaaaggtttacaacccgctgtacctccggccgatttatcataagccgactgtcacggacaaatgccctgtgacccagtttttcgatttcttttttgaaaatatcggtttttttgctgtttctcaaaaggatacagaagtccccggctgtaaccggtcgctcttccccggttttgtaatccacggtgattttgaagccgctttttatcatatcggatatgagcatggcaacatttttttcttcgttttccgggtaaagtttcaacataacgcttttttcgatgacagcctcgttcagcgtccgcagttcttctttttcgtcatagtccacgccgccgcaaccctttgtcattatattgcggaagatgtagtttacgccgccgattattccgtagctacttctgaaattgtggggcagatacagagtttgatttttgtccctgtctgctttttcaagttctcttttggcaagaaaaatttcagaactccgtcctctgaacccataaatagcctgtttgatatcccctacaacataaagattttttgtgttttgggaaaggagggtaaatattctgtcctgaacttcgttggtgtcctggtattcgtcctccattatatacaggtagtgatcctgcaaacttttgcacagtcctgtaggttcttccccgtcgttttgtaaaagttgcaacgcaaactgttcatagtcggaaaactcgaacatatttctctttttctttatttctgtaagcttggccaaataaaaatcaaaaacttgaaaaagaacccttacataatcctcggtaagggatatgtcgtaagcgtatttatcttcgtccaaataatcaagccttaaatcaatctcctcaaaggtctttttgtattcgtcgtatatgtcctttgtggcaagggaatattcgtctgctcccccttttaccctgcctattttatcagggcctgcctttataagggcggaaagttcccgccagttttcctcatttgcaagcccggtgattttttcccctgtggcaagccgggcttccaaggaagtttcatagccggtactccgacttttttgatacattttatcggcctgttccgccaagctcaaagtgtaggaggctatctgttttacggtttccgcctcttttttgtatgcgggagaaaggcgcatatccctgtaagaagaatagctttccgccatttctttagcctgctttcccggatttggcaaaacggaaaagaatgtaaacatcttttgcaaaaaatctcttatgtccctgtcggtactgcttttgccgaagaatgaaaccaatccgctgaaattttcaaggccgtaaccgtaattcatggcccggtctatggcctgccgatgtatctgctctgtccgtatgtcgtcgcagatacctgcgtccggggagatgtccaagatttggaaattttcccttgccagttttatacaaaaggcatctatggtggaaatatcagcattttgcaattttaccctttgccggctgagataggcgctgtccgggttttgagccataagccggcttaaactgtcatctattctctttttaaattccgctgccgacgcattggaaaatgttactatcaaaagcctgtcggcgcttaccgggttgctttcgtcagccaaaattcgcactgcacgctcaaccaaaacactggttttaccgctgcctgcggcggcgctgagtatggtaaatttatcctttgcggctatggctttttgctgccgctccgtccactgtttagccatttttttcctcccggtcgaactgccgtttttccattactttctttttgtttgtattaaggcacacggatttgtaattgcagtatttgcaggctatacccgtatcctcccgcttttccgccaaaggcatatcgtcaaaggtgccgccgtaaatgccgtctcccattttttgcaccgcatcttttacatattccaatacagcgccgaacttttcccggcttaccgcttcgcttcccggcagttttttgattttgcccttgtcgttttttattacgccgtactcgcctttttcgtttttgtcaaaggcacggcaaatttcttcctctgccaaagccattccgtcggctccgtagagcttggcctcggcttcgcttttgtcaaaatatgtgtcggcatccgagtgctgatacaccaccccgccgggcaaaacagggttgtccttttttgcaaactgctgccgtataagcacgtacatatatataagcatttgcatggaaaggccgttatatattctgtctaaactgaaattccggctgccggttttgtaatccacaacccttaaatagtccttttcttctccacggtaaacatctactctgtcgcatataccggcaatatttaccctgttgcccctttcggttgtaacggtcagcggcggcactttgcccttgccgcctattcgcagttcataagcaatgggcttaaaagaagaacttgcctgttcggaatagatatacttcataaaccgaccggcgttttctctcatattccgatactgggatgtaaattttacattgttgtaaatttctcttgggtagttcttttccaaaaattcctttaccgcccggtctatgtctttttctatgttctcccatggctgtaacggatagtcccggccgtatttttcaagcactctctgggctataaagtgcatatagtcgccggcaattcgccggccgaattccgccttttccaaagggcgcacctttaacacaccgtttaaaaagtacataaacgggcatttgtagtagttttccacatgggtaggggtgatttctataatatccccaagtaccgaagcaaggtattccaaatcttccacggcaaaccgatgctcctgtgagatttccacatttgcacctatattttcaagtagctttttccggctttccctgcttgaattgtccgccagcaaacttaaactgtcggcaaaaaactctcttgttacccggtagtcctcgatttttaagacaggtgtgggaatttgcaaaactgcggccatattttccgcccgggaggacattttttgcaaaacgtctatatttttcgtagatgaagatatgaacatatactcccttgcagtggtaagagctttgtaatagtataaattttcaaaggcaaactgatttttaaaatcactgttcagatttatttttaaattttcacggtcataggcgtttagcaagccgggttcggtggcggctgccgggaaaaagccctcggcggcgcctaaaatatacaccgctttaaccgcattgagtttcattctcttaggccggcttatcatcaggcagtcttgagtttccggggcaaagccgatttgcaccccctcggcaataagaccgaacaattcccgaagatcttcctgagatacaacatcgtcccccattatatcgtaaagccggtcaaggcaatccacagccgctttccactgacgaataagcaaatcggactgtgttgtgggcatctgtgccgcaaggccccttactttgtcctcggctcccagagccattacccgccgatagcaatttttaagtatatccgccgccaatttagcgctttggccgctgccgaaagaagaaaatatatcgtaaacttcccttctcaaagcatttagctttacaagcaattccttttcgctttccgtaggctccggctttaagccgccaggggaaagggtgaaatcttttgaaaaatcaaactcataatcccgccaaacaaaaagataattttcaagctctattatgtcatcatcggcaaattttgtaaggccgctttttaaaagttttataaaattttccgccgtaagcccccgagagattatctctatgacggttttgaacaaaaccatgggactgctggaagatataattcggttttcgtctataaagtacggcatacccgcaagggtcaagctctcctgcaaccggttttcatacttgtcaagctgggggcaaactattgcaatatcattgtaagtgtagcctttttcccttatcatcttgcctatatgggcaacggcaaagtttacctcccggctttgggtgtcgaattttctcatttcaactccgccgttgacgactaagccgccgcctttgccctggacaaacagatccacgctgcgcagatctttattcaaaaagcgaacagaattttccattaaaacaggccgttcaacggttacattcacctgttttgcaagatttttaagttctcgtattgttttttgcacaaaggaaaaacagcctacgccgcctgttttgtcggcttcaccgtcggcggtaagtgctaccgttacgctttgactgtcggttaaaaaacgctctatcacagccatttgcccccggctgaagctctcaaacccgtcaataaaaatattcatttcctcggtatatcttgtgggcatattttcggccaaaagggtcaataaatcttcgctgtctataaatttatcacccataaggccggcgtattcggcatatataaggctaagttcttttaactttgggctttccccggcggttttctccactgttttatagaattttgcgctgtcgtaaccgctgcgttttaagtcgtcgaatgtgccggtcataacatagctgaaattaaaact

SEQ ID NO: 2835 - DNA, 9369 bp, Unknown
  16S sequences of unknown bacteria
aggaaaaggtatattgtagtgaccgctagatgagtcttttacaatataccaggaggaatagcatgtatgacgcattattgatcaaaagcgacgcagacagcgccatgaagatcaaaagcatgctggacacacgattttccaatatctcgatgatccttcaggcagacagtctgtctcagaccatcctgttatgcaggcaacatgctccgatcttgatctttctggatacggcacagctcagtgcggaagaagtcagcagctggtcagcacagcttcatgccctttgtccggatgcatgggtattgttgatggtcatgcctgacaaattgccgcaagcacttgaacgatgtgtggaaatgaccgtgatgaagccgatcgatgtggatgcattagcagactgtatcgaacgcatcatccaaaaaacagaaattcagatcaggaccaagcagcttctcatcgatctggagcgaaaacacgacgatcttcgcccacagatcatcggcgcgctcattcgtgacatcgctgtcagcgcttcagaaacagccatctgcgataagctggatgcgctgaacatttcttttcaaggcggattcctcgctgcgatacagggcaatgccgcaaaagagaaaaaagcgatgattcattcgctgtttgagaaaaacgggtttatcgtgctttccagcgattttttcagttactcttttttcctcatgctcaaaagccctcttcatccatcagaaacacatatggatatccgcagccagctcaaacgcatagactgctatgtcggtgtcggtactttctgcacgcatccaagcgagcttcatctcagctatgcaaaagcgctccaggaactgttgtccttaggccatgtcatcatcaacaaagagactgtttccccgctgagcgaaacgatcatacacaatctaaactggttggcacggatcatcttttcttacttcctgatgatgaatgagagtcaggtgagatccagacttcgtgccgtggcaaacgcattgtctggcaatgatgcacagaccatatacagtgtgatcttctggctgtatgaaaagctggatgcactgttcagctcctcttttcattctgctcagaaaaacacaatgacggatatcagcgagcatcacagcgcagacgaactctatacgcttcttttccgcatgtatcaaacgctgtcctcccctcatgaaatgcagcgaaatgacaccgcgcatcaacagatgcgagcgatcctgtatcacatcctgaacaatcataccaacagccacctcagcctgcatgatgtttccgaaacgcttgacctcagtgagtattacatctgcaagttgttccacagctgtacagatttttctttcattgaatttctgaatatgtgcaggatcgaacatgccaaaaatcttctcgttgccaatcataagatcaaagagaccgcaatcgaagtaggatttcacaattcctcttattttggaagagtattcaaagcatacactggcacgacaccgcgggaatatcgggcatcttatggcacttctacttattgagaacaggagacgaaagaggatatcctcccacagacggcgatatgtctttttgcgctcctgagcagacgatgggcaatgccaaaaacctccctgtctgaaggagggatgtccgttcaaacagagaggtctgaggaggcaatcttcatgcagcctgtcatcgggatgctcttctgcgtatgtgaacgcaggtcatcaccagcacatatcttctcggctcagcctccatgccgcgcgttcactgccatcgtcctgtacatcttacgcagctgaatgatcatcagcagaagatgaacggcaaacacgatcagcaccagctgggtcagataaggaaacatcggcaaaaatagcagtacgacggcatacaagaataatttgcgaaacaggatcggcagcatggccgcgatccgccacagacgcacgcagcgcgatgggaggagatgctgaaggatgcggcaatagatgtccttggtctgatcgggacgaagccgcagcaaggcatacagctctctgcgctgtttcagaaagaccgtcagcagcatcgcattctgcaccttcttccggatacgcacagggccaaagacaacggcggcgatgaacgtgatcagccagacgatcaagaaggctggcagcgcgtgggtgccgaactcttcccattgccgtatgttgaccgccatctgaaacaagaaggccagcgtgcagaaagaagcgacattcaccctagctgtcgacgctcccaaatagccatccggaacgatgaactgttcgagcagcatgccgatagatccggcaagcgccaggctgagcaggatctgcagctgtacgccggcatgcggaatgagcaaaggcaaggtcagcacgatccaccatctggcatcgcgcagacaatcgctcaggatcatggggcgcagcttgatcgggtatgcgagcatcgggatgaagaactgctccttacgtttcagcgagaacagcaatgccgcctgcagcaaggccaagatcagcgcatcgatgcccagcgtatggaacggaagcagcatccacagccacccgaacgcagcgcacagcggcaagacatggcggcgaagcgtcggactcatcggatctcctccagcagcgagacgacctcttcctgtccgctgacatctgcgcgcaagccgcctttctccatcagcagcaagcgatccgcgatctgcgggatgatgtctgtctgatgggtggtgatcagaaacagccgctgctttttcagccgctggatcaatgcgatcagctcatgcacgctgtaataatcgaccgcgtgaaacggttcatccaggatgatcatgtccgcatcgctgagaagcaggcaggccagggctgccttctgtttctgaccgctggagcaggccgcaagacgctgctgcaaaaaatcgatggacaaagcatccatgatccatgccgtatctgcatcagcggcgctgaaattcttctgtcggaagacccggctgaaaaactgcagattggcaagcacggtctcatcctccatcagcggattatcataaggcagataggcgatgtgaaaatcatctcggatgatctctccttcatagggaaataatccgcagatcagattgagcagcgtagacttcccggcgccgtttcggccgtacagcacgacacagccttcatcgctgcgcagcttcaggttcagatcctcgatcagcggttcctccgtatatgaaaaacaaacatggttcagttctaatactttcattatttcctccagtaacagcatttcgctgtagtcgttcgacttgagtatagcacaacttcagcaaaaacgttccaataaagagatagttacaaaaaagtgcctacttgtcatcagcagcatacacgctacaataaagtcaaatacgaggaggaaagcgatgaataatctagccagattgaatatcgacgatcagcgctgcatcggctgcggagcatgtacccgcgtatgtccgggcagcttgctgtatctgaatgcgcagcataaagccgagcatcatgagatcagcgagttcggatggaacggatgctggaaatgccagcattgtctggcagtctgtcccaccggcgccatttccgtcctgggccttcggcctgaagacagcctgaccccgcctgatccgcaagaggccgctcaggtcctggaccgtctcatcgcctgccggcgttctcaccgccgttatcttcggaagaatgtagattacggcacgatccatcacatacttgggatcctgcaaaacgcaccgaacggcggcaacaagcagctggtggaatacacgctcatcgatgatgtggaccagatggaccatctgcgtcagatcgttcgctcacgcttagacaagctcatcgaccaaggcatatatccacgaagctatgacgcgcgttcgatccaggatctgatcaatgcggaaaagaccgtacgtccggacatgatcttctgtcaggctccgcatctgttgatcccgcatgcgccaagaggaaaaggatgctggcagcaggatatcgacatcgcctgtacatacgctgaactgctctttgccgcccatgggctgggcgccgtcatgatgagcttctgcctcgacgtgctggatctgatgccggacatcaaggagattctgcagatcccaaaggatcatgattatcacatggctatcggtttcggctatccagagatccgatatgcccgcgggacccaaaaagaaaatgacctgaacgtgaatgtgctgaaattcatctgactcatcctcagcgcatcatgcgtattttcttgaaaatagataaaagccatgcctgtaatcatgcagacatggcttttatccgctttccttagtcaccgttttgtccttgcgcatcagctgtctatgatctgatatacgcgcttacggtttctatgagaatgttgagcgttaagcggtataaacaaaaagagaagaataaagaagtcttggacaattattatcctgtccatgttttattatatgtggccacactctcaatatcttgtaaaatgtcgtacaatcttgtcatttcacattttccatctccatacaaataaacagagacaaggttttcccctcatctctgtttgttctctgctcagcttctctttctgcgataagctgcaattgacgctgcgccggctgcgatcatcagcgcgaacactgcgttcgtcgtgttcaccgccgacgtattcgtcggatcttcagcgtttgtgctgtcgttgacctcgaccagctcatctaccgatacctgcagttccttgaccatatcgtccacttcttcctgggtgatctccggatcgttgatcatctgttctgcacgtgcgagggtctggataacggcctgtgcgctgtctgtcgtgtatccactcaagtcaaggctcttcgcataagcgatcaccttttccagggcgctcacatcggccttagtacgcgcgttcaggcgtgcttctctcagcatcttcaccgcttcgtcgatctctgcctggctcgttgcaatatccagcacgttctgcgcgtcagccagcttgtctgctaatccttctacgctgctcgggacatagtcatcgaggttggcgagcatctcattcacgagatcgatctcgtgctcgagcgcgctcgtatctaacgtgatggcttccagaccagcgatcgcatcgctcaggttcgtgatggcttccgtgacttctgccgtcgtggcatcatcattgatcgctatggcctgtgcggcgtcgatcgctgcctgcagtgcttccagactttctgccgtgtagtcaccatcgaggtaaccgtttgcggcttcgatcagtgcttccagttcagccttcgtcacgatctcccacagctcctgggctgccctggtcattgctttgtttgcggccttcagcgcatctgcgctcgcatccgggttatcaacgacattctgtgctgcggcaactgcgtccctcagcgcctgtaccttgcccggacggagtccttctacatcgttcaggatgttctcgttgatgaagtcgatcgttgcctggacgtctgctctcagggcatccgtgctttcatcggtattcagcgcctgcatcgcttcgctcagatcgagcagtgcagtgacaacttccgttgcggtcggcgcttccttggccagtacggcctgtgcattggcgatcgcttcggtcagcgctgcatcatcagagcccagtgcgacggccttgtcgaccatggtctgcagtgctgcgatcgctgcttcgcttgctgtttcgtcatcagtcggaacctgtgcgatctcagcgacttcatctgcgctcagcgcacgggtatagaagcggacatcatccagtgatccgttcagatatccggtgatcgagcttccgctgcttgcgcctaatcgatacatcggtccatcgatcgtcgcatccaaatgatcctgctcttcgccgttgacatacagcgtggtgccattgctgtctcctacaaaggtcaggtgtacccattcacctttcggcgcgctgtaatcaaaggtatagtccgctacgcctgcttccgtgatgccgaccttgccggtcttgttccactgatccagtttgatctcgcttacgctgctggatacgagcacggcgtttgttcctaccgtatcgccagctttgacccacatgccgatcgtccaatcgccgattgcatcgcgatagcccagatcgacatagccttcaccgctgaactgcagcgcgcttccttcctggccttcgccccagcctacgttcgtcagtatgccggtgttctgaccgctctcgtcggtgatggtctcgccttcgccttcgttcatcgtccagtatgcttcttcgccgaatccatacggatcttccatcatctctgcgatctcttcttcgctcagcacgctgttgtagatctgcagatcatccacggatcccttcatgtagcccatgtcggccagtccgcttgcggagttcgcgccgatccggcttgccggtccgttcatcacgacatccaagtgtccgctgtattcaccgttcacatacaggttcacgccttcgctgttgccggtgaaggtcaggtgtacccattcgccttccggcagctcatagtcgaacgctgcgtctacttcaccgtatttcgtcacgccgaccttcttcgtatccttgtattgttcgatcttcagctctccctgggttccggagatcaatgccgcattgtttccttctgccgcttcgcggtttacccacatgccgatcgtccattcatcctgcacgtccggcgcgccgatatcgatgtatccgctcgtgccgtccagatgcagcgccgtcccatactttccttctgtccagctcacgccgccgttcatcgttccgctgtacggtccgcttgctgcgtcgatcgtcgttccgcttccttcatccatcggcatgcggaagtttaccgggttgtaccagatcatggcatcgcgcttgtagccgattccctgcagctcaaggcgctcatcatgcgtcgccagtcttgtcttgtattcatcccagctgcggtcttccttcgctgtccagccgatctctgcatggccaagcacgcgcgggtagatcatataatccagtgcttcatccgtcgcgatcgtctcggtgaacaggcaggtctccacaccgacgatctgatcctttgatccatagtcggtcggatcccagttgtaagaatcatctaccgggttatgcgttgcccattccagtccatacgggcagtcgctgtcatacttcatgtccatgtatgcgtgatccgccgggctgacgacatagttgatgccttcttcaaacttggcgttgccggtggaccagaactgcgtcactgtgccttccggatcttccacggccgtatcatagttctgccagccgatcggcgtcttgccatatttcttggcgatctcggtcacccgattcatgaagtatacatagtcatcatggctcgtgacatgcgcttcatcgccgccgatatggatatactttgacggagagatctcggatacctgacggaatacctcatcgatgaactcataggtcttctcattgcggcactccagtgaattgaagccgacatcccatccctcatacggacgggtgttgtcatagccgtttgccggcggtctgccatcttccgtagagttcaggaagctcagcgagacgagcgctgcccaggcatggctcggcatatcaaattcaggaacgatctgaatataacgctcattggcataagcaacgatctccttgaactcttcctgcgtatactgtccggctctgatgccgttggtgttgcaggaagtctgcgcgccgatcgtgcgcagcttatcgaggctttcgccatacatctcgcccttgatctccagacgccagccctgatcatcgctcatgtgcatatgcagggtgttgatcttatactgagagagcatatcgagctgacgctttacctgatcgacagtgaagaagtgacgggtcacgtcgagcatcatgctgcggaagccatattccggctcatctgcgatctgtgcgcatggaatcgtccatgcggtgccgctgactaattcttcactttcgatgtctgctggaagcatctgtctcaatgtctgtacgccatagaatattccgaccggtgcgccagcttcgatgatgacctgatccgtagtgacatcgatcgcatatgcctgctcggcatatccgccatccggattcagacgaagggtgatatcgccattctccggttctgttttttcgactaccggcagttcatagccagtagatacgcggaacacttcagcgatgtattcgccggtgttcgtcagttctgccgctgcgccatcgtcttcagcgatcacagcgatctccgcatcagcacccagcgtaaatgttccctcattcatagtatattcgcttggtttagggatgacattcagcgtggaagaggcttctgcggtctctacatctgtctgcgcctgcacaggctgtgctatcggggcaaacgctgttaccgtcatgcacagcgccgtcaagcaggccaacagtttctgcttcttcatttctctgctcctttcttcggtcacatcctttgatcgaaacgaacaccgcatgctcaccgcatcatcctccatcattcacattcagatgagggcttgtcctgcgccgtcagtcccgaaaaaaatgcggatatatcacctgacctcctttccattatccgcatatatgtaaccacttacatcttaagtatactcacctcatttgtatcgctcaatatcaaaaatgcggaatatcattgaccaagctttttacacccgaactgtcagtgactatatttttttcatcttgtttccagcatacaaaaggtagaaatgatcccgccgtgcctgcggtactgacgatggtccatgacggaatgaattcaggcatgctattcttcatactctttccgcagttgccccgatcctggcaggcataggtctttgacaccgtaccagtgggcatgtctgctttccgttacaagaggacaagggacaagtcgtcattcaaatgaacagcaacaagtaaaataatcggcttcatacaatgatcttcttgcgtgaattcgtcattaaatattcgtgcaaaacattgtattcttcgtgcaaattgcataaactaaaagtaacaacagaaaggggttgatgacatggcaggaaaaaccacaaacatcagcatccgcatggacgcaaatctgaaggcacaggccgacgccctgtttgcggaactcggcatgaatttatccacggc

SEQ ID NO: 2836 - DNA, 4431 bp, Unknown
  16S sequences of unknown bacteria
aattccaaaaaggtgacgacataggcgagcgcggacaaaagcgcgatcttcgcgatgcggcgggcgctgaaaaacttttctttgcgcgcggggggctcttcgacgggcgcggccgcgtgaaggtgttcttcctgcataataaaaatacctcgaaaaatatattttccaaggggtgaaagaaagccccgttcgaaaacggggctgcattttaaagtttccgcgcagagaatacgtacgccgaacatttaaaacaattcttttttcatccggactataccgtcggtacgggaatcgcacccgttcggaggacaaaactgccctttcgcagactttactgccggtggggaatttcaccccgccccaaagaatttatttgattgtcgctattataatacgaactttggattttgtcaacaattaaccttactttttctatacaaataaacacttggtaattatactgaaaaaattatttttatgagttataatagtatcaaataaatacttttggcaggcaacaaatgcaaaacatattcgaacaaatttattttcaaaacaaatgcaacggcgaaaaagttcctttgagccaagaatataaacgccttgcgcagatcctgatcgaaaaagaaaaaattcttcttgaaaaacttgaagacaatgcggaattgaaaaaactgttttccgaattcggcgacgccgaaatgcagacgcacgcccgaagcgtattcgaattttatcgtgacggtttttttacgggatttcggctcgcaatggaaatgttcgacggcagcgacgcgtaaattacagaatatcgtcctgatacaagggatgcttgtcgcaaagtcttttcacttcggcgcggacggtttcgaacgccgcctcgcgctcgtcgatgatcttcgtgatcaggcgggcgatcgtgcgcgcatcttcctcggtaaagccgcgggaagtgatcgaaggcgtgcccagacggataccactggtcacgaacgggctggtttcctcaaaggggatcgtatttttattgacggtgatattcacctcgtcgagcattttttccagttctttgcccgtcatatttttatcgcgtagatccacgagcatcagatggttgtccgtgccgcccgaaacgaggcgcacgccgcatttcgtgaattcgtccgccatggcggcggcgtttttgacgacctgacgctgatactctttgaattcgggcgagagcgcctctttgaaggcgaccgctttcgccgcgatgacgtgcatcaaaggcccgccctgcattccggggaacaccgctttgtcgatggctttggcgtactgttctttgcacatgatgacgccgccgcgcggcccgcgcagcgttttatgcgtggttgtggtgacgaaatcggcgtacggcacgggcgaaggatgcaatcccgccgccacgagtcccgcgatatgggcgatatccaccatcagatacgcgccgactttatccgcgatctcgcggaggcgcggaaagtcgatgatgcgcggatacgcgctcgcgcccgcgacgatcattttcggttggttttccgcggcaaggcgttccaactcgtcgtaatcaatggtttcgctctctttggaaacgccgtaagggacgatcttgaaatattttcccgaaatattgacgggactgccgtgcgtgaggtgtccgccgtgcgaaagattcatgcccagaatggtatcgcccggctgcaacatggcaaaatacacgcatgtattggcgtttgcgccgctgtgcggctggacgttggcatgatcgcagccgaacaactgcttgacgcgctcgcgcgccaggtcttccacgacgtccacgtactgacagccgccataatagcgcttgccgggcagaccttcggcatatttattggtcaggtggctgcccgccgccgccatcaccgcgggggaaacgaaattttcgctcgcgatcaactcgatattgttcctctggcggtcgagttcctgtttcatcgcctcatacacttcggcgtcggcatttcgaatggtcgttaaatcaatcatggtattttctccgtgcgtatttttattcggttttatcatagcacagttttcgctttttttcaatcgatttgagcgccctgcctttcattttctttccgcccgtcaagaaaaaggcggcgccgaaaaatttcggcgccgccttgcgcggttcagatatttttatcgatgaattcgcgcatggtttccttgggaacaaagcccacgtttttgcccgaaagttcgccgtttttgaacaccattacgcaggggatgctcatgatgccgtactcttcggcaatgtcgggattgtcgtccacgttcaccttgacaaagtccgctttttcgccgtaatcttcgctcaacgcgtccagaacggggccgagcatacggcacgggccgcaccacgccgcccaaaaatcggcgacgagcgtctttccttctttcaatgccgcacgaaaatcgtcggtattcatttcacgtaccattgtgattgtcctcctgttgttcagtattgattatttcaacgacttccataccgaagcccttgctttttgataaaatcctgtcgaaaatcacgaccgcggcaaaacccgcagccagcattcccagacagagcagaacggtatatacttccttttcgaagacgaaaaacccgatcaaaacgcccagtcccgcaaagagcacgggcacgatatagaccagaaaagaggcgagcgtgcggttatccttttcgcaggcgaccgtcacgctgtcgccgacggcggcgccgatctcgtttttcactttgacgttgaccgtgctcttgccgtttttaaaggcgcacgcgcggcacgattcgcactgcgggttcttaacgatgcgcacggtggcgatctttcccgcggttttgacgacggtggcgcgttctctcatgcggcggacccctttacagcacgtattttttcagatcgcggttgcggatcatggtttccaaatgctcttccacgtattttttatcgatagtgacggtaaattcgggataatcgccgcccgcgttgaaagagatatcttccaaaagatgctccatgaccgtatgcagacggcgcgcgccgatatcctcgctggtcgagttgacgtccgcggagatctgcgcgaccgcgtcgatggcgtcgtcggtgaacaccagatcgatattttccacttttaaaagttttgcgtactgcgtggtgatggcgttctgcggctgggtcagaatatttttaaaatcttctttgctcaggctctgcaattcgaccgtgatggggaaacgcccctgcaattcggggatgaggtcttccaccttggaaacgtgaaaggcgcccgccgcgataaagagaataaaatccgtcttaacggggccgtatttcgtcatgaccgtgctgccctccacgatgggaaggatatctcgctgcacgccctcgcgcgacacgtccgcgccgctctggttggctttgcccgcgatcttgtcgatctcgtcgatgaagatgatgccctgttcctcggcgcgggaaagcgcctcggcgttgaggctgtccttatcgatgagtttttcgctttcctccgcgatgatctgattcatggcggctttgacgctcatcttgcgttttttcttcttttggggaaggatatccccgaatatactgcctaaattgatctcggcgccgcttcccggcacgatctccatgctcttgggcgcgtccaccacttcgatctcgatggcgagatcgtcgaattttcccgcgcgcagatcttcgaggatctgcgtttcgaatacttcctttgcaagttcgccgcgctcgtcctttttcatcgcggtgagcacgttgacgagtttgcgctcggcgacggcctccgccttgatggcgacttccttcatcttttcctcgtgcacgaggcgcgcggagcattccacgagatcgcggatcatgctttccacatcgcgcccgacatagccgacttcggtgtatttggtcgcttccactttgataaagggcgctttgacgagttttgcgagccttctcgcgatctccgtcttgccaacgcccgtggggcctttcatgatgatgtttttcggggtgatctcctccctgtcctcgtcggacaggcggctccttctgtaacggtttctcagggcgatggctacggcgcgttttgcgctgtgctgcccgatgatatatttatccagttcgttgacgatctgtttgggtgaaagatccataatgttctccttaatcgattttaaacggtttccaccgtgatgtggtcgttcgtgaagacgcagatctcgctcgcgattttcagggctttgacggcgatcttttcggcgtcgtacttggtttcctgcacgagcgcgcgcgccgccgcgagcgcgtagttgccgcc

SEQ ID NO: 2837 - DNA, 6097 bp, Unknown
  16S sequences of unknown bacteria
gcaagaaacgtatgtcctttccaactatgatgatgcgggaacttacatccacgaaatggggcatgcactcaactttttccgcactggagatctgatggtgttggagcaggatctgcaaggttctgacatttcggaaattcattcccagacgctggaacttctggccagtccctggctggaccgcatttataccgatgcgcaggcagcggaaaaatccaacgtttttgaaatgtttatcaccattctttccgcaaccatgattgacgaatttcagcataaggtgtatgaaaattctcagatgactactgaacagctcaacgccttgtatgcccagctggagttggagtattttggtgaaattgacaacctggggctttcctatttggacagaggactggactgggtggatatccaccatctgtttgagtcgccgatgtactatgtggaatatgcgctgaccggtgtggttgctcttgatttctggcaggattctaaagagaactgggacgacgcctttcacgcttacatccagtttgtagatattcccaatgacgtcaatctgaccgattcactagcacttgccggtttggacagtctgtttgaaaaaaacaccattgaaacactggcacagaatctggcatcttatttttccgactccacatttacagaataaccaaagtatatttacacaatccgcacaaaattattgaattattgaaacaattatagtataatataatcaattagaaaaaagcgttttatatctccgattgaaattattttatgtgtgctcttccctatgggatgataaaaaataaaggggttgaatctatgaacatcgtgattactgccagaaaaacaacggtaaaggactcttttaaagagcgggttgaaaaaaagctggctaaattcgaccgttttttcgatgatgcaagcgctaccgtcgttgtaaccaatgaaagagaccgggagacggtggaaattaccatacagtcaatgggaatgttcttccgggcagagaaaaccaccggagaccggatcgattccttggaatctgtgacagattctctgatgaaacaaatcatccgcaacaaatccaagcttcagaaaaaattccgttctcctgcttttgtggaaccggttgccgatgaaccgctttatgaggaagaaaatgcccacgtggcaaaagtaaaaaccttcccggtgaagcccataacagtggaggaagccattttgcagatgaatctgctggggcacactttctttatgttccgcaacgcggattccggagaaattaacgtcgtttattcccgccgcaacggagattacggcttgttggtgccagaaacagaatgacagcaaatcatttgaaaagggacggtatggcttcataccgtcccttttcctgttttccaacctgtattttctgattgcaagaaagtttaaatgccctttttaaatttccttgcggtttatgtacaaaccatagtataataataaaaagaatgcttttgtctttattggactgacagcataagaatttgtctcgatctgttatacttttgtttctattttgtacggccattaaaaaggaaagaaaaaggtctttgcgtatgagtgtgataaaaatggcaaccccttgcctgttcgggttggaaagtgttctgtccggcgaattaaaaagaatcggcgccaaaaatattgaggcgactgatggtaaggtcacttttaccggtgactggaatatgctggccaaaaccaatctctggctgcgcactgcggaacgggtgctgattgtcttggactcttttcgggcggaaacatttgaggagctgtttcaaggggttttcaaaattcctttcgaagaatatctgggaaaagacgatgcttttcccgtaaaaggctggtctttaaactctcagctagccagcgttccggactgccaatccatcatcaaacgggctgcagtgaaaagaatggagcagcattatcaccaaagctggttcgccgaaaccggggccgtgcatcaaatacaattttctatccgaaaaaatattgtcaccatttttctggacacttccggcgcagggctgcacaagcgaggatatcggcagacttctttgctcgctccgattaaagaaacactggctgcgggtattgttgatttcactcgtttgtacgacgattccgttatctgcgaccccttctgcgggtctggcactctactgatcgaggccgtgcttaaggggatgaatatcgcacctggtatcaatcgccgttttgccgcggaaaaatggaactgtatcccggctgccgtttggaaggatgcccggatggaagcgctggaatcggtcaaaagagatgctaaaataaaggcatacggctacgatatcgaccctcaggcggtagaactgactatggcaaatgcaaaaaaagcaggtgtcagcgcacatatccgaaccaaagtgcagaacatctctcaactttctctcccgcccgggcgggcgattgtgatctgcaatcccccttatggcgagcgtcttctggaaatcaaagaagcagaacagctttaccggacgatgggaaaggttttccctgctgacccggacaaaaaatattatgtcatcagcccccacgaagaatttgagcatattttcggccggactgccgaccgccggcgaaagctgtataatggcatgattaaatgccagttatttatgtatttccgctaactctttgccgtataaaaattccatgcatctaagaaatataccacgatggtattccaagtggaagaggcatgaaatttggcgcaaatgggccccttgactgaagtttttatggccgcatgccgcctttggtggacgcacggccatttttgcatgataaaaaagccgcctgacaggcggcttttttatcattttcatcttaatcggattattttacagttcaaaagaactgtggcgggtcacatggcagccaatattaaccgccactggaagcccagcaatatgcgtaccataggtctcgatattcacgcataatgccgttgtactgccgccaaagccctggggccctacattggtctcgttggcccggcgaagcagttcttcctccatctgcgcataaaggggatctgggttacgcagatcagaactgcggcacaacgctgtttttgcaagcaatgcacattcctcaaaatcgccgccgattcccacaccgaccaccataggcgggcagggattcgcgcctgccaactccaccgtctcgatgacaaaatccataatcatttcttttgtagcggcgggagtaaacattttgattcgactcatattctcactgccaaaccccttaggtgcgaccgtaattttcaagccgtctccttccacgattttgacatgaataattgccggtgtattgttgttggtattcacccggcggatcgggtcgctgaccactgagcagcgcaacagtccttccacatatccttgggccacgccttcatgaatggcgccgtttaagcttccacccactaaatgaacttcctgtcccaattccacgaaaacaaccgccatgcccgtatcctgacagatgggtacgtcgatattttttgcctcttcaaaattggtgaccaaatcttttaaaatctcttttcccaaggggctgctttctgttttgcaagcctcccgcatacggcattctacgtcgcagggaaggattttattcgcccggatacaatgctccttaaccagttttgtaatttccgaaacttgaacttctctcaccaaaacgtcctcccggttctctattttacctgttttccgtctacaaaaaccattttcggtttgtttgccacagccagcggatccccatcaaataccagaatatctgcgtcttttcctgtttccagcgagccgactcggtcatccagtttgcagattttcgccgggttgatggtgatagcgcgcagcgcctgctcatagtccattccctcgcccactgcaaagccagcgctggtcggcaacaatggcattggaatcacgtcgtgatcagtacaaatcgctgtcaacacgcctgctttggccagaacgccgggatttgcctttgtggaattggtaagctctggcttggaacgagtggtaagcaaaggaccgcagatggcgggaaccccttcttttgcgatatcttcggcgatcaaatgcccctcggtacaatgaaccagaatataatccaaatggaactcccgcccaatgcgaatcgctgtataaatatcatccgcccgatggcagtgaaaatgcgccttgacctgacgctttaaaagcggaatcagcgcttcgcatttcatgttgaattccggttctgctttggaaggatccgccgcagctttttcctttttttccaaatatttctgcgtcttgattagctgctcacggataatggcggcggtacccattctggtagacggcaactgatttttgcccttataaacccgcttgggattttcacccagcgcaaacttgatgcccgcattttctaaaagcaccatgtcatctactctggtaccgaccgtcttcattgccaatatggtaccgccgatgggattggcacttcccggacaggtgacaaccgatgtaatacccgcgtctaccgcttctgaatagcatctctctctgggatttaccgcatcgatcacccgcaggtggggcgtgcaaggatccgtagcctcattgcagtcggaacccatcggtccgatggaatcctcttcaattccaatgtggcaatgcgcgtcaataaagccgggtgttacagttgccccttttaaatcgaccgcatcagatggaacattcaaaagatccgccatcgagcctacggaagcgatatgtccgtcccgcatttcgataaagccatctttgatgggagaaccgttcatcgtgtgtagatagccatgaatcaaaaacataaaaattcctctctttcctgtcataataccaaagaaaaaagccgaagggtgccccctccggcacaaaacgccaaagaataaagattttgaaaaagcgctgcgctctttcttctgtttcagaccagataatctttccccggattcatttagaagagcctcttcttccagaagaccgtctgccctcgttgtactttttcagatcggacattttgtcatcactggtctgcttaaatttgctgagcatgtcttcaaacgacatattttcatttttctttttgctgttccaatcatactggtcggggcgttccaaacgatgggcacccggcgcggcacgccttggagcagaagtgggcctgtccatcgcccgtttcatagacaaactaattttcccttcctcggtgatgttgagaattttcaccttcaccacctggttctcagtcacgtggtcgcggatctcgttgacataggtcggtgccacttctgaaatatgtaccatcccggttttgccgccgggcaattccacaaaggcgccaaatttcgtgatccccgttactttaccttccacaatgtttccaaccgcaagctgcattaaaagctatgcctccccttaaaaaataaatcataaaatcgagccctttcaggctcagttctttgaactgtcgatataaaccttttcgtccggataagcatagcccaatctttctctggcaatccgctcaatgtaatctttgtcagcactcatcgccaacaaccgctctacctctttgttttcttctatttgctgttgacactgctgctgcactgcctccagcgttattttccgatctcgaatttccaactgctgcacaacaatggaatacgcaatatacaccacaaaaagacaaaccgctatcttcagcaacctgctctttgaagttttcttttgtttttccatggactgcctccccctggcaaagccccggcttatttttttcgccgaaaaatctttctcttttttggggatacagctcccctatttttaaaataattatacaataatatacgcctagtttgcaagtgttttctgttcttttgcacagcttttttcgcgttttttcccagttttccaaaaatttttgcgacctttttgccaatcca

SEQ ID NO: 2838 - DNA, 32147 bp, Unknown
  16S sequences of unknown bacteria
cgccgggggcggctgcgccgcgaatgtttaccttgtgcagagtgtggtgtgggcgcgggtggccgcctcaaagctaggcaggtcagtcgcggcgatggcaatgccctcggttttggcacgggccagcatagcgtcatccgggcgaatgccctcggcgaggacaatgcaggacacatcggccatgagggcggcaacaatggtgttctgatttgccataacggtgaaccagaccccatcagtgggggcgtggcccatcaccatgctgagaagatcgcagcagtatacaccgccggttatttcccgctcggggcagcacagcagggtaaagccgcaggcgcggcaaagctcattcgctgtcatgttcaatatcctccatgggggtgcggtgggcggaaagccccgccagggactgggccagctgctccagcttttccttaagcaggtagatgcagtcatcctcggtgcggtagccgcggacaatatcctcggcgagggcatggcaggtgggggaaccgcagctgccgcaatccaggccggggaagcggcgctcgtagctctgcatcttggcgaagagtaccagcgactgagagggatcgctgcccagggacatgacattcagcggctcgatctttttattgaagtaaacatcctccggcagccattccggggtgggccactgggtaccaacctgtggcaggtcgcgggccagccgcttgatgcgggcggccgcggcataagggttttccacattcattacgccgcctacgcagccgccggggcaagcggaaagctccacaaaatccaggcgggtgaactgctcgtcctcgatggcttccagaatcttgataacattttcgatgccatcggcggcgatgtagcggcgctgcccgctgccggtggattcaccgctattggcggcccagctaagaccggtgctgcccatgtgggaaagatgctcgaactcgggcagctccatctttttgacctcctgcaccagctgggggtatacccggctgatggcgatggcggcatcgatattacgggtctgattgcccagcggcaccttggcggccgttaccttggcggggcagggggtaataaacgcaacgccgatctcctccggcttgaggccggtcttttccacggcggcgcggcgggccagcacggcggccagctccacagggggctgcagaggcagcaggtgctccaaaagatcggggaagcggacccggataagccgcagcacggccggacaggccgaggagatgagcggcagcgggccctgataatgcgccatgtattccttggtggactgggagatgagttccgcggcggcgcccacctcgtaaacctcatcgaagccgatgcgctgcagggccagaatgatgcggccggtgtgatccaaatgcttgatctgggcaaagagcaccggcgcaggcagcgctatcttatacttgaagccatccagtgcctctatggtatcgctgacagcccgcttggcgtggtgggggcagatgcggatgcattcgccgcaatcgatgcagcgctcgcccaggatgcgggccttgccatcccgaacccggatggcctcagtggggcagcgcttgacgcaggtgatgcagccatggcacaaatccttattgagcgtaacggagtgaaaataggtctggtgttccatcttttcctcgcttagtttctcccggcatcaatgcagatccacccgcagggagatggtggtgccgacccccaggacggtgtcgatctgcatattgtcggtgtattttttcatattgggcaggcccataccggcgccgaagccctgggcccggatctcatcgctggcggtgctccagccctcctgcatggccttttccacatcggggatgccgggaccctgatcccgcaggacaatggtgatgccgtgatcatcgatctcggcatcgatctcgccgccattggcgtggatgaccatattgatttcgccctcgtacatcgagacggcgacccggcggatggcatcgccggggtagcccagctggcgcagcacgcccttgaggtggccgctggcttccccagcatggacaaagtcatcgccggggacgatgtaatgatattgcagtgtcatggcgggcccctttatacgccgcgcaggccggcgccatacagcagaccgctggcggtgaacatgccgcgctgggtgctgatgacggcgatgcctttttcccgcgccagggtgaggacctcctcggcgggggttttgccccggacaaagatgatgcagtgcatatccagcatttccgcggtgcggatgacctgctggttgagcagcccggtgagcagcagggactggccctggccataggccagcacatcgctcatcatatcgctggcgaaggcgctggtaaattcgtggtcgtcctgcggcgcgccgcacagcaggcggccccccagcagggtgaggatctctttcattttcatggcgtatcaatcctttcggcaaaaagcggggaggatatccccttacttttttctattataacaggccgcgtggggcggcgcaacggggagaaaggagtggaggggaggattttaggagagctttttgacggactggtgcggttatcacaaggtgttcacagaatatttgtgccatttgccgaagaaaaaatcttgccaaccccccaaaaacacgctatcatatagtcactgtaaaatttaccgtaaaaaatatgtatatactttttcaggaggcaaatatggtactggagaaactgattgaactgctgtgcgaacagcttgatattgaggcggacgaagtgaatgagaataccgatatcgtcaatgacctgggcgcggattcgctggatgtagtggacctggtgatgaccctggaggacgagttcgatatcgagatccccgatgaggacattgagaagatccacactgttggcgagctggcccattatctggaggagcacatcgacagctgagaacggccagaaggcgaatagacggcagccccctgaccagtgggccggctgccgctttgttttgccgcaaaaaactgtattttggggcttgactttgccccgggtgaatggtatagtaatatagtcgcagcggatacgctggtgtagctcagccggtagagcagctgatttgtaatcagcaggtcgggggttcgaatccgtccaccagctccaccaccgcatgacataaccgaatatggaggagttcccgagcggccaaagggggcagactgtaaatctgttgtcactgacttcgatggttcgaatccatcctcctccaccacaaaaaagacgcctttagggcgtcttttttgtggtggaggaggatgcggggagcgcgggcttttctaaaaggcgagagccgctgccctgatttgacgcgaagggggaccccgcaaaggttcccccttcacacaaccccttccttgcggggaggaaggtttgcttgcggcttttttgctgtggaggaggatgcggggagcgcgggctttttttgcatggatattatttccttttcataatatctgaaggagaaaaaggcgagaatataggaaaaacacacaattgtaagatgagcgccagcaaataaaatgcaataattgaacaaaaataatgaaaatgagattttgatgaaaaattctcttgaattctttgtgagttgatgttaagataacgctaaggaaacaggaacgattcccataaattgaataacccttggcaaacctgctgaaaggcagggacgcaaagtaaagcgtctaaacgggaaaccgcatgaccggctgactgcattcttgagtaaaagaacgcagtcagcttttatatttaaaaaaattagaacagaaagggtaaataatgcataccaaaatcagcagcggaaaggaacatcgccggcaccgggcccgcagggtctcggtgctattggtggtgctggcgctgctgtttaccatgctgccaacgggcctttacacggtggcggatgccgccccggcggaggaagaaccggctctggttcctgctccggaggaggccctgcccgaaccggaagactccatgacaaaagaggaagagacggatgagcagccggccgaagcgcagcccgctgaagacaaggcccgtgcggcggccgccacggtggaatgctatgcggcacgggatggcatctggtacccggtgaccacggtgcaaaccgccgcgcaatatgccgatggcagcggaaagctccgctactatataacggcggcggagctggaggaggtatatggcgcctacggctttaaggcggcgaattatcacggggagcggttcttcccgcacaccgatagctatgaccccaacaaaatgtgggcaggtgccgctcccataaagagtgaggacggcggctggcagattccgctaagccaccggaccgagatccggctgtactacctgcccgcgaataaagaaggtgccgaaagctatttccttgataaaaaagaactgagcaacgaaacgctgctggcggagaatatgttctacacggtgacggtggaggacgacctgaacagggtgtaccaggagccgcccgcgccgaagatcgctttccatggggagaatgtgagcattaccctaaataccgtgtccagtatggcctgggacgccatggatggcctgaccggaacgcatctggagctggagccgaccaagcagaccgaaaccagtgtgacctataccatcgagaaaatcagccagccagtggttttctacccgcataccgataccctggtaataaaatatgaggccgagccggacggctggcagcacaagattggccagtttgagccttcggtgcaggcgccccagcaaagcgcgatggtaaagggcaaaaaaaccctgctggtggaaccgggtgacggagactacacgctgctggccccggatattgaccggatagaggtaaagctgaccggcgaaaaagccaataaccgctcactgttctattcctttttaggttggcgggtggccaatataacggaagaggtgctgctgcagcccggtacaaagctgactgccgcagacctgcagcactataccggcagcgatggcgaagtgacgctgcgggcaaaatggagcggcgaggataagctgaaacgcccaattaccacacattttttcctgcatctcaatggagagatcaggggctcggtggatgacggtgtgcaatgggaggaccaaaaggactatacgcccgccctatataccatccggatgctgggggcggacaatatcccggcggagtactccaataaaaatgcggagggtgtggtaaagccgctggtagcgcgggcaaccaatggcgacaatgcctacgcggtggatgacacgatccgcaacatggtgaataacccggtgcagggcggtaggctggaggatctccccaatgaggaaacgatctttgcctacctgcgggcccacagcgataccattaccatgaaggtggacggagtggagatccccgcggagatgctcaattcggattacttccagatccgctggaacatggtcaagtttgagcattccgatggctggcatatcgatggtgtgctggtggccaagcgcacccgcttttttgtgacaaagacctttgcgggggatgctgaggcgataaaacaggtacgggataagttcctcattactgtctcccacaccgaaaacggcagcagcgtgaccgattttaccctggtgccgcagcctgcgaaggcggtaacggaacagggcaagctgggttatacccgctatgatgccgaggccgatacctacacctgggaagtcccggcccagcagcggcgggactacacgataaaagaaaccggccatacgctgcagggtgacaaatggcgggtgaacaaccgctatctcatccgcaatcacccgcagggactttcggggggatatcaggactacccggaggaaagtggcattactattacggcggtggcctacggcaacgatgtgccgaacactgcggtgcagaccgtggctctgcagaacatatatgtggggataggtaccctgacggtaaaaacgcaggattccattaccggcaacgggctggcaaaggtagagtataagttgtcccggccgggcggcgctgaagtggtcttgtaccgcaagccgaacaccaccctttacagcgtggtgcaggaggagggctataccgagcagatcgccgactgcaagatcattgccgatgccagcggtttttttaccatccggctggaggaagggacctacaccctgaccgaaacgctgccgacggggtactttggccccggtactgtgcaggtgacggtcgtccaaaatactggagggaatatcagttaccatgcggaggcaaaagcgctgccggaagggataacaccctcgaccggcagctggctgcagaatgccgatgccgacaatgtggtcatcctaaatgtacccagaatgctcatcagtgtgacggcccgcagcagttggcccgccacgggggataagctgcctgtgacggtggagctgtggcgcgatggcgcgccgctgccgggtgatgcctataccgtggagctgaacaaggaaaacgaatggcaatacacctgggaaaatctgccgctttttacggatggcacggtggctgattacacgctgcgggaaatcgaaataggggacacctaccgtgaccccggtgtggccgaggatggcttcgcggattacctggtgacctatgccaaggccctgtaccggcaggccgaggataaggaataccgggaggagcactggtggcagaaggccgatggaacgcaatgctttgcgcgggaggctctgctggtggtcaataatgagggcatccggggcgagatcgcctttgaaaaggtggatgaaaagggctacccattaaagggcgcggaatttaccctgtatgctgatgcggaatgtaccaagcggctggcaacagccacctccgatgaaaacggcgatgtgcagtttgaggataagtggccggccggcacctattacctgcgggagaccaccgcccctgtgggctacactgcggcggagctcacctggacggtgaagatcgcggcggggaaggcgaccatttctacaccgggcggcaccaccgttaccgaggtgaagaatacctcccggctgcggctgaagctgaaagtgctgggcccactgggagaggaactccccggggcggtgctgcgggtgacgcgggataatggcagcccgatgctgtataaaaccaatgaagccggcgcggccctgctggagcagatgcctgccggggattatatcatccagctggcgggcacccccacgggctatgtgccggaggacagcgcccccaacctaaaggccgaatacggcacactgacctatttggatacagcgaataccgcatggcagctggaacagtgcgagggggaggaatacacctatctgctgaccctgaagctgaaggagctgcatattctgcccagcaccggcggcaccggaacggtgccctttacactggcgggcgcggccctgatggccgtagcggtactgctgccaggccgaaagaaagtgaaataagcgcgccccctgccaaggggaagccgctgtggataacaatgataccaaaggagtgaaagtaacatgaaaaagacaatgaaaaagtgcctgacgctgctgctggcgctggccatgctgctggccatggcagtccccgctgcggcggccaccccctacgacaaaaccatcacctttaccggggtggccaagggcgataccgtgaaggcgtaccagttgatgaagtacgatgcgaactacaacgagtacatattttacagggaatttgagacctttgcagccaatttctatgattctaaaacacaatcgctggaggagcaccttgccgaaagtacgaaagagcatttgaccgcactgatgatcaattatgcaatcatgaccgattctgctcatggtggggtttccttcccccaaaacccggtggaagcgactgccgatgcaaataatgaggttaagatgactctggagcccggctattatctgctgctggtttctaccaccgaacagaacaaccggacctatatgcctgttaccgtatttgtgcaggtgaagaacgggaatgtaagggtgtatgccgccggcagtgagatcaccgatgacctgaccgctgtatttaagtacgaggacggccctgctgtcaatgtacgagtaagtgatgacagcagagctactacccaatggaaagaaactgccggtggccgggtgggtgaaacgatggatttctatatggaagtatctatcccggcctacgagagcgaggatgtggccattagttcgctgattgcgaagtgccagctggccgggctgaactatgtagcggacagcatgaaagcaaccaccctgcccaaagcggatagcgatgccgtagagggtgccattaaagggactaccgtaggtgccgacggtaatttgaccgttgagctgaattacagcaagatccgcaatgctgccaccggcagagggctgatttatctccacttcaaggccaccgtagccccggatgcagttacaaaatctgaggcttccgcaactgccaagctggaatatgtattctccatggaggcgggcaataccaaaacgaccgccgactctaccgctgcggtttataattatgactttaccctctttaagaaatccaatgagctgattgatcccagtaacgcgggttccggccaccggcccctggccggtgcgggcttcatcctgtatgccgatgaagcgatgaccaaagccatcaatatggtaaaggtggaagccaatggagatgtcggggcctattaccgccccgcgctggcgggcgaggcaggcgccgtggcgcagatggatgccaatatgggcaatgataataataccctttccatccgcggcctggatgtcggttcctactatgtgaaggaaaccaagactccttccggctactatgcccccaagggcatctttaagctggatctgaccgcagagcgggatgccagcgaaagtctggtcaaggatttggccagtggcggttttactgaaacgaaagaagcggatcgcgcactgattcagaaaaagagcctgaatgctgagaaaaatcgctttgaagccgaccttctcaatagctccacccccgtactgcccaccaccggtggtgtcggcaccgtgatgttcacggtgatcggcctgctgtgcatgggtgcggcgctgtggttcttcctctttgcccgccgtcgccgtgaggatgagcaggagcagaataagaccaccctgtaatttgccatcctcctcattttcttgccgtcccgccgggtttttcctctttctctccccggcgggatgggcggcaaggaaaaggccgcaagcccgctgcaacggcttgcggttttttccctgctgcattactgccaaaggagtaccattcgtgacgacaaaacaagccaaacaaaaaagacaaaaccggctgggcaccgtgctggccatcctcatttttctgctggggctggggattctattttacccggtggccagcgacctgtggaaccagcaccggcagaaccagctgatctcccactacacccaaagcaccacgacccttgccccggaggatcactccgcgttgtgggaagcggcgcaggaatacaataaaaacctcagtcccaccttccgggatgcctttaccgggcggcagctgcctgcgggggacccctactggggcctgctggatcccgatggcagcggcattatgggctacatcgagatcccgcgcatcagcgtgcggctgcccatctaccacggcaccacggaggaggtcctccagcatggcatcgggcatctgagcggtacctccctgccggtgggcggagagggcacccacgcggtgttttccggccaccgggggctgccctcggcgctgcttttctccgatctggaccaaatgcagctgggcgaccatttttccctgcgcattttgggggagcagctcctctatgaggtggatcagatcctggtggtggagccggatgaggtaaaggacctgtacccggtggaaggggaggaccttgttaccctggtgacctgtacgccctacggcgtaaatacccaccggctgctggtgcgcgggcaccgcatcccgctggagaccgtggaggaaacggtggaagtgaccgtgacccagcaggtagtacacagcttgggctggaagggcaagctgctgatcggcgcgctgctgctgttcctgcttattttgctcatcctggcgctgctgcgccgcaagaaaaagaaaactgggcccgaagagggcaatgtgatagaaagggggagaactgatgaaaaagcgtctcagagccgttctggccctgatcctgatcatactgctgtgtctccccgcgatagcacagacagccgatcctgacgcgctgtgcgcgttgaccattgactgtcactatgagaataagccagtaagcggcatgggcttttcgctgtaccgggtggcggcgctttctccgcagggagagcacaccctgctgccggcctatgaggatagcggtattgtgctggggaacctgcgggatgccgccgactggcggcaggcggccgggctgctggaccaatgggtggagcagcaaagcatttccccagaaaagcagcttaccaccgcggctgatggcaaagctgcattagaggggctgcccaccgggttgtatctgctgtgcgcgactccctaccaaaagggcggctgcacctataccaccaccccggtgctgctggagctgccggcccaacaggcgggcggcgggtggcagtacgctgcaacggtagagcccaagctggagcgctccggtacccccgaaccgccggtcatcatcataccggataacccggcccccaccccaggggataagctgccgcagaccggcctgctgcaatggcctatcacgctgctggcagccataggggtgctgctggtggcggtgggctgccgcctgcgccgccggaggaaaccgacatgacacgagagcgtatcggccggttctgcatcattttgggcggcctgtgcattttggccgccgcattcctattggggtttaatctgcgggaggaacgccgtgccgcggcggccacccaaaggattttgcctgctgtggcacatagcatcggacagtctccagcgccgatgcctaccctgcccgccggagagctgacggtctctttggagggggaggagtatctgggcatcctttctctacctaccctggcgctggagctgccggtgggggccgaatgggagatggattttctgcgccaggcaccctgccgctatgccggtaccctggccggggatgatatcatcatagcggcgcacaattaccggcggcactttgccgcgctgcacaccctgcgtcccggggatgccgccctatttaccgatgcagccgggcagacctaccgctatacggtggaccgggtggagaccctgcaggagaccgccgtggaggaaatgcgggctggggagtgggatcttaccctgtttacctgcacctacgatggccgtgcccgagtaacggtgcggtgcatccgcacggaagaataacgcattttgcatttttctcttgacaaagctgcaaaatggtgtagaataacatcaagtgaataacgatagcgaccccgcagaaacattcagaatcgtaagagactgaatatggagggggctctggagaatctcattgagttgagtgccgaaggtgcaaggcggtttttccgccgaatctctcaggcaaaaggacagagcggtcatcaaagcatcttttgtttgatcgctcgctattcttcagaggctgccgcttaaaaaagacgggcagcctttttattatccttttttcactgcaatattttaatcaggagtgaaacaaatggaagcagcattgctcaacatcgtacaaaaaatcaacggctatctctcggattatatcctcatcatcctgctggtgggcgcgggcctttatttctccatccgtacccgctttgtgcaggtgcgctgctttggcgagggtatgcgccgggtattcggcaacatcaagctccatggcggaaagcagcagggcggcttttcctccttccaggcgctggccacggccattgccgcgcaggtaggtaccggtaatatcgtaggcgcctgcggcgctatcctcatcggcgggcccggcgccatcttctggatgtggatcatcgccttcttcggcatggctaccatctatgcggaagcggtgctggcgcaggagacccgtgtagtcaatgcggacggcagcgtccacggcggcccggtttattacatcaagcgtgcctttaagggtggcttcggcaagttcctggccggcttcttcgccgtagccatcatcattgcgctgggctttatcggcagcatggtgcagtccaattccatcggtgagtccctctccaatgccaccggcgttcccacctgggtcatcggtattgttgtggctgctctttccgcctttgtattcctgggcggcagccaccgggtggcctcctgggctgaaaagatcgttcccgtgatggcgtgcttgtacctcatcggcggtctggtggtgctgattgcccgaatccgctttgtccccgaaaccttcggtatgatcttccgctatgcgttcgagccgcaggccattatcggcggcagcttcggctttgcgctcaagcaggccatcagccagggcgtcaagcgcggtctgttcagcaatgaggccggtatgggctccactccccacgcccacgctatggctaaggtaagctgcccgcacgagcagggcgttgtggccatgatcggcgttttcattgatacctttgtcgtcctcaccatgaccgctctggtcgttatctccaccctgtatgccggcaacgggatccttgcctccggcgcagccgaaggtgtcagcaagaccaatatggcgcagctggcgttctccagcatcatgggtaataccgccggcagtctgttcgtggccatctgccttatgttcttcgctttctccaccatcctgggctggaacttcttcggccgtatcaatgtggaatacctctttggcaaaaaggccgtcccggcctattccatcatcgctgtggcgctcatcttcctcggctcctgcgtatccaatgacctagcttgggagctttccgatatgtttaaccagctgatggttattcccaactttctggctatcgtagcactgggcgggctggtagcagccgctgccaggaagggcagccgcgagaccctcaaaaagtgatcccacataaaaaagccccctccggtacacccggagggggcttttgctttatgatttacgcggcattggcagccggggcctcctccccgtaaaaatcgggccagtcatcgccaaagagatcgccgttatcaccagcattatagtcatcgccaaaattgtaattgtaggaatcatcaaagttatcatagtagccgtattcatcgccgtagtagctcagccagtcctccagctcattcagcagcggctgcatggcagcgatcatcacagaaaagaagatgatcccgatgaggaacagcgcggccttggccagcagcatgccgcgggcaaagcgggccagctgggggttgctgctcacgccgcacgcccacactatcataaatataagcccaatgaccggcaccatcgccagcagaataagccccatataggcccacatactcagtccgccgctgacagtctgttcgggactttggtttcgcacggtatagcgttcgccgtgggcgcggcagtcgctgcagtggggacatttctggccaggctgtagccgccggccgcagctggggcatacattttggttcatcggcttgccgcactctgggcaaagctccgcccggtcatcatatacggcactattgcagttcgggcaaaatctcatgggggattcctcctatcgttgcgctgccgcacagcagctctttcttctggttctattctaacatatttttttgccgaggaaaagtacaaaatccagcgaagcctcccccatccttcacgggggaggcttcgctgtgatattgaaaaggagtatggagaagttggcaagttaattggtggcgctgctgggtacatattcggtcagtaccacactgtgggtgtattcccggccattgcgggagaccttgatctccacccggtcgcctacgctgtgggcggccagtgccgctttcagctcatccgcggtggaaacctccaccccgccaaagctcagcagccggtcgccggcctgcaggccgcccttatccgctatggagccggactccacgctttgaatatacacgccggtgctgtccagcccgtagtagcgggcggtgcgctcatcggtgatatccactaggctgacacccagcacgatctgaccggtcacatagccgtggctgatgagatcctcgatgatggtcttgacgctgttgataggaatggcaaagccgatgttatccacggcattgccgctggaatcgctggtggatttggcattgacaatgccgatcagctctccgctggcattaaagagaccgccgccggaattaccggggttgaccgccgcgctggtttgcagcagggtcatgttgttgccgtctatcgttacctggcgctccagcgcgctgacgataccatcggtgacggtgccggaaagggtacccagcgggttgccgatggccagcacggcgtcgcccaccttcagggtgtcactgtcgcccagaatagccggggtcaggtctttggcgtccaccttcagcaccgcgatgtcgttatcctcatcggtacccaccagggtggcggcataggtgctgccgtcattggcagtcacggtgatctgctgtgcgccttttatcacatggtagttggtcacaatgtagccatccgccgtcagcaccacgccggagcctgcgccctgggtgacatactgccggaagaagtagttggtcgccacactttcggtggtgatggccactacgctgtcctccacctgctgcaccacaccggaataactgacgccgacggtggaaccgttggtggaagggacctctaccccttgatacagaacggtggaaccggtgcccagcaggccgctcttggcagcgatcacagcgccgcctgcgccgcccaccatcgagagcaccaggcagcctgccagcagcagcgctgtaccctttttgccccgtcctgtggattttttgtttgcgtccgagggatgataccccgaagcagccgtttgctgcgcctgcccggacgcggcatcctgatggatgctgtctttatcatagcgatactccccggtgggaagatcggtattgccggtggtaaagttgcggtcattaaagttgtcgttcggatatgtcatggaactgacctgcctttctgtggggtgcctggccccttgactgcttcctagtataccgttaaattgtgaacaatgcttgacctgtttttttaaggtcggtaaaaatgccgtgacgaaaaggtgaaatattgtaaataaattttgaagctcctgcccgcggcggtttttttgccggcatcctccgcaagcttctgccgtgtccggggcttcggcccgcccgcttcttttggcctcccgcttcccaattccccacaaaatccccgcaatcccttgcaaatgacgcaaaaacccgtataatataaaggtatatatcctactgaaagggagaaagaaatactatggcagatcaaaagaaaatggtagccgagatcacctcgatggaggacgattttgcgcagtggtataccgatgtcgttaaaaaggccgagctggtcgattacggcagcgtccgcggctgcatgatcatccgcccctatggctatgccatttgggaaaatatccagcatattcttgacggcatgttcaaggccaccggccaccagaatgtctatatgcctatgctcataccggagagccttctgcagaaagagaaggaccatgtggaaggcttcgccccggaggtggcctgggtcaccatgggcggcgaggaaaagctggaggagcgcctgtgcgtgcgccccaccagcgaaacactgttctgcgagcactattcccatatcatccacagctaccgtgacctgcccaagctgtataaccagtggtgcagcgtcatgcgctgggaaaagaccacccgccccttcctgcgcagcgccgagttcctgtggcaggagggccacaccatgcacgaaaccgccgaggaagccaaggctgagaccgtgcgcatgctgaatgtctacgcagagatgtgcgagaaatatcttgccatccccgttgttaagggcgtcaagaccgataaggaaaaatttgcgggcgccgaagaaacctacaccatcgaggccatgatgcacgacggtaagagcctgcaaagcggtacctcccactacttcggcgacggctttgcccgtgcctttgatatccagttcaccgaccgcaacaataccctgcagtatcctcaccagaccagctggggtatgtctacccgcatcatcggcgccattattatgacccacggtgataataacggcctggtgctgccccccgctgtcgctcccatccaggtcatggtcgtccccatcgcccagcataaggagggcgttgccgagaccgcttccgccctgtgtgagcgcctcaaaaagaacttccgtgcagacatagatctttccgagaacagccccggctggaagttcgcccagtatgagatgaagggcgtcccgctgcgtctggagatcggccccaaggatatcgaagccggccagtgtgtgctggtccgtcgcgataaccgcgaaaagacctttgtcaagctggagaatctcgaaagcgagatcacccgcctgctgcaggagatccacgacagcctctacaccaaagccctcgccaaccgcgaagccaacacctatgttgcccacgatatggccgagatgcacaaggtcgctgatggcaccaacggcttttataagaccatgtggtgcggcgacctcgcttgcgagctcaagatgaaggatgagattggcgttaccagccgctgcatgccgctggagcaggaagacctcggtgccacctgcgtctgctgcggccgccccgccaagcacatgatcatttggggtaaggcttactaatatctggacagaatttgcaatagccgccggatgggcgccccgcaggggacccgttcccttcgggaacgggcctgacgggcttcgcccgtcccggcggtttcaccgccgcccctgcggggcgccccactttctgcacccactctccccggcagcaaagccccagccctgcgggcccgcccgctttccatggtcggtttcggctttgccggcaaaatttttttgtccaaaatcaaaaggaggtcatccccatgggctgtactcacgattgcagtacctgcggccacgattgcggcagcgaacaggatttttccaaaaaactcaatgaaatgagcagcgtcaaaaaggtcatcggcgtcgtcagcggcaagggcggcgtcggcaaatccctcgtcaccagcctgctggccgtcagtatgcagcggctgggctaccgcaccgccatcctggatgccgatatcaccggccccagcatcccgcaggcattcggccttcgggaaaagatcgaaaccctcggtgaggtcatgctgcccgccgtctcccgcttcggtacccaggtcatgtccatcaacctgctgctggagcaggaaagcgatcccgttgtctggcgcggccccgtcattgccggggcggtgggccagttctggaccgatgtgtactggaaggatgtcgattttatgtttgtcgatatgccccccggcaccggcgatgtccctctcaccgtattccagtccctccccgtggatggcatcatcgtggtcaccacgccgcagcagctcgtcggcatgatcgtggaaaaagcggtaaaaatggccgagatgatgaaggttccggttctgggcctcatcgagaatatgagcacctacacctgccctgattgcggaaagcagcatgctattttcggcgaaagccaccttgatagcatcgcggcggagcaccacattccggtgctggcccgcctgcccatccagcccgcgctcgcctcactgatggataccggtaccatcgaattgtttgagggcgactttatgcagcccgccgccgaccgtctttgtgccctgctgccccgctgaaaggagattgaccctatgatcctcaccattgatatcggcaactccaatatctgctttggcgtctacgagggcaaaaatgccctctttactgcccgcgccaagacggatcccctgcgtaccgaaacggaatacgccgtccttctctcgcagatcttccgcctgcatcagttcgaaccggcccagcttaccggcgcggccatctcctcggtcgtaccggcgctcaccgccgtattccacgatgccgtccgcatcctcggcaatggccatatccccaccattgtggttggccccggggtcaaaaccggcctcaatatccgcattgatgaacccgcttccctgggtgcggacctggcctgtaccgctgtgggcgcggcggaaaaataccccctgccagccatcatcatcgatttgggcaccgctaccaaaatcaccgtcgtcaccgaggaccgcagctttatcggcggcgctatcctccctggcgtcaagatctcgctggaggcgctttcagggtcggcctcgctgctgccctccatcggtctcggtaccggtaagatcaagaccatcggtagcaatacggtggattgtatgctctccggtgtggtgctgggcaccgcctgtatggtggatggccttattgagcgctaccgagaggaactgggcgaagttcccactgtggtggcctgcggcggcctttccccggctatcgtgccgcattgccgcaccaacatcatcctcgatcaggatctgctgctggatggccttttggccatctaccgccgcaacgccccgcccaaacagcagtgaagcatgcattttgccccctcccgctttgggtgggggctttgcctttcttggtacggtttgtgcagggcaggggataggggcgcagccccggcagcgcttcgcgccgccgaagcggacttcgtccgcttgcccgcctccggcaggctggctgcgcccctttcgctttccctcctatcccaccatccgttcggccaaagcccgcccctcccttgcggcagccagtgccattatgttatattaagatgaagtagattggtaaatcagttttacggagggaagcaagtgaacataataattcgcaggatgaaaagcagcgatgccgacgcgctgtaccgcctgttgtccgatccggaggtaatgcgctatttggagccgctctatgatagggcgcagaccgaggcatttctgcaccgcgcgggattatccgagccgccgcttgtgtatgccgccgaaggaaacggacgctttatcggctatgtcatttatcatccatacgatgaggaaagcatcgaaattggctgggtgcttttcccagcgtactgggggcgcgggtacgcgtcagcgctgacggatcagctcatttgcagagcaaaacaggagcataagagcatcgttatcgagtgcattccagagcagaaggcaacggatcgaatcgcaataaaaaagggctttcgttattgcggggtctgtgatgggttagctgtctatcgccttgtgtgaccccctctccccaagccacccatttcgcccatttgccccttgcattttgccccctcatctgttatgatatgtcgcggaagccgccccctaccgcaccggcagcggagttgcttcctaaaattttgcgctgtatcccacatccgccgcaggccccgctgcgccgcttttgccacggggcgtatcccagaagggaacgccacccgccgcaatgataaagcgtcccgtgtgccgccgtacccggcaaaggaatagcagcaaggaggattatcatgtcaagttccaccaaccgcacccgtacccttaccacactcggcattcttaccgccatcatcctggtgatgaccttcacccccctcggctacatcaaaaccatgggtctggagatcaccctcctgcacattcccgtcatcctcggcgcggcccttaccggccccgccggcggcatggtgctgggtgcagtgtttggcttcaccagcttctttcagtgcttcggcctaagcaccttcggcaccaccctgttcagcatcaatcccgctggcacctttatcgtctgtgtgatcccccgcatcctgctgggactggttgccgcctacatctaccgcggcttcgatcacctcaccggcaagtggagcggcaccatcaccggtgcactggccaccatctgccatacggcaatgttcatgggcacgctggcgatcttcttctacaccagtgactatcttcagggctttgccgctatgatgggcaccaccaatgtctttgcgttcatcatcgcctttgtcggcctgcagggcctcctggagatcatcctcgccgccatcgtggtcggtgcgctggttcccatcatcaaaaagacccgccgcgtctgattttcacttaccccaataaaatagcacgcaaaaaagaggcatccgctgtgggtgcctcttttctcgtttctgcagggctttggttcggccgcaggccccgatgctccgcatcggccccgcccgctgcgcggcggggtgcccgggcttcgcccgggcggcctgcggccgccctcctgcctggctctattttcagtccagcggatgctccagcgccataaaggcccccttcacatcctccccggccgggtaatgatactcctcgtcatgctccgtctcggggtcgcccacccggtgcgtcgggataaagatcggaatggggcagtcgtccaccgccttgatgacccgcgcgcggttctcctcggtatcctccagcgccagcgccgccagcagcgtcggggtggtaaagtgttccccatagggaatgcggatcaccgtctcccacacctcccgctcaaagtcgctcccgccgggtgccagcggcagcgtaaagatgacccggtgcccggtccagtattcctgtatctgctggaagcccttcttcagcagcggggtctcctcctcatcgcagtccacctccagtccatcgccgaaaatcaaacggctcagtgcgtagtcgtcattctccaccagcgtgatccaccccggccccagctccttggtaaacttcttcatgtccattcctccctgaatatactattcgtatatattttataatattatacctaccttgcggcagcatacggcggcttgacgaaaatcgccgctggctgcgttgccctcccaaggcaacagcccgtctccgccgggcaacagccttgcttcggtctgccttgccatcatccgattttcccctgcgccgcctcacttgcagtatttccggaagatctccaaataccggtcgccaaaggaaaccagtgtcacatcgtccagcggaagcaccagcggatcagaaagccagttgcccagcgcgtccacccgcttcatggtcaggtagcggctgtctaccttcatcagccgccccaggaagtacagcgattcctccgggttgccctcacattccaccgcggcccagccgccgtattgggccataatgccatccagcagctcctgccagccgcggcaggcaaagcccggcgcctttacggcgtcgtacagcttctctccggccatcacctttttcaggaacggcacatcgtccatctgctccgcctcggtaatatccccggtgcgcagggcgcagtagccgtccagcacaaagttcgtctgccgctgcagcaccaccagctcgttttccaccgctaccggcaccccggcatattccggcgccaccagctcatcccggtacagcaccatcatgttcttttgctgcatcgctttctgcagcaggtccttttcctgcatatcatgtccctccctgggagcgtcccatcttggccagctcccattccttcagctctttcagttcgttatagatcgccgcatagctgcggtgccggctttcggggatcagcccctcccgcaccgcctccagcacggcgcagccctgctcagtgcggtggctgcacccggtgtagcggcaatggtccttgtatttctccatctcggggaagcactccgccagctcggcggcgggcatcggctccgctttcgcgaattccagcgccgaaaatccgggggtatcgcacagccagccgccgtgcccatcggggaaaagctccacatggcgggtggtgtgccgtccccgccccagctttttgctgatctccccggtggcaaggttgaggtcggggtaaagcccgttcatcaggctgcttttcccggcgccgctgttgccgcaaaaggccgtgatcccgcccttcagcagctcggccgccgcctccagtcccttcccggtccggttgttcaccacggcagtggggtagcccgccttgcggtagatctccgcccagggggtcgggtcggccaggtcaggcttggtaaacagcaccgccaccgggatattcctccttgccgcaatcgccgtcagctggtctatgaccagtgcgttgggggccgggtccgccaatgagatcaccatcgccagccggtccaggttggccaccggaggccgctgtaaggtgttttttcttggtgctatggcggtaatgctcccgcagcctggctcggtcggctcaaaccggcatcggtcgcccaccagcagggtggttgcgtccttgcggaagatgccccgtccccggcattcggtttttgttccgtcctcgctgatgacggtataaaacccgcccagcgagcgcacgatcaacccctccatttactcaccaaaggccgaagaatagtcggccgtccagtagtactgcccggtggcaaagtccaccgaagcgctcttatacacctcgccgtcgatcagcacatccgccatgcaggtgccgctgccctgcagcgggatggagatgagccgggtgttgcggggctctattacctcactgtatacggtctcgccgttcagtacggcggtcacattcacggtgccgggcagatcaggcggtgtggtctgcagcgtcacggtggcctcgccgttcacattggcgttatccactgttcccaccaccagggtgatcttgctcccaatgggcaccatgctgggggaagccggggtttggttgatcaccagcccgtcatactggtagtcggtcagctggtaggtcaccgtcacatcaaactgcgcgtcccgcagcacctgcacggcgctctcctcggggtagcccagtacctccggcacctgcaccttttccttattgctgcccacgcttacatacaccaccacggtgctgccggcggccacgctctgtccggcatcggggctggtacgcaccacgctgccttcggctatggtgtcgctggcaatatcggtagtggaatatttaagccccaggcttaccagcttggcgtaaacggcggtcgcctcctggttggtaaaggtcgggatggtcaccatcttgttgccggcgcttacccacacctgcaccgtgctgccttttttcacactggtgccggcgttggggctctgccggtagatctgcccctcctcatagtcggcattgtagtcctcgctctccagctttatcttgatgccggggtaggccccgttggaggaggcggcggtaaagtccaccccgaccaggttgggcagggggatatcctccactgacttaaagggctgatagatctggaacatcaccagcacaaagagcagggaagccaccactacgccgcaggtcaccgcaaacagcttggaaagtggggtggtcagccggtcgcgcagccttttcttttcgttattttcaccagtttttgcggcattatgggaggccatgacgccctgctttttgggcataatgccaataccctcgccgctctttttcgccggcttggccgcccgggcggtatacgccgggaaggttgtcttggggtccgtcagccacttccgcaggtcggctatcatctcaccgcagttctggtagcggcagtcggggtccttggccatggcgtgcagggtgatctgctccagacccaccggcacattgggattcaggctccgcagcgccttggggttctgctccacctgctgcagcgccacactgatgggcgactccccgtcaaagggcagcctgccgctcagcatctcaaaaaggataacacccaccgagtagatatcggtgcgctgatccaccgcgtcgcccagggcctgctccgggctgatatagtggaccgaaccgatggcgttgccgtcaatggtgcggctctggctcatggcaaagcgggcaatgccgaagtccatcacctttacctcgcccttttcggtcaccatgatattctgcggcttgacatcccggtggacgatgccgttttcatgggcacactgcagggcggtcagcaccagcccggcgatattggcggccgttttgccggggatgggcttcttccgctcgatatactccttcagggtgatgccgctgacatactccatcaccaggtagggattgggcacatccagtaccacatcataaattttgacgatattggggtgagaaagggcattgatggcccggctctcattgcggaagcgccgcaggtactcctcatcggcggcatattcatcccgcagcatttttaccgccacggtccgcagcgcctcggcatcaaaggcccggtagacattgcacatgccgcctacccccaccagctcttctatgaggtagcggtctgccagcttggttcccagtatattttccatgtgtttcgttctcctctcagcggttgtggatcagtacggcggtgatgttatccggtccgccggcggcattggctttcgctatcaatgtatggatatccccaccctgcagaatctcctgcagggtgccggccagctccccgggcggcagggtattatacaatccgtcactgcacagcagcagggcgtctccccgcagcaggtctatcacggtgtagtccggctggacctccggctccacccctatggccctggtaatggcgtgccggtccgggtgatgggcggcttcctcggggctcagcaggccctgccgcagcagtaccgccaccgcggtgtggtcctcggtcacctggatcagctccccctgccgcagcaggtagcagcggctgtcgcctacattggccaccaacgccaccccatcactgatgacggcagcgcaaagggtactgcccatgccggtcagggccccgccgctttggccgctgcgggtgtataccgcccggttggccccggcgatggccgtttccagcagcagccgcaggctgcgttcctccatgtgggaccgcaggctgctctcaatcatgcggcgcacctcctcggcagcaatgccggccgctattccgccgccgacttcgccccccatgccatcgcatacgacggcatagccgcttccctggtcaaatacctccccggcaaagcgatcctcattggtttcccgcaccattccgcggtctgtcgctccgtagatatgcagcatctttcttttcccctcctcgggaagttttccgtctgtccgggctttgtccccgcccggcctttacagggggccgcacccagcacccccgcagcctccgcgccgtctcgcggccctcaccgggcggccgctccccggcgctcattcctcgtcacttcgtaccgtctccagctttcccggcctccgcccttctcagctggccgcaggccgcggcaatatcgctgcccagctcccgccggaccgtagcgttcagccccagcgcccccagccgggccgcgaagcgctgcaccgctcctttatccggccgtttggtgccgcgttccgccaccgggttcaccgggatcagattcacatggcagttttgcccgcccagcagcttcgccagcacctcggcatgggccgggctgtcattcaccccggcaatcagggcatattcgtagctgatgcgccggccggtcttggcaaaataatttttgcagctttgcatcagccgggcaatgttgtactgcttattcaccggcataatgccgctgcgggtctcatcatcggccgcgtgcagcgaaatggaaagggtcagccccagccccagctccgccagctcgtcaatgcggtcgcacaggccgcaggtggaaagcgaaacatgccgcaggctcaggtttctgccctccggcgaggatagtatcgtcaaaaaatccagtatattgcggtagttatccagcggctcgcctatgcccatcagcaccagcgaggagatcggctctcccgcctgccgctccgcctcatagacttctcccagcatctcggccggggtcaggctgcgtaccagccctcccagcgtggaggcgcagaatttgcaccccatgcggcagcccacctgggtggaaatgcagaggctcagcccatgctcgtaccgcatcagaacggcttccacgcagttctggtcaggcagctccagcagcagcttcacggtttcatccagcttgctttccagccgccgccgggtggtaagcaccgtgagaaaagcacgctcctccagcttttgccgcagggcggtggaaagattggtcatttcggcaaaggagccgacccgtttttggtggatccaccggtaaatttgtccggcgcggaatttaggctcccccagtgtgccggtgacccattcggtgagctgcggcagcggcagggaagagatatcgattttttccataccctttcggctcctttcgtggaattttggcgggatcagtaaagtcctttcactaatacggcaaaatggccgcttttttgcatgtaaaaggttaatatttcacttttatttacggaagatttacaagatatgaaaatattgggtgaacatctcataaatagaggatttcactgggaaattacaactgggatttgttgtgcgaattgagggcaagtttgtggtcgcctagcggcggcgcggcgcattttattttggattcagcagggagcaaattaaaaatcgacctttaagcgtcgtcgcgtcggacgcaaccttcgcttaagtcgggctgactctgcgctttgctccgggcagccctccccgctgcggtgcatcctcctttccccacaaggtcttgcgaccttgcgggggccccgattatacggggcgtaccgacgcgttacgggtctttagggcggagccctgaatgacttttggttacttttcttcatagaaaagtaacacctcgccgggcaggcgtacaaattttgatatctaaaaggctccgccccgccgccaggcgatagcaagctatcaccataacaagccgcaagcatttacagctttttttccagcacggcatagaaaaacccatccccgccggtttgttccggcaggcaggtcaccggctccccgcacagggcaagctcccggtgctcccgcaaaaaggcattcaccacgccctcattctcggcggggttcagggtgcaggtgctgtataccagccgcccgccgggggctaggtaccgggcggaggttgtaagaatggccagctgcgtctgcggcagggccaccccctccgcggggtccttatagcggatctccggcttgcgccggatgaccccataaccggagcataccacatcacacaggatgcggtcaaatactcccaaggatttatcgtaaatttgggcgtcgttcgcctttgtttggatgcagcgaagccccaaacgggccacgccgtcctccaccagcttcagccggtggggatacaggtccatcgccagcaggctgccggtgtcctccatccactccgccagggtaaaggtctttcctcccggggccgagcagacatccagcacccggtggccgggctgtaccgccagcgcggcggcgcatttttggctggaaagatcctgcacatggaacagcccctcccggaaggctgccagccgggtcacatccccggcgctttccagccgcagcgcgttttccacaggggtcttttcggcggtgatattttcctccgccagcttttccatcagcgcttcggcggtggtcttttgggaattaacccgaataaaaagcggcgccgggctttggcagccctccagaatggcccgggtcgtttcctcgccgtagccttgccgccacagcgtgatcagcgccttgggcaccgcgtattgaacggaaagggcagcaagcggctcacgcggcagggcaatttttttgccgtcccgcaggaaggcccgcagcaccccatttacatacccgctggcggaggaaacacgcatcgcgcgggtttccttcaccgcctcattcacggcggcacgctccgggatggagggcatatacagcagctggtacaccgccatccgcaggatatcccgcacggcaggggagagcttttccaccggctgccgggagtaccgccccagcacccagtccagtgtgatacgccgctccaccacgccatagaacagcgcggtgcagaaggcccgctcctgcccggtaagctcgtttttccgcatcaggccctccagcaccaggttggagtagcccccctgcccaaagacctcattgaggccccgcagggcggtcagtcttgcgtctgccatggcgtcagttccggcggttgccccggctgatgataataagccgcagcaattgggccagggtggaagccagcgccgccacataggtcagcgccgcagcggaaagcacctttttggcgccccgggcctcgtcctcggtcagcagggcgcgctcctctatggtggccagcgcccggtggctcgcgttaaattccaccggcagggtgataagctggaacagcgccaccagcccaaacagcagaatgccgatgttcatcagcagggtgtagttaaacagcagcccgatgaaaaagataggaatggaaagggaagacccgatattggtaatggggataatggcgctgcgcagcttcagcgggccgtattcctcggcgtgctgcacggcatggccgcactcgtgcgccgccacccctatggccgcgatggaggtgctgctatacaccccttgcgaaaggtgcacgatattggtgcgggggtcgtagttatcggtcagctccccgcctatctggtccacctgcacatagctcagcccgtggtcgttcaggatctgccgggcgacctccgccgccgtgcggccccgcacgctgcgcaccttggaatatttggaataggtggcctttacccggaactgcgcccatagcgccagcaggaatgccggcagcaccagcaggtaccaggtgtaatcgtagccatagtagtagcccatcggcatggtggaagtcctccttatgttttcgtccgcgcccaaaggcacagaatatctcagcttctattctatcgggatattttgtcccggagattccgaaattatgaagaaaaagtaaattgtggttaaggcttcattagcgcctgccggcggaactaatttgtagtcgcctatcggcgtcgcggagtcaccggagggtgacggcctgtacggctcgccgccgaggcgttccttttgttcgtacaaaaggaaccaaaatacgcttggggctgtgccccaagaccccctacccgctaagctgcggctggatacgaacgatgccaaggcatcgtccgtacagcgccgcagatacgctctcaaggtgcccgcggcgcatttttatgtggggttcagcagaaaccaaattaaaataaacaccttataagcgtcgtcgcgtcggacgcaaccttcgcttaagtcgggctgaccctgcgctttgctccgggcagccctccccgctgcggtgcatcctcctttccccacaaggtcttacgaccttgcgggggccccgattatacggggcgtaccgacgcgtcgggggtctcggggtcctccccgagtgacttttggttccttttcttcacagaaaaggaacccctcgccgggcaggcgtgcaaatgaatacctcttataatacttcgcgacgccgaaggcgaccacaaactatccccgccgggtaggcgtactcactaagccttgcaaaaggcccgccccgccgttaggcggccacaaactcgccccaaaaatcttttaccacttttcatcacagaaaagtacccccgccgggtaggcaagctcacgccaagcactcgcctttttgcagcctcgccccccgcagccagtcggccgcggccatgcggggcttgccctccggctgcacggtgataagccgcaaagcgccctcaccgcaggccaccgtcaccgggtccagagcaatcagctcgcccggcttgccatggccttcggccaggcggctctcgtggaccttcagggccttgccgcccgctgcgcagtggcagcccggccaggggttcatcccgcggatctgatcgtgcagttccttggcgctgcgggtaaagtccagctttcccatcgccttttccagcatcggggccatggtggcctcggcgttgttctgcggggcacgctgtaccgtcccatcagcgatggagcgcagcgtgcggctcaaaagctccgcgcccagcggcgccagccggtcaaaaagctcgcccgccgtctcattttcccctatgggggtggtaatggtatcaatgatatcgccggtatccatgccggcatccataaacatgctggtcaccccggtgatcttctccccgttgatgacgctccactggatgggtgcggcgccccggtatttgggcagcagggagccgtgaatattgatacagcccttgggcggcacatccagtatcgcctgcggcagaatacgcccgtaggccaccaccaccaggcaatccggagccagctccttcagctgggcggccacggtgccgtcccgcattttggtgggctgatataccgggatgccccgctcctgcgccagctgctttaccggcggtggggtaaggacggcgtggcggcccaccggcttatccggctgggtaaagaccgcgggcacctcgtgcccgtccgccaggatcctttgcaggcagggcaccgcaaaatccggcgttcccataaatacgatgcgcatggttctcactcctcgtccagttcccgcagctcctcatcggtaagcatgtggtgggtaatgtccttaaaaatatggccgtccaggtggtcattttcgtggcagatggcccgggccataaagccctcggcctccagcgtaaagggcttgccgtgccggtcgtaggcctcaatggtcaccttctccgggcgcaccaccaggccgtactcgccgggggaagaaagacacccctccaggccgtcctgctcgccgctttgggcggtaatggtgggattgatgaactccgtcagcccctcgccgatatccaccacaaagacccggcgcagcacgcctacctgtaccccggcaatgcccacgccgtcggcctcgtacatggtatcggccatgtcgtccagcagcgtccacagccgctcatcaaatctttccaccgggcggcttaccttgcgcagccgcgcctctttttcggtcacaatatttctcagtgccattgtagcacctccttggattagttggggttttatcaccgctgcggggatggtcgggcatcgcctgcgggcggaggatttgtgaagtgaatgggtatcgcccggcggcggggataagtcaccggagggtgacaatctgtacgcctgccggcggggcgttacttttctgtgaagaaaagtaaccaaaagtcattcagggctgcgccctgaaaacccggtcgccctgctgcgctggatacgaatttatttttaggctaccgcccaaaaacaaatccgtactgcacgcagatgggcttaaaaagagcctgcggcgcatttttatcg

SEQ ID NO: 2839 - DNA, 32628 bp, Unknown
  16S sequences of unknown bacteria
gtttgcgagacctgccatttttcccgtttcaatgacgagaggacgaccggcaaagtcataggaaaaggttttataattctcaaacatttgtcttgagcctttcttaaaatatatttttgactgtatcataataccgccgcacgctcagcacttaaagaacagccggaagtaatatcttctttcggcgattatttaactgccgacacagtgcgacagcgaaaaaccgtaaataaaaccgtactgcggcacaagaatatctcatccgcgccgcagacagcttattcacatttgttatgcggcaaagttattactgctcttccgcacagtcatctctgacttaaagagtgggggataattatcttctgagaccgagcttttcaacgattgcacggtatctttcgatgtcgttgtccttgaggtagccgaggaggttacgtctgtgaccaaccatcttgttaagaccgcggcggctgtgatggtccttcttgtttgtcttgaggtgctcggtaagagtctctattctgctggtgaggatagcgatctgtacttcgggagaacctgtgtcgccttcgtggatcttgtacgcgtcgataatttcctgcttcttttcttttgtcatcatggctgtttttcctttcaccttgaaaaaatattttacgattcccatgtctcagcatccggcgggtgaatgtgtcgcgcgagcaacctttttccgaaaaccgtggcatgggcaatccaagatatattatatcacagcaaaaccgaaatgtaaatattttaatgaaagtttttgcacagtttttttgccgaaaacgaggatttttttgacgcgaatcctacttatattataaaaataattcttgacgggaggagaaaaacatggtataatgtatttacctcgtgcagagggtcttttttcgtgcgcgaacgacgcggtcatgaccgtttgccccgattttaccccggcgagggaggtacattatctgaccgagatattcccggtcaaaattttcaaggaggtgccgatagaatgagagttaagatcactcttgcttgcagcgaatgcaaacagcgtaattacgacacaaagaagaacaagaagaacgaccccgacagacttgagctcaataaatactgccgtttctgccgcaagcacaccctgcacagagaaaccaagtaaccacttaaggagtatttgatatggctgaaaacgaaaagaacaccgaggtaaagaaaaacgacgcgcagaagcccgagaaagcaaaatcggacaagccgtctacctggaaccgcatcaaagcttggtttaaatcagtaaagtccgaatgcaagaagatcaactgggcaagctggaagagcgtccgctccaacagtatcgtcgttatcgtatgcgtggttatcttctccgcagctctcgcaattcttgattactgcttctccggagctatcgtcggtctcagccgtctgttctgagaagtcgagcttcggatgtcattccccgcaaacctgagttaaggaggatagtgattctatgagcgatattaatgagatgaacgaaggtctgcgttggtatgttgcgcatacttattcgggctacgaaaacaaagttaaaaccaatctggaaaagataatcgagaacagaggtctcggcgatcttattacggatatcagaattccgacggaagtcgttgtagaatccgacggaggaaaagaacgtgaagtcgaatccaaagtattccccgcttacgttcttatcaaaatggtcatgaccgatgaaacctggcacgttgtcagaaacatccgcggcgtaaccggatttgtaggaccgggctcaaagcctgttccgcttaccgaggaagaagccgccgccatcattaaagaggacgcagagcctacgacacatctcgcatttgctgtgggcgaccgtgtaaacataatcgacggtgtattccgcggttataccggcacgctgtccgaatacaatgatgcgacgggtgaggttactgttatagtatccaccgtcggaagagacattcccgtaaagctcgacaaaaaatacatcgagaaagtcaaggaatgatttgtggtttgtcgctgccctaaaaagcgtctaataaagtgggagggagaaaatactattcagtctcccgtcataaaccacatatggaggaatatttgcaatggcaaagaaaatagttggctatgtaaagcttcagctcaacgccggtaaagctacaatgcagccgcctgtaggtcctgcactcggcccttacggtgttaacggtatgaacttcgttaaagagttcaacgaacgcacaaagaacgatatcggtctcatcatccccgtagttatcacaatctacgctgaccgttctttcacattcatcacaaagactccgccggctcccgttcttatcaagaaggcgtgcggcattgaaacagcttctcccgttccgaacaagacaaaggtcgctaagataacaaaggatcaggttcgccagatcgctgaaacaaagatgaaggacctcaacgcaggttccatcgaagcggctatgagcatgatcgcaggtacagctcgttccatgggcgttaccgttgaagactgaggagggctataataatgtttaaaggtaaaaagtacgtagacagccagaagctgctcgaaaaatccaagctctacgacggcgcagaggctatgaacctcgtttgccagacatccaaggctaagttcgacgaaacaatcgaagttcacctccgtctgggtgttgactctcgtcacgccgaccagcaggttcgcggcgctatcgttcttcctcacggtacaggtaagaaggttcgcgttcttgttttcgctaagggcgacaaggctacagctgctaaagaagcaggcgctgaatatgtaggcgacgtggatctcgttgaaaagattcagaaggaaaactggttcgacttcgacgttgttatcgctactcccgacatgatgggtactatcggtcgtctcggtcgtgttctcggtcctaagggtctcatgccgaacccgaaggcaggtacagttacaatggatgttgctaaggctgttaacgaagctaaggccggtaagatcgagtaccgtctcgacaagaccaatatcatccactgccccatcggtaaggcttccttcggtgctgaaaagctcgctgaaaacttcaacactctcgttggcgctgttatcaaggctcgtcctgctgcagctaagggtcagtacatcaagagctgtgttgttgcttccacaatgggccccggcatcaaggtcaacaccgctaagctcggctaattattaatattgaagcggttttcggaatcctctccgcggaccgcttttttatggaaatttttaaaatatatctttcggagattacttatcatgggaacactttcttccatccttgaatcttgtatgctcttatgcttcggagcctcatggccgctttcggttatcaaaaactacaaggcaaagtcggcaaaagctatgagccttcctttcattcttctcatagttatcggctatatctgcggtatcatagctaagtttgcaagtctgagcgcaggcaagactactcctatctatgtttttgtagtttacttcttcaacctcatcgtcgtatccatcaacatcgttctctacttcatcaaccgcggctacgacaagaaaaaagaagccgaagaagcgaagaacaacaaataatcgaataacacaaaactgcctccgctgaaatccggtagaggcagtttttttattaatcaaaggcaagaataaagtatgtttctcagtctcggggatatgatgtgctcctgattgttcagcatatgctgtgtatagacgagagcgagcttgtttttcgggtcgattattacccaaactccggcagctccgccccatccgaattcgcctatgggagagagcgatcccgtcactgctttgtttatcatggttctgacgccgtaaccgtagccatagcccgataattgtccccagttaaagtccttcatctgagcttcgccgagagtgttcgtcgccataagctcaaccgtcgcgggagaaacatagcgatagccgcttgtacttgttccgccgtttgccatagtcgacgcgaacttcatgtagtcctcgcaggttgatacaactcccgcaccgcccgaatcgtagtcgcagccgagaaaatgtccgcaggtgttgttcgtcgggaggaatttgccgaggtcgtccctgtagttgtactggacagcgaagcggcttctcttgctctcctcgggcatattgtaggtcgtgtcgttcattccgagaggctcaaacagcacttcccttgcgtaatcccgcagctttttgcctgagactacttcaatgaacgcgccgagaacgtcatggcacaggctgtagttccaatgctcgcccggctcaaagcacagcggattctttgcgatagcggcggcgacttcacgtgtggggcatcgtccgttcgtctttttctttacctcgtcaatgtaaggcgttgagatattgtagtcaaatcccgcggtcatgttgaagaggtttttcacgagaatgggcttttcggctttgacgatttcttccttgccgtctatcgtcttgcgcaccgtcatctcgccaaactccggcatatatgcggaaagcggatcgttcattatgaacttgccttcttcgtggagcttcagcgcaagagagcaggtgatgacttttgacgccgaccagaaatagtacagctcgtctccggcgatttttcttcccttttcgcagtcagcatagccggacatgtaacggtagattttttttccgtccttcactaccatgcagtcgttgccgggaatacgccagcttgtcaggtaatcctgataatttttcagcggggtaaaattcatagcgtttctcctttagtcgatgtaatatatttccatatcataaatatatccttcgcgggaaaaagcggaatagtatgggttggaagcggacagccatatgtctatttcccattcgtccacctgtccgccgatatcagacgcaactctcacgccgaaatcatatctgtcgttcttgacataaaggcgtgttccgaggggaatattatccttgtccaccgcgataacgctttcgtccgccatcgttccgagatacgtcagtccttcgatgttgtagtatgtcgcggggactacttttctgtaggaatacgagtatgtaactccgtcagagccgacaaacgagccgccaactccctcttcgtacacctcattcacgggatatttcaccgtttcctcgtagtcgagagtgcgcgagttttcctgtccgtttatgtattcgaccgtgtagtatttgtttgcctgtccgttttcgccgtactgcgagtagtttttctctccgcgcgggattaaatccgtttcggttacggtggattcatacggaatttcctcggacacggtttcggatttgtattcgtacttgtttatcgtaatcgtagtgtcggcggcaatgacggaatcgagcgatatggacggaacttctccctcttcaagcgtaatctcacactggctgagaagctcggcaagcgtcatttttgcagtcgacacttcaacgtcgtctttatcgtaaaaatcaagaactacgttgaatttctgctcctccggcttaggttgaggctgagtttcgggttctgtctccggctctgtttcggtatcgggggagtttgtttcggcagatgtagtttcgccagaggtttcagcatcggtttcagcggcagtttcggcaggcttttctgtttccggcgcagtttccggtgcagtctcggagttgttttcgaggtcaacgtagtcctctcctacatctcctatgttaatgtcggcaggtctgtttttctccgccgcaatgttcactccgactatgactgacgtgagcgcggctatgattatcacggcaacggcagctgtcagaacgagcattttcttctgcttatttttggtttttccgccatttgcagaagacttcaccatgctctcgttcactattctgctgagggagtttaggcgcatggtctcgttgttttctcttatccttatcggagctgctgtcgttactacgctgtgtctcgcgccggttattctctcggcaacgtaagctatgtcgtcctcgtcagtcgtgcagtttttttcgggattgtcttccgcttcggatttttcttcagccgcattctcttccgtgggtatctcttcagccttttcttccgacgcttccggattttcttcctgctttgtctcttccgttttttcttccggtatcatatttttatcgttcagttccaatttaagcatcctttccgcaatttttactgagcgtgatttatcttcactgcatgaaggtataaaaatctaagatagattataacacataggacgctcaaatacaagtaaaatatgttgcattccgtcatcctttttgagaaattattgacagctacaaaattatatgctatgatgtatataggaaagagtttgctatgctcttttttaatgccgactttcaaaaaaacgattgccatacaacggagagcaaatcatggatatgtttaagtactacggtctgttcagagaagaacacaacaccgaccgcctcacctccgcagagacagaaataattgaatttctttttgataaatacctcccgaaagagggtaaagttatagatacgtcagccggaacaggtacttttgccttcaagcttgcaaaaaagggatattccgtaacggcaggcgaccttcttgaagagcattacaatctactacgttcttccgcggaagcatcactgctcgacggcatttactgctcaagcccgcgaagcctgtcacagtttcaaaacgagagctttgacatactcatctcgatgggtccgctgtaccacgcagtcacaagagctgaacgcgagacgataatcaaagaagcaatgcgcgtgctgaaaccgggcgggtacatcgcatacacatacatgactccgatggctatgactctcggtcagtatttcaacgctatgagaaccgacaacgtgcttgacaagatgagggcgtaccgcaagctcacagaagttgagaaaacgcacaaatgcgactcattctacggcatgatgcttgatgaaatgactgatctcgcgcgcgaatacggaatagagatactcaccgtagcttcaacatacgccctgctctacaacatgatagacgagattgacgcaatgagcgaggaagaataccgcaatttcgtcaaggtgcagatagaatcctgtgaagatccgcttgtggcaaaatactgtatgcgcggaatcataataggaaaaaagaaaaatctcgatatgttcgactgaaaaaaactccttcagctgatggaaaacatcaaatctgaaggagttttcgtattatgcaggattactgagcaaggtcgatctgttcctgaatcttttcgttgtactttttgagggtcttgtctgcaaccttttcaaacttcttgtacatggaggaaacgtctgtggagtagtttctgagaaggttcattatagcttcgttatatgtaccgatttcaaagtaccaaccgaagtcatagcagcgtgtcgcgaagagaaggtcaagcattcttgaggattcaacgtcgcgggataccttgttctggagggtctgttcgtagtaagcgggagtcagagtgtaaagggattcatatgcaagagcctgtgtgatgtagcccgtgcgtgcaagctcttctgcgctgaatgagctcttcggaacggagtaaagcggaagtccccatgatgcggcactgttgtagtatctttcctgagattcgtcgaacttaggaagcgggagaataccgaagtcgtcttccatctcacggaagttaacggcattaccgaggttctgcatgaagaacagtgctctgccttctctgaacgctatctgaccgtagtcctggtcatagccgttacgctgatattcgcaggtgagatccttgtcgtatgcataagcggagaatttgttgaacgcgtctacaaatctttcgctgttgagtgtgagtgcaaggttgccgtcgtcgccgattgtgcagcatctgattccggcagcgttgacgatacccatcatgatatcgtcccagatgtaaataccgtaaatgtcgtcggggtcgtttacgtggttgccgtcgttgtcgtagtcgaggttgccgtcgattttttcagcgagggttctaaagttgtcgattgtccatgtgccgttgtctaccatttcgtacatattgtcaagctgatagttgttggcaagggtcttgttgaagtaaatgcagaaggtctgcttattgtcgccgatggaaatatcgcctgttacctggaaaacagcatccttgaacgagaattcttcaacagaatactggtcccaccaaggctttgagaggtcgaggttttgaatagcgttgaggttctggaaatatcctgagataagagcgttgcaggatgaataagcggacatacaaacgaggtcgtagtcgttagttcccgccgtaaccgagttgccgagaggcttctgaccgccgcgcatatccgccgcaactataacaggctcaatagtaacgttggcgttgtcctgaactgttgtggttctctggtacatagcgtcgttgataggctcaccggtgatatcttctgcttcaaagtcgttcgttacctggtcatgaacgaagatatggaaggtatatccttcatagtcagccgtgccaagtccggactccagacgagcgttagggtcttcggtttcttccgtggattccgctgttgcgccgcctgtggtttctgctgtgtctccctttgtttcatcggagttgccgccgttgtttgagcaagccactgcggatgaggacagcattaaaagcgcgaggataagtgcgaggttacgtttcatgttttttctccttaaaaattttttcgtattttttgaacaagggatattttatcttttgagtaagtccttgccggatatttaagaatagtattcgagtccggcggcgtcgggaatacaggttcgtctccgttccattctatcggagctatccatcccattcttccgccccatccgctgccttgaactttgtttgcgtggtaaatcatccacgtagagccgtcgggagcagacgtaaacgaacagtgtccgggaccgaatactttgtcagtcttctcaaacacaggtccgtcggattttttccagtttaccgcatcgagaatgtcccctccggtgaaggtgagcattccgagacagtagtggtcgctccagctgcctgagcctgagtaaactatgtacaatgcatctccgtgtttcagtgcagccggtccttcattaatgaacggaactcctccgcgcttttcccagttgttgtcgggagtggaaacgagaactctctcgctgtcaatctcggacggagacgacatatgcgcgatgtagaggttctgcctgatgttgtcctccccttcccagccagaccagacgaagtaatattcaccaccatactcgaaaacagtgccgtctatcgcccatttgtcagtcgaatcggtgatttttccgagcattttgtagtctgctgtggggtcgttgtcatccgtgcattcgagaacgtacatacggtgattgtagttgtctccgtcgtccgcggctacatagatgtaccattttccgtttatcttgtgaagctccggcgcccagtattccgatgaatattcggtatttgctggagctgtgtatacctttctgccgccgttcgttgtaagctcggtgagagagttcagttcattcacgcaaactccgtcgccgccggaatagcagtagtaatatctgtctccgtcgcgcacaacccacggatcgtttgcgttgtctgcaacaggattcttgaattccgtgtaggtgtactgcggctcggctttgtagtgctcacagaagtcttcactaagcaccagtccgtccgcgcttatcttatcgacaagaacctccgatgctatcttcgtaagagccggagtatatcccacgcacacgagccgcgaatcgataaccgatatgacaaactcattctccgacagcattgcgtatgcctttgaagtcgcgtcgcggttcgtcattcctatgagaatctcgtttttgtcggcgttcgggtcgtcggatggtcttgtgtagtctgtttcaaatgtcggcatctttccgcaagccgaattcacgcttttcacaaactcctgcgcggcttttagctcatcctcagcaggactgtctggtcggataaccttgtacgcgctgtccgatgagacaaagtttatctctgcagtcgtgctttcggcttcgttctgtgcgggttccgtcgttttctctacatcattcgaacatgacgtcagcgtaagcagtgccgcgaaaatcaaagcaagtgttttcttcatcatttcgggtatttctgtgcggtgtgagtgggtccgaaaatctcaagtctgtccacgccggattcagtcggagcaaatcttgcgcggtctatgcaaatctttctcggatgaacctcggttgtgcttgcgtgaacgtggtatacgatgataagctcgcttccgtcgggggaagtagtgaagctgtggtgtcccggtccgtagagctttgatgtatagctcaagatgggattgcagtcgtatctttcgtaatcgccgaggggagaatcggaaaccgcatatccgacagcgtaatatttcgacgtgtagccgtttcctgagtaggtgaggtagtattttccgttatgctttaagacaaacggaccttcggtaactgcgccgtccgtcttttcccaagcggattccggctttatgataagcttttccgtctcttttttcgcggtgacgatatcgtcttcaagctcgcaagcgtagattccgtagtcatgaccatcgcgccagcttacatagaagagataagccttgccgtcgtcgtcaacgaaaatgtgaccgtcgatggtcttctcaaacagccatgttttctccggtacgaacggtccgaggggagagtcagccactgcaaatccgatacgctcgtcgaccgacataatcatgtagaatttgccgttcttctcgataacttcgggagcccagtagtagccgtttttgtcgattccccatgccatatcacagcaaagtcccttgttttcccagttgacaaggtcgtcggaaacatagacataatatcctatcggcgcggaggtggagtagcagtaatattttccgtcatatttgagaactccggggtcagccgcctggaattcgccgaacacgggatttttgtacgtatttccgtccttctgcggtgcggtatagctcatgacatcgagtccgtcaaacgaagctccgtgtccgttgtcgatatatccgacagagcttccgctgactcccgtgagcacaaactcaaattcaggccacggctctacgccttccatatcgtcgaggaagtacatgcggtatgtgttgccgtctctttcaacgcgaagtttgccgcttctttccgctctctgaggttttacaaccttgtcggcgagctgattcataaccatgccggactgagcagagccggttatttcgtacagatataatcttctgtcgcggagcattaacgcatatccttcaaatccgtagtatctctcggactcttttgcaccgaatatgattccgccggaggagagtgcgttgtcgagctttacttccgcttcaaccgcgtagttttcgcttgtcaagctgttctcggaaaaagccgcgccgaacttctgctcgaacatatcgtccgttaccgctttggcttctgcttttgttccgtcgaaggtgtagttttcgcttgcgtatgtgaatttgttctgagatgccatagagttttctccgtcctgtgcagtttcggtatctgtgacgcagtctccgtccttgccagaccttccgtcacatgagcacatgaggacaagcgagagcgcgaggatcaccgaaaacgtcaaaattgacttcatttttctcatttatttaataattgatttaaataacccaatacgggaacacccatttacaatcagactgtccccgtattacgattatctcaatgtttatttgttttgtttatcttctttttttgataacgatagcagagccgagagacataaccatagcgacagccgcaactgtaactgcgtcaaatgtctgaggagctttttccgctgttgtatctgtggtgacgggagctactactgtttcttcagctgttgtctcgggagctgtggtttcttctgttgcagcagtttcttcagtcttagcgccttcagcgaacgcgcctgtctttgtgtaagcctgctgtacttcgagaggattgagggcagtgttgtagatttcaacgtctgctatctgaccttcaaagtcaccctgctgccaccaagagcaaagccatgagccaagtctgagggaaggaacgtacttcatttgatccataagagccgcaacacctgcaccgttaacgccgggcttaaccataacttcgccgtcaaggtaaattgccatagcgccgtctccgtaaactacggtaacgttctgccacttgcctgctgtgagtttggaagcagagccgcctacgtttgacgggtcgttccagcagatttcgtattcagcgtcttcgttgccggtggtattgatacctgattcaagagatgctactgttgcgatatatccctggtttgcgatatcgaaggaataaaggggagcgttgcccttgagtgtagcggaatcgtcagcctttacccaaagagaaactgtcatgccctttgaccagtctgctgtggagaagaaattgtcggtgatgagagcgtagcttgtgccgtttgtgttctcgcctgtaccctttatctgtactgcgtcgccgtgttctgtgccggttacgagttcagcgtttgtaagttcagcctttgtgaggtctgcggtataaacgggagcggaatatgtagctgtgtaaagctcttcgagtgtgggagctttttcaaattcggtctgagttacggatgtggaagaatagagttcggatatttcgtcagcggagagagcggcgttgtaaattgtaaagtcgtcgatcatgccttcaaaatcgccgtagttccaccatgagcagagccatgagccgagtcttacggagtaaacttcttcaagttcaacgaagaggctgagcatattggagaggtcgttcgagttgccgtttgcgaagggcggatttgcgtaaagctcgccgtcaacatagagttccatgtgatcttcgcagaatacgagggaaacgtactgccatacgccttcttcgagctggctgataccgccggatgtgttagcggggtcgcaccagattctcggagaaatgcctgtttcgggctggtttccgtcggtgttgattgcagcttcaagagacgctacaagaccgatgtaaccctgatttgcgatgtcaagggagaagaggggagcggttccgtgaagtgtggtgcttccgacgtcggatttaacccacatattgattgtcataccgtcgtcccagttagtagtcttaaagagatccgttgtaagaaccgcgtatgactgaccggttgtgctcggtcccatgccgcttacctgaagaacctgtccgcgggtggggtcgtttacaagctcggagtcaacgagttccataccgttgtcgccgtcagcaaagtcgatgctgagaacgggatctgccgcaaatgccgtaacagcaagtacagcggcaaggacaacggacaatactatccaaagttttttcataaaatcctccgactaatttaaattttgtctcacatatgaggttactttaaatatacaacaccctgccgcttttgtcaatagctcatcagaaatttttacatatatttacgcaaaatctggctgaaaatcacgcaaaacaacaaaatatcaacatttaactatttattagtctaacctgttcgattcaaatatcaaaatacgactacagtaataccgaacaggcatattagacaacatttacatacattttttgtgcattctgtacatttcaatgtatatgcaaaaaaacagacacacgttttgccgtatgcctgtcgtttatttggattacctgaattacttgttgccgaagtatctctcgagaagtcccttgaatgctctgccgtgtcttgcttcgtcctttgccatctcgtgaactgtgtcgtggatggcgtcgaggttagcggcttttgccatcttagcaagctcgaacttacctgcggttgctccgttttcagctgcaactctgagctcgaggtttgtcttagtggagggtgttactacttcaccgagcatttcagcgaacttagctgcgtgttcagcttcttcgtgagcagccttttcccagtacagaccgatttcggggtagccttcacggtgagcaactcttgccatagcgaggtacatgccgacttcggtacattcgccctggaagttagcgcgcagtccttcgatgatttcttccggaacgccctttgttatgccgacttcgtgctctgtagcccatgtcatttcttcgttatcgaaaacctcaacaaacttttctcctggagccttgcaaagaggacatttgtcaggacgaacattactctcaacgatttctccgcaaactgtgcatctccattttctcattttcattttctcctttaaattaatgtatttttgtagtttattctttgttttcttttgatttctcggcgcattcggggcataatccctgcgcttctataagaacatcctcaacgatatatccggacgccgacgttaccttatcgagaagattcagtccttcctcaaagtcgatatccgctacctttccgcagtttcggcaaactatgtgatagtgaggatagtttgttatgtcgtatttgcagtcgccgctcgtcgtgtttatcttgagcagtattccgtcatccgccatatccgagagcactctgaacaccgtggcgcggctcgcatcggtcgaggttttagcgatttccttatgaatctcacccgccgacacatgacttccgagcttcacgagagtttcaagtatcatctgcttctggtgcgtgtttcttcttggtatcttggttttgtcgttcatattgttcgtattcttgttgagactttgtcttacttacgagtatattataacacagatttttcttttgtcaatagcaaaaaataaaaaaacagcgaattgtagcattgcacaactttccgctgtaattttatattatttagacaaagtctcaacaaatcagttccacttgtactcgaagtctatctttcttgcgaccgaattgtcgactacgcatatgaacgtcttgccgcagttcagaataagctcgtctccgttgcggtactcaaggtggagtgtctcggttttagagccgcgcgaccagtttactaccttacgcttgccgtttgtgatgtaatatccctgtccgcttccgactgtgccgactgtgagtcttcctgccgtatctcccgggatgagagaaatatcggtgaagagtataagcacgtttttcacggatagctgctcgcccgtcgtcgcgtcaacatgagccatgccgttatactgatatctgaggtattctccggttttttcgtcgtacacaaagtctaccgtctgaatggcagtggactgcatatgtacatgggatgcggggcttccgacgagcttgttgtcagttttttcgtcgtagaagttgaacagcggaacctgcttcgggtcaagctctgtgcggtagcctttcagtgcaattccggcggctatcccctcccccgacgtcataaggctgtgctcgtaacccatggagtacatacgcgtgttgtctctccagaacgtattcggcgcatactggttcactccgtcgagattatttatcttacgccagattatcttttcgtatgcctgtgcgcttcctcctgcgtgaacgtatattgcgtcatggttggcgagaaaatccacgaaatagtctcttgacgagcggacagaaccgactgtgccgagcttttcgtagtccgacacgagcatcattattcttgtgataccgccctcagccgagcattcgtagtagatatcgccgtcgcatattccctcctgaggaaggctgtttttgatgttgtttatcatgatagcgacaggacggcgatcacgaagctcttttgtcgtggtatagccgttgagatagttgaaaatcctctcgggttctttcgtttcctcttccgtctccggctccgtttcggattcggtttcaggttcggtttctgagtccgggtcgtcggaatatcccgtgatgtttgagtcagggtcttcaagcttttcggcggagtcgggcagcgttatctcggtctccgtctcttcttccgtttccggctcagtttcgggaggctcggtttcggtttctgcttctgtctcggtttcagtctctgcctgcgcgggttctgtctcatgctcgaccggcttggtacatccggcaaagcatgacatcaccattacagccgcaagtatcgccgcagccgtcttttgcagcttattcaaattttgtcatccctttccgtgttgattttttcaaaataaaagccgtgattatctgggtacgctcacggctttcaaatcttatttaagaggcagcgccgctcagtttaaacgcaagcgtgacgcacagcgcaatgacaaggatgcagacggcaaggactaccgagattacggtaactttcttcttgtcgccgagctttgcgaattttacaatgcttcctatcatccacggcacgatgaacgctgcaatgagcgacagatactggagtatattaagcataaattacagctcgcagttgccaaccgttctcgggaaaggaattacgtcgcggatgtttgacacacctgtgaggtacattacgcatctttcaaagccgagaccgaagcccgcgtgtcttgcagagccgtattttctcatgtcaaggtagaatccgtagtcttccttgttaagtccaagctcgtccatgcgcttttcgagaagctcgaggctatcctctctctggcttcctccgatgatttcgccgattccgggaacaaggcagtccatagcggcaaccgtctttccgtcctcgttgagcttcatgtagaacgcctttatttccttcggatagtccgttacgaatacaggacgcttgaacacttcttcggtgaggaatctctcatgctcggtctggagatctgctccccagaataccttatagtcaaagcggtcgttgtgttcttcaaggagctttacggcttctgtgtatgttacatgaccgaaatcactggaaacgacgtggttaagtctttcgataagtcccttgtcaacgaactggttgaagaagttcatctcctcgggtgcgttttccatgacgtagcggatgacgtacttgagcatatcctcggcgagcttcatgtcgtctgcaaggtctgcaaatgcaatctccggctcgatcatccagaactcagccgcgtgtcttgttgtgttggagttttccgcgcggaaggtaggaccgaaggtataaacgttcttgaacgccatagcgtatgtttcaacgttgagctgacccgacacggtgaggtttgtactcttgccgaagaagtcctttgtatagtcgaccttgccgtcctctgtcttcggaacgttatccatatccattgtggtgacgcggaacatttctcccgcaccttcacagtcggacgcagtgattatcggtgtgtgtacatatacgaagtttctctcctggaagaacttatggatagcgtaagccgcaagggagcgaactctgaatactgcctggaagaggtttgttctcggtctgaggtgggatatggttctgagatattcgattgaatgacgctttttctggaggggataatcgggagtggacgcgccctcaagatttacttctgtagcgtgaatttcaaagggctgctgtgcgtcgggtgtttcgataatcttacccttgacaacaagcgcggagcctacgttatatttggaaatttcagcgaaattagaaagcttatcgtcataaacaacctgaacaggttcaaagaacgtaccgtcggaaagcatgatgaatccgaacgttttagagccgcgtatacttctgacccagccgcctacggtaacgcagtcgtggtctaccttatcgcgctcacggtaaagctgacgaaatgaagtgagttccatattacaaaatcctttgttatctttaatttaactttttttattatagcacagttttagatgaaaatgcaagattatccatgaaaaaacatgggacaagagaaaaatttatgcaaaaaatacgggacagatgttgctcagccccgtattccgattaattcaagccttattcaacttcagcaaaagcctcattgagcttggagatatacttgttagccaccttttccatcttcttgtacatggaggtgaagtcgctctggtagtttctgaagaggttcatgacggattcattgtaagtaccgatagcgtagtaccagccgaggtcgtatgttcttgtctcaaaaatgaggtcgagcatttcggcagagtccttatcgcgggcaaccttatctttaagtgtaacatcgtagtaagcgggagttacagtataaagggattcagcggcgagagcttcaacgataacgcctgttctggtagcgtccttctgtaccttaggcaggcagaggaatacgctgtgccatgaaccaacagtattgtagtaggtgtcctgagcttcatcgtacttgtagtaaggaagcacgccgaagtcagcgtccatttcacgaagcttgggaatgagctggagaagctgctgaatgaagagcgcctggttgttctggaacatatttatgatgagcttgtcgtcccagtttgttctctggtatgcgaatgaaacctgcttgtcaagagcgaacttgaagtacttttcaagaacggatactgatttgtcgttataaagtgtaagtgtgatctgaccgtcaactacgtcgcagcacttaactccggcagcgttgacaacacccatgatggagtcgtcccagatgagaacgccgtaacggtcattcttatcgtaaacgccgttgccgtcaaggtcgctggacacgccatagagaatatttgagtaattatctatagtccatgtgccgtctcttaccatatcgtagggatttatattgagctgaagatcctccgccatgttcttattgtagagaatgcagtatgtagcttcgttgtcagctgtggagatgtcgcctgtggtatagaagagcttgccggcaacggtaaggtcggagttagctctctggtcccaccacggcttctcgaggtcgatgtactctactgtattgaggtcaaggagaatattgtcggcagcgagcttgcaagtggagtagcctgcgagcattgtgaggtcatacgcatagtcgcctgtcgtaacggactgctttactgcgtttgtgcctgctccgtcaccagtgcttgccgcagggaaaacgtttatcttaacgtcatagttctgttcaatcgcgagatttcttgtgtagcgcgcatcgtttatcggctcgccggtgtattcctctgcggtaaagtcgtccttaaccgtaccgtattcagcgttggaggagcagtaaatattgaagtccgctccctcgtaggtaacgtcgggaaggtcgggaagaatcttttcggtttcttcttctgtggtttctccgcctgtggtttcggtggtagtcgtggtggtgctgtcgctgctgccttttgtttccgcattattcgtcgattccgagcaggacgcgaaagcaggaagaagcattgcgatgatcagtgcgaaggcaagcgctctgttgcgtttcatttttgttttttctccttaaaaatatagaatcatttggattatattgaacggtcacacccacatttttgtttttggtgaactctacaatattaaaattataccacatccgcggcaatcagtcaatatctgacgacagtttttttgtgctttttataaacaaaagttataaataattaacatcggctcgatttttgcacaaaatttcaaacgttttggttaatttaagataaatagcggaaaaatctgttacttactattttttaattccttaaacgtattgcaaattttacgcctgtcataaactattgacaaaatcgtttatcgaacgaagcaataactgcgctcggcaaaaattcacatcaggcgtactgcattgcataatattaaccttacatctcgtcgatggacagctgataagcaccgcgcgcccagagtatccatttcgagcggtcaaggggattcactccgcgtctcggattaatatgctcaagtccgtcgcggcattccctgtatccgtggaagcttacattcagcgaagccttacccgacgacattgacgcgagcttttcggggaaccccatagaagtcgcaacgggaactatagcttcgactacgcttgtgtcaccgaaagtaagcggcgagtcgtattccccgcccattttcgatatctccgtaatgaccttgccggagagattcatcgggcaggatattctcattttaagaagcggttcgagaatagtagagccgagagactgcataccgttcatgaaagccatgggagtgcagacgaaaaagtcgagcgggtgcgtgtgaatggtgtggtgctgtccgccgacgagggtacacttgaagtccgtgacctcccatccgtaaagcccctgttcaagacagttgtagaaggaagtgcggatgtgcgtctgatatctgtagaaaagctgattcgacgggagctttccgtggtatgacacaccgtatccgcgcggcataggctcaaacatgaactgcacgactgcccaacacggcttcggcatagtgtagtcggcatacgcgaatccgcttttcgatggggtttccttatatataacggtaggtggagcaaaggtcgccgccatgttgtatctttcgcggataagcgagtcgataacctcaagctgaatcttgcccgttgtagatatcgtaatgtccttctgcccgttctcccactttgcgccaatgtacggctcctcgtccgaaagttcgctgagagccgccgcaagtgcaggtattttctccgggtcggagtcggcgggcgttacctttactctcaaaaacggcgagacgagcttatatttttcgcttatgtcaagtgagccgacaaactgtcccgttttagcagaaggcagtccgcacagcgccgcgatgtctcccgcttcaacctcccccgcgtccgtgtatttgccgccttttatcttctttatctgcgtgaccttttcggatatcggaggcttttcctcaagctgaaccgcgtcgtcctcttccccatcggggttttttcggctttcatctatcggatgcagcagctttatttcatcacggttcgttatctttccgccgaaaagtctgacgtaggataccttgcccatctgcttatcgtgctctattttaaaaatgattccacagagttcgtcggttgcgcgtctgtcggaggatggcatatattccgtcatgaagtcgcacagttctctcacgccgagtccgagcttagccgagccgcacagcaccggaacaagcctgcacgccgatatttcagctttcattatctcgcaaagtctctcgtgcggtattttttcgtctccaaggaaagcttccgccgcctcatcattcacttccgctaaagcttcaagcagcttttcgtcaaattcttcaccgtcgagcgacttcactttaacgctttcgtatccctcgccctcccatgagacgacgggaaaataagctcgtcctccgcggctgccgagatcccttatcacagcggatgtgcccgagcctgcacggtcgagcttattcacgaaaacgagccgaggcagctttaaatcgtccagtgcccgcagaatgttctccgtatgcgcccgcactccctcgactgctgaaacaataactatagcataatcaagcgcggtgagtgaacgctccacttctcccgcaaagtccgtgtgtccgggggtgtctatgagatttatgttcacgccgttccattctgcggaagctgtcgaggttcttaccgaaattccgcggcgtctttctatgtcgaggttgtccgtcacggcgtttcccttgtctacgcttccggcttcacgaacagctcccgtaaggtagagaagctgctcggtcagagtggttttaccggagtcaacgtgcgcgagaactcctatattatggtagatttttttctctttcatatgctgtggaaataacgctccaaattggttttttctattatatcaccgtgcggagaagatttcaattaatccgcggtaatttttaatttatttggcgggaatttaattattcgggcataaactgttatatcatacaacgaaatgtggatttatgtcaaaaaatcgtcatattgacaaagggcaaaatacgtcaaatgtattgcctttcacggaaaaagatagtataattaattttgcacgatttttgcatctgtgctgacgtttccggattgcgcaaaggcttccggaattcccaaaacatcaaaacgcgtaataaaatatatccgagaggacggtcagtatcccccgggtaaagcataaagcgcgttacaatttaatatttggtgttcacattcggcagttttttgatgaaaccgaggcttatcctttgagatatgtctgagaaatcacagctgcaatcgagatacggcgttttcgccttcgatttgtaacacactctttgcgggggttgtgattagccgtgtgtgggttcgcgcagagctgtaatacggcttacgtggtcttttgccgcaaagggggatgcaaaaaatgaaaaaaaatattatcgaacttaaaaacatttcagtcaaattcgacgacgacgttatccttgacgacctcagcctttctataggcgacggagaattcgttacgtttctcggttcatccggctgcggaaaaacaacgactcttcgcattatcgcgggatttctggagcctgattcgggggaagtgttttttgattcaaagaacatgagtggtgttcctccgtacaagcgtgaggttaacaccatttttcagcgttacgctcttttcccgaactacaacgtatttgaaaacatagcgtacggtctcagagtccgccacgtccctgaggctgaaatcaaacagaaggtttccgagatgctgacccttgtaaaccttgaaggctttgagaagagacacatatcaaagctctccggcggtcagcagcaaagagttgccatagcgcgcgctcttgtgctaaagcctaaggtgctgctccttgacgagcctcttgccgcactcgacttaaagctgcgaaaggatatgcagaacgagctgaaaaacattcagaaagcgctcggcataacctttgtgttcgtaacgcacgaccaggaagaagcgctctcgatgtcggacaccgttgttgtaatgaacgaaggcaaggttcagcagataggctctccaatcgacatttacaacgagccgaagaacgcctttgtcgccgatttcatcggagaatcaaatattcttgacggcacgatgaaggctgactaccgcgcgtacttctcgggaagagagttcaaatgtctcgacgcaggtttcggtgtgaacgagcctgtcgacattgttgtccgtcccgaagacgtcgatatcgtaaaaaagggcgagggtatgcttgacggcatagttacctccgtcacgttccgcggagtacactttgagataatcgtcgacatcggaggctttaagtggatgatacaaacgacggacgagcacaagcccggtgaagaggttggtctgttcattgagcctgacgccatccacgttatgaagaagtcgaagtattctggcaagttcggcgactacagctcgtattcggatgagcttgacacactgaatcagcttccggaggatgaggatgatgaataagctcttctcttctgtttgtgtcggaggtgcaagatgaaaaaaagatcgctcatgcagcgtctcctcggagcaccttacatcctctgggctgcgatattcattatcgttccgctcattatcgtagtgtattattccttcacggactcggcggggaatttcactcttgacaacatcaagggtcttgccggatacaaggatattttcctcatttcaatagaatattctctcatcgcgacggtaataactcttcttatatcgtatccgttcgcatacatcatgagccgcaaaaaagagtccacacagcgtatcatgatgatgctcgtaatgctgccgatgtggatgaacctgcttatccgcacctactcatggatgaacattctcgagaaaaacggcattataaacaattttctcgccctcatcggagttgagccgctgaaaatgataggcactccgggcgcggtcatcttcggtatgatttacaattacataccgtacatgatactcccgatatactccgtcatggcaaagatagagcccagccttcttgaagccgcagaggacctcggttcaaacggtttctcgaagctgcgcaggataattcttccgctttccatgcccggcgttgtttccggatttaccatggtattcgtcccctctgtcagcacgttctacatttctcaaaagctcggcggaaagataatgctcgtcggagacgctatcgaaaagcagattcagtcgctttacaattacaacctcggcgcggcgctgtcacttgtgctcatggtgctcatacttctcagcatggctctcatgaagaagtttgcgggcgacagcggcgacaacattcttgtataggagggcggacatgaaaaagcattcaggaaacatattcatcggaataatctatttccttctgtacgctcccctgctcgtcatggtgttcttctccttcaacgaagcgaaaagcacttcggtattcacgggattctctctgaaatggtaccgcgagctgttctcgtcaagcactaccatgaccgcattgaaaaacactctcatcttggcagtgctctcttcagttatcgctacggttatcggaactgccgccgccgtatatatctactacctccgcaaaaagtggtggaagaacacgcttgacatagtaacgaacattcccatgatgaaccccgatatcgtaacgggcgtgtctctcatgctcctgttcgtgttcgtcggacgtctcgtaggtgctgcaaactcgctctcgttcatcacgcttcttatcgcgcacatcacgtttaacctgccgtatgtgatactgaacgttctgccgaagctcaatcagacggattctcatcttgtcgaagcggcgcaggacctcggaagcacacctacggaagcgttcttcagggttatacttcccgcgataatgcccggcgtgacatcgggacttctcatggcgttcacgctctcactcgacgactttgtaataagctactacacgacaggctcgagcttccagactctgccgcttctcattttctcaatgacaaagaaagcggtaaagcccgatatgtacgcgctgtccaccataatttttgtcacggttctcgtgcttcttctcgccgttaacatcggtcagattaaagcagccgagaaaaacgaaaaacacaaataatttcatatcttatataaaggagtacagtattcaatgaaaaaaactctctgcgcacttctctccggcgttatggcagccgctgccgttctcacttcctgcggaggcagcaatactactctcgaagaacctcgtgcggaatacactcgcgaccttgcgggaactactcttaacgtattcaactggggtctttacatctccgacggcagcgaaggctcgtttgacgtaaacaaggcgttcgaggagcttaccggcatcaaggtaaactacatgaactacgaatcgaacgaagccatgtatgcgaagctcaagtccggcgcggtttcctacgacattataatcccctccgactacatgatcgaaagactgaagaacgaggatatgcttcagaagctcgatatgtccaagataacaaactacgacctcatcgacgaaaagtacaagaacctctacttcgatgaaaacaacgagtacagcgtaccctacaacgtaggtcttgtcggactcatctacaacacaacgatggttgacggcactcccgacagctggaacgtcatgtgggacgaaaaatacgccgacaacattctcaccttcaacaacccccgtgacgctttcgctatcgcacagttccttctcggaatcgacgtgaacactaccgacaaagctgaatgggacagagctgccgaaaagctcaaggaacagaacaaggttctccaggcaagagtaatggacgaagtgttcaacaaaatggaaggcggaaacgcagctctcgcaccgtactatgccggagacttcctcaccatgcaggagaacaatcccgacctcgcgtttgtttatcctaaggaaggcacaaacattttcgttgactccgtgtgcgttcccgcaaatgcagcaaactacgacgcagctatgatgtacatcaacttcctgcttgagcctgaggttgcgcttgcgaatgccgagtatatgtgctacgcttccccgaacactgccgttataaacaatcccgagtacgagtattatcagaacgagattctctatccctcgaatgccgatgaaatgaacaccgaatacttctacgacatcgacattgagacacgtacctactacgaaaagctctgggaagaaattttactggcagattaacataggctgtcggcggattcaacctaagcgaataattccataaaaataaagctgtattacgtcaaaaggcatagtacagctttttgttctgttttacgattttctcagcttttcgagcatctctgcaaaattctcgggaagaggagtttcaaagcgcattgtttctcccgttctcgggtgcttcagaatcagtgcgtaggcgtggagcatttgtccgctcagcaggctcgaatttttcttctcaaacggtgtatgaccgccgccgtaggtttcgtctcccatgagcgggtgtccgatgtaggaaaaatgcacgcgtatctggtgtgttcttcccgtttcaagcacggcttcggcataggtgtacggcagattgaaccgctcgagcacacgccagttcgttacggcacttctcgcctttgcgtcagagaacttcgcgacagccatcttttttctgtccgtcgtatgtctacctatcggcgcgtctattcttccgctgtcctcccgcaggtttcccacgcatatcagcctgtactcgcggtgcatcgagtggtcttcaagctgtgcggcaagcgagagatgtgcgaaatcgttcttggcggcgcagataagtccggtagtgtctttatctatgcggtggactatgcccggtctgctgactcctccgatgcctgagagcgagtctccgcagtggtacatcagagcgttgaccagcgttccctttttgtgtcccggtgcggggtggactaccattccgacaggcttgttcacgattataatgtcgtcgtcctcgtattttatgtcaagtggaatgtcttcgggttcagcttcgcaatcttcggtttcgggaagtatcagctccacccgctctcccgccgacagcttgtaattcttcttcgggacaacgccgccgagtgtaacctgaccgccttctatcagcttctgcgcgtatgaacgtgtgattcccgcctgttcagccaaaaacgcgtcaagtctgtctccgctcttctctgacgtgtagacgcttgcttctatcggctcatcctcgcggaatgattcgcagatttcaggcatttttgtcctctcccgcactttttttcagctttctctcgcgcacctcgtcgataatcacggcaatgatgaacatggcgcatccgacgcagacaaacgaatccgcaacgttgaacacataaaagttgatgaatctgcaatcaatgaagtcgataacataccctctcgcaatgcggtctatcatgttgccgactccgccgcctacgatgaagcacagcgcaagtctcatccaccacgatttcggctttgtcacggtaagataaacgaaaatcgccgcgattccgacaaccgacagaatcatgaacacccatctgtgatcggcaagcataccgaacgccgctcctctgttctcgacataggtaaagtggaatatgttctcgattatcggcagtgtggatatgtctttgaggttcgccgcggcgcatatttttgtcagctgatctgccgcgatacacaaaacaataatcaaaatattaattatcatgcgttctccgtgttactttttgaagtgttttccgttctttttcggaggttcggacgcggcgatggtgggttgttttcgtatttcgtcaacgcttttcttcgcgcttgagtcggaataaactatgtcgaattcatccgtcagagacatgtctcgcttcccttttccgctgaatatcgagtccatatcgacgtaaccatcgccgctgtctccgttttcgttaaagtcgctgtcctgtgccgtgcgcgattttttcagctcttctccaatgttcaaaacccttgtcggggcgtcgttctcttccggctcaaagtcgctctcttctgtgtcgtcactctcgtcgtcggctgacaaaagctcgtcgtcgcccagtattccaaagaatctgtcgagctgtctctgccttgcgcggtcgtcgtcgcttatcgcaggctccgcagtctcttcctcgtcatcctcaagtccgagcgcttcgtttgtgtactgttcgctctcttcctcgtcgatttcgtcctcaaggtctatgtaaatgtctccgccggctttttcttccgtcacactgccctgctgagcttcctccgcgatttcttccgcattttcgtcgtattcttcttcgtatttttcggaatactcgctgtcatcggcttttgtcatgtcttccgtgtcctgagccttgtgttcgtcggggtaaagctcatccattctctcggaaaagctgtccgcgctgttcacaaactcctctatctgctcgatatgactgttgtagagttcgaacatcgtgtctctgaacgaaagtatctcgttgtacatcgcgtttgcggtttttgagagctccccgacttgacctttcacctttgcggagtattcatcggcttcggtgattatcttttccgcttcttcagccgctatttttgtcgctccgtctacgatatcacgacctctgccgcgagctttttcgatgatggcgttggctttttcctcggcttccttaatcggtgcggcaagctcttcctcggttttaagctcattgctgtttttgttcagctcgaactcgtatgccttgattttctgtgccgcgagagctaatttccgctcgttttcggagtttttcttctcgagctttttgtattcgtcattcacataagaaaggtacgcgtcgacttcatcgggcgaatatccgcgaagtatcttctgaaatgtcttttttctgaaatctctcggcattgctttttcctttcctttatatatattttttcagcttcaatttgattcttccgcttttggtctgtcccgtgatgtctccgacaaggtattttccgtatcccctgacagatagaatatctccctctctgacttccgccgaggtgtcgcagttttctttatatgagagcgtgacaagcccctgtttcaccatctctgccgatatctcgcgcgacttcccgcatacggctttcacaacggcgtccagtctcattgaagctaccgcggcgtcgattgtctcatagcttcgcggaatgacaaaggcaggattgagcggtatttccatggttttcatgccgtcacgaccgattttggtaagctccgtcaggatgtagttttttattctctcatggacgaaaaccaccgcttcggcttccgacacaacggcaatgtctccgacgactgcgcggtctattccgagggaaagtattcctcccatgaagtcacggtgagtcaggcttttgaatccgcttccgcttatttttatcgcacatatcggtatctcttcgagtatctcgggatgagccgcaagatatcccgcgaaaaattccgttctgtcgctgtcaagcggaggggtatggttcgggaattcgtccggcagataccactcaggcagaaacacggcggcacatctctcgcatccgacagctcctccgaagaaaaagcagtttccggcgcttccgctgtgcatcaggtcaacaagcacgtctccgcgttcctcaggtgtgagaaaatccgtacaggtcaccgcgtattccgattctcttgacagctccgcggcgcgtgacaatactgcgttatctttcatgttaaattccccgtgagagcagcatttccacaatcgagagcagaatgaaggttatcataaacgccatatctatcggcagtccctcgaaccatccgaagtaatcgagaagcgcccgcaccggcatgataacaggctcggttaccgtgtacagaaaattgattatggggtgatcctcatcgaccggaagccagctcacgacagcgcgtgcaagcatcatgacctcgagcgcgattacgatgaaccgaaccgtcgacgttatcacataaacaatctgatacatattaatcctcagtgtatgatttaaaaaagtgagctacaccgctaaatatggcatagctcacagtaaagcactatttttgcaaaaattacaatacctgcaaattattacttttccggcaaaaagagtataaaaacaatacctcatggattagctccatcaagctctactattgtctatgtacttgtgctgaaatcagttgaaatctccgaagtcgtcgccggtattttctttcggtgcgggctgaggttcactgcggcgtgcgttctgcttgatctgaacattctcaacgtcaacgttggaaggcgcaataacataagcgttcgttgaaaccttcttgaggtctccgccgatcgcgtaagctacgcctgttaagaagtcgataagtcttcttgatgtttccttgttggtgttttcaaggttaagaactaccatgcacttattgagaaggtggttggctatctgagaagtggtgtcgctgtcataagactgaggacgaacgacctgcatcttgatattcgcgcctgtgaagctgattccgccgccggttgcagtacccatatttacattgttctgagtctgggcctgacctgtcggaggaacgaactgtacgtcgctgtcgtctccttcatcctcatagttgtcaaatccgtcatagtaatcgtcatcgtagctatcatcatatccgtcgttgttgccggttacttttttgattcgatccataagtcccatataaatcctccattctgccgtcaagcaggataattaactaatttaatttgtttccgtccgaatattttcatgaacggtaagcccattatttatactttctttttccgaagataatgctgccgagtcttacaatatcggctccttcttcgatagcgcactcaaaactgtcgctcattcccattgacaaaacaggctctcctatattatgcgttttttttgcaaaaaagtcaaggaatattcgataagattctttaaaatatttgcgaaattcgttgatttcttcgcatttcggagccatcgtcatcattccgcagacttttattgccggataagtctcaagttctttgagaaattctccgacctcgcccggattcactccggttttgttttcctcttcgcctatgttcacttcaacaagaaccttctgctccactcctagtttttccgcacgggagtttatttcctccgccagctttatcgagtcaagcgaatgaataagtctcgcttttccgacgatgtactttactttgttcgtttgaaggtgtccgatgaagtccatttcagcacccgcggcacgaacagcatcgtacttgtcggtaaactcctgagcatggttttctccgcacagcttcagtccgcagttttcgatgaggtagcatatatcctcagccggaactgtttttgtagccgctaaaagtgtgactggtttatcccctccgcgcgtcttttttgccgcctctatcatttcaagaacgcgggcatagttttcgctgagttctttttttctctcttctgtcatagtttttccgttatcttatgagtttaccgctgtagaggtcttttccgctcacaacgataatatcattttgttttatccaggggtatatctcgtcatccgtaccgccgcttgagccttcgtttccggtgcagataacgtatccgtcgtttctgtagacgatattcacgcgtctgaactccaccgttacctcgtcaaggatgtacacaccctcgtaaccgtcgaccactcgaacagc

SEQ ID NO: 2840 - DNA, 4083 bp, Unknown
  16S sequences of unknown bacteria
tccgagagttttacacgcagaaggcgctgcgctcgaaaacgggcctgaacgatttcccgcaatacaaagaacttcgtccaagctgtgaggagatgcagagcgtacatagcttcttttataagaaagtattcgaggcgttcgaggataacagtgcagaagcgataaagcagaagatctaccgcgagaaagcgggagtgaaatacgtgtggcaccctcgggaaaagcccgaaggaaaaggcgaggagaaggaagaaaatggcccgcggggacaaaaataaaacgagcggggcaggtaagcgacgaaaagaccgcgggcggttggaatagagcgatgaggccgggcgcgggggaactctcacttatccagcggcgccgaaggcgcaaaggagaagggagacggcagagccggggcaatcccgaacgaaacaacgttgcccggataaaagacggtgacggccaaaccgccggaaatgcggacgtatatccccgcaccgtggggcgggggagacggccgcagagccggcgggcggtcggcaacggcgccgggcaacgtcatgcgggcggggaggttaaaattaagccgcggcgcgccgtatcttattcccccgcaagaggcggcgttcgcgtccgccgatgagggggcgcccctcgccacagggacaaaatcgaggaaaaaattatgacaagggcgatcaaaatcgaaaatttaacgaaaatcgacgcgacgtcggcgcagatattgagagttatatctctgcatctgggcgaggattcggccgcctttgtcgattacaatctgattgccaaatccctgaatttggatcgcgatacggttcgaaaagcggtcaatcgcatgataaaaaataaaattctgaaaaaggaaaacgggaaactgtcgatccagaacgccgttttggtaaagtaaaggaggcgcctgaaatgaacaaaagagactgtcccacactacgggaactgagagagcaaaataaaaacaccgccgcagaagtcgcggaggtgttgggagtagcacgttccacttactcaaattatgagcagggaatcagaatgatagatattgagctgataattcctttggcaaaactctataattgcacagccgaagaaattatagaagctcaaatcaatagtcgtcggttcgaccgataagataatcagcagatatatcgtaaaaatcgcaaatacgtaataaaacatctaatgagggctcacgagttccctgttcgtaatttgcatagcaagtccgtgatatttgtaactgttcagctacttgcttttgagacaagcctttgttgagacgttcatttctcaatttttcattccaagtcatcatataaaaattattacacgttttgagtcgaaattcttgacgtgacacaaaatgagtagtataataaagacacaaaacgagtaatttggaggtaaagaaaaagatgaggaacgagcggaacgggaaaaggaatgaaattgaaaaagcggttgaaataatccagacagcgagcgaaaatttagagaagagcatttgtttattgcgtgggataatcggacggatggacgcggccgaagattatgcaaaatttcaaagggagcaattttatgtgatcaaggataaccgttcggaacgttgtttcgatgaagtagaggaggcaggaaaatgaaagagatattgagagcgaaaagcaagactccgacagaaaaggaatgttatgaggagcttgtaaaagtgatacggatatattgctatcagtcggtagtgcgggaagaaataggattttttcagaagtggctgaaaaatattttgacgcaactttcagagtatgcgccatcaccggaagatccggggaaatatccggcatataaagagctgcggcgtaaggcgagcgaatttgtgagggaaccggcggaagatccgtcgcgagtgatgatgcagagagcggaattgaaatcggcgttggaggaggcagagaaagcaggcgggcttcggtcgcggccaaggaagccgagaacgcaggaaaagccggagaaacaagtaaagtgaaagtagatatatacaatccggagaagcggtataaaattttatacgcggatccgccatggttttaccgatgcgggaatcgacgaggagcggcgaaaaatcattatccgacaatgacgttttcagagcttgcgaagctgcccgttccggcattggcggaaagagatgcggtgttgtttatatgggctacatatccgacgatagaagacgccttgcggctgttcccggagtggggctttgagtataagacaatcgcgtttcagtggattaagctgaacccgacaacgaacttaaacgaataccgaatcatgacggcaggggaattgttggaaaagtcgtgcgcgttaggtttgggatattggacgcgggggaatacggagtgttgtttattgggaacgaaaggacacccgaagcgtgagaacgcgggaatcagtcaactgatattttccccacgtaggcgacattcggagaagcctgcggaagtgcgggagaaaatccgaaaacttgtcgggggggggcagctattgagctgttcgccagagaagaaacagacggctgggattgctggggtaatgaagtctgaacggacaaaggaagattaaaaaatgggagctatgtcgatacccgaaaactttacatacacgaaacggtattacgcgcattttgctgaaatggcaaaggcaggctttgccgcgctcgggaaagcggtattcgggcggattttcggggaatgcagctggaaacagacttgcgaagaaacatacccggaaatggcaaaggtattaaattgttcccgctcctctgtcgcaaggtggataaaaagattaaacgaaaaaggcctgataaaacgtctgaacgggacgcgctcggaatataaaacggacgagagcgccaaggattcggacggatttattatcacgccttcctttttctatactacggaatttaccttccgaagcgggagaaggtatcttcggcaaaatgaaacagatattgcgagttatatattgagttggagcctgaatccgaaaacaaagggatataaaggctcgatcgggaatatagcgcgaacgctgggaatatcgacgactacggtctcggaagcgatagaggcattgacagaaacgggactgataaaacgggaagaaacgtcggacacgttgaacggcgcggcaatcttcaaatatacggcggataaagatttagtgacggcagtccgaaaggctttccgaaaaagcgggaaagaggagaagctgccggagaacgtgagacggataaacgaaaaagcggagcgcgaaagctactactcaaagctgagagcggaagcggaacgggaagcggagaaacgcagccgctcgttgcgattggacgggaagtatgcggcggcgttccgggagcgcaggaagctcgatgttgcggaaagcagggagaccagcgaggcgaagcggcgagagataaagaatcgtcgggaaattctttggaacaccatcacggatcgggcgcgagcgttcgggttttccgaaacggagctttcagagttgggagaagtgttgccgagatataaatgtcggaaatgttcagatacgggaataaagcaggacggaacgtattgcgactgttacccggaatggagaaagcgactaaaagatatagactttacggcgggtgtaaagtctgggcgaattggataaaaaaataaaagcgtggagaaatccgcgcttatagtcgtgaaagaaaagaggtattccgcccccgaagaagggacgggatatttttttatatccctaccctccgaaaatgagatttttaaagtttcaaaattggagggtaaaattttcaaaggtctcaaaaatggatagtaaggtgtcattttcggatagtaatataatgattataacttttttcttatttaagaaagaaaagcggcggtgccggaacgggaagcaccaccgcgggaaggagggcggaaggatagaaacgaggaagcccggcgggcgggcttccgggatatggaagaaagaaaacggaaa

SEQ ID NO: 2841 - DNA, 25692 bp, Unknown
  16S sequences of unknown bacteria
agtgcgccttcgctctggaagtaaacatacttaacgccttctacgggagcggagagagctgctgcgtagtatgtaaagtctgtttcttcaaagaatgtgtcgtcgccgtatgcgattgctgtccagttttctccgtcaccggatacatagatagcccattcgaaaggagaacggttgttgtaggaagagttgtcgtttgccgtagccatgatgataccatcaactgtgataggtgtagcatacatagcgagagactgtgtcgggaattcggctgtgcagaactttgttgcggtgtcgttgtcccaaagattttcagaaccttcgttattgttgccgtttgaacctgttacgaatgtagtgcctgtaacggcggtcttgccgatggatgctgctgcttcttcaagagtagcgtagcctgcgccggagtttgccattgcgtccattgaaggatagtcaagaacgggagcttccatttcgggaacttctactgctgttgtatcagctgctgcggttgtttcagctgtagcttctgttgtagcttctgtagttgttgtatcagctgctgcgtctgctgccgggaatgcatcaacaacgccgtcttccggataaccgtaaagctctacttctgcaacgtcgccgtggctgagcatattgtagtaacggtagtaacggaatgccttgccgtttgcgtcggattcaaatgcatcgggaaggatttcctgccatgtcggctctgtagctgcgtccatgctcatccagatgtctgtccattcagcgtcttcttcaagagaatcggaaccctgaattgtagcgccgtagtaacgatccggatatgtttctctggggtgaataacgatctttgtgagaacgtagggcttaccgcaatcgataccggtataaccgtcgccaactccgagcgggtcaaagaatgttgctgtgtcaccgtcaaatgcagctgcgcggcctgctgttgcgcttccgccccaacctgtttcgttaccgatgagttcgcccttaatgcataccgaaccgtccgggatagctgtgccggatgccggatatgctgctgcgggaacttcagctgatgctgtgatagcgagagacgctaccgttaaagtgctgagaagaactgctaaaatcttcttcatgggaaatacactccttttgtgaatttttcttaacgtataagggaaatgccttatggtagctttattgtaccacaccatatttattttgtcaataagaattccgaaatttattaattattagtccacttttttaggactaaagttgtagtttttggtgtttttatcatttaatcagcgttgtcttgtaaagtttcgggtgttttttttcataaataagactaatttttagttattctccgtgcgtattcattaatagagaaaaaagaaccgacagctcgtgccgattcttttcgctaaatgtgttatatcaaagaattactttctcttcttggagacagcgtagcccgctgcggatactgctgccagagctgctgcgataacgcccatatcgaaagtctgaggagctgttgtttcagcgggtgtttctactgtttcttcagcagcttctgtttcagcagttgtttcagcctcggtttcgggtgcggttgtctcagcttctgtttcagctacagtttcagcttctgtctcgggttcggtttcggctgtattttcgagataaccgccgagagttacgtagtcgtatttgtcaacgtcccatgaacctgcgttgagggaggagtccatgttgtatacagcgatggtgctgtcgccgccgccttcgacgcagtcgttaatctggagctggagacctatggagttgccttccttgagttcgtagtcttcaagagcttccttgaggtttactctcatttctatgttatatccgacgtcggttttagctgcggcatattcgtcaaagtattcctttgcatcttccggaccgtatgcaaagtaagcgccgtcctgaatgtagtaggacggatagcctgtgcagtcgattctgtactgttcagcaagacctacagcttcgtttgagaaatcgaagaacatttcaacggagtccgttgtccaaggggagttcagatgagcgttttcggagggtgtggcaacgtcttcgtcaaatacttcaacgaaaagatagtatgagccgtcggtccaaagcatataagccttgccgtatgtaccgagatctgcgccggagaggaactggttaatgtcaacgcagagcgcgttatcgtatgccgcatcctttgtaccgtcgataacaaccgaaccggcttcaaccttcggaacgatacccttgcacgcaccggcttcagatgcgaatgcagaaacagccatagtagtaacgagcaatgttgtcatgattaaagcaaacagttttttcattttttcacctcattatagtgtcactcaattccgtctaacggattagtgtatagatattatacattgcatcagtgaaaaagtcaatgtcttttatgagttttatattaattatagtgcgactattatttagttatgtcggttttagtacaaaaatcgcaaaaaaagaactggcattttgtaccgattctttctttattgacatgaagtcagcgggatattactttctcttcttggagagagcgtagccgatagcggaaactgctgctgcagctgctgctacgatacctgcatcgaatgtctgaggagcttcttccttagttgtttcagcgggtgtttctactgtttcttcgggagcttctgtctcttcagcaggagcttctgtctcagcgggagctgttgtttcctctgctgcgggagcttctgtctcagcttcagctgcgggagctgttgtttcctctgctgcgggtgcctctgtctctgcgggagcttctgtttcagcttcagctgcgggagcttcttcaacaacgccgtcttccggataaccgtagaattctacttctgcaacgtcgccgtggctgagcatattgtagtaacggtagtaacgataagcaacaccggattcgtcgaattcatcagcttcaacttcgtgccatgtccactctgtagcttcgtcaaggctcatccagatgtctgtccattcttcaccgtcgttggaaccctggatagtagcgccgtagaaacgtgcgagctgagcgtctctggggtgaatagcaacctttgtgagaacgtaaggcttgcctgcatccataccgcagaagccgtcgcctgttccgagcgggtcaaagaatgtgttgatgtcgccgtcgaatgcagcggcagcgcctgtagcagcgtttccgccccaacctgtttcgttaccgattactgtgccgttgatgataacggagccgtcgggaacggaaacgccggaggaaggatacttagcatcagcagatgtatcaacttcgtcctttgtcttacgaacgataagttccttaacttcgtaagatccttcacctgtgatggtgatctttacgtaacgtgatgtagcggctgcaacttcgatttctgtaactgctgctgcgttatcagttgttgtgtactggtcagcgaaagaagagttgtcagagcttgttgctacagtaaacgcagcaggaacattttcgccccatgtgatctggaagtatccgagaggcttaattccgccgaggtcgtatgtaagggtctgtgtgccttctgtttcgcctgctgtccattctgtagcagtagcgtctttagcgtagttagcgaggtcagctgcggatgctgtaacggcgaaagagccgagcatgagagctgcaacgataactgcaagtaactttttcattttgcaagtcactccttaaaaaataaaatgagagaattaggacaatgacgaaaaaataattttgtccgtcctatgcaaaacttattctaccaccgattcatctttttgtcaatagctgcgcataaaattttactctcatttgcacaatatatacattgccactttacaaacgacaaaaaatatcagtgttgtttaacaggtaaatgaactatttattagtttattgtaatgagcgtgtcgaaaagctccgcgttttccttgagcttggtttcgtttccgactgtgcagatgtagtcctgagcgcaaaccttgtcgaaaacatcagcggacgccttgaactgttccttggtgatgtcgagcatttccgctctttctcgtaaaacgtcctcgtatgtgatacccgtcatgtatgcactgaacgaacgtcttgccttgcccgcgtttgagagaggtctttcgtagccggagaacgcgccgattatgaacttcgtaagctctttttcatcaaagtcgtagtttctgatgaattcgcccgtgcctttgaatacattgtagctttcggcgagcttcgggtcacggtatgtagtaaaggtaagattgtcgcagtatgaatcaaatccgcagccgcagccgtatgcgccgcccttaactcttatctgctgatagaggtagtcgatattgatagcggactgtactactctgtatgcgccgttgtatctgttgccgtcgaatacgaggtttcctgcctgagccgcatactgaacctgagacgggatgaggattccttcgttcttcttttcggggatgtagtcgacaaattcgccgagtgagccgtgttcgacttcgcctatagcctttgcgaacgcagggagcttttcgtcgaggatatctcttccctgcttgtcggacgcgaggtcaaggaacatagtcgcgggattgaagacgtaattcttgacggcggtgagcttttctatgaactcgtcagcctttgcgtcccagttgtcgagaatatcagtaaggaagaggtagaagtctattccgccgagatcctgatagtagcactcaacctttgagaagtatgaccttgctcttgcgccggcgaccgagttaccgttgttgatgatttcgtttctcttaccggacttcatttcggcaaggatatcgcggaatctcttcttgtcgtcgagctttgaggtgagaacgatttcttccgcaagctcaagcgcatagtcggtcttgtcggacatcatctttgtgtagattccgtagagaggcgtgtagtcgtcgagagtcttatactttgtgtatgtagcgggaccgaaccagattccgccgagattcatgagcttatcgaagttcagctcgttgtaggtgtgctttgcggtgtcaactctgccgagtacgtttgcgaggatggaaaggtaaggcacatactcgcgcggcagctttcctatattgaagtagagatttgcgtaggttatgccgtttgtgtcaacatcgtggaatacggtctttgtgccgccgactgtgatttcttcattataataaggaatgccttcgcgcggaatgtcgcttctctcgagtgaaggaatgcagttctgttcttcttcggtaggcacatggttctgatactcacggagttccttggtatcgtcaactattttctgaatctcttcggcggaaagtgatttcttgtagctctcgagcttttccttgagttcttcgttcttcttgtcgttgagtcctctttcgggttcaaccgtgatgagagcgcaatggtcggactcgagaatgtacttctttattatgttctcgaaatatcctgtgcctattttctttttcagttcagcacagtcgtcgaggtagtgcatatacgaaagtgcggtgctgtcgtcgtagagccatgactggagcatatctgcagcaacgtcaagtcctctcggatatccgccgtagtccgcttcacggaaactgaattcgcggctgttgagagttgcaaggatagccttttcgttgatgccgttctcgacctgctcgcggagagtatttattatgatatcacggaacttttcggcgtcctcggactttgcgtactttgccgcgattacgaagttgtcttcaatctggtgggattcatagtagccgaatacttcttcgccgatgcctgcgtcaaggagagcctgcttaacgggagcgccttccgcgttgaagagaacatatgcgataactgatgctgctcttgcttcaagcacatcgacactgtttccgccgagagatgagagcacaagataggacttgccgtcgattgcgtctgtctgacctactgaatacttttcgtgaactatcttcggggtgtttgttccgaaatgcttctgatgttcaacctcggagtgcgggtctatcttatcgaagttcgagaggtattccttatcgaggaactcaagtctctcatccatgtcgcagtcgccatatataaatatgtaggaatttgacggatgataatggctgcggtggaattcaaggaactgctcatatgaaagctcgggaataacagcagggtcgccgccggaatttacgccgtaggtagtgtcggggaacattgttttggaaactgtctcccacatagcgttgtcgggggatgaggacgcgcccttcatctcactgtatacgacgccgttgaccttaagctcatcgtcagcgttctccatctcgtagtgccagccttcctgcatgaaaatctgacggtacttataaatattaggatagaaaacggagtcgaggtagacgtgcataaggtttttgaagtccttatcgttgcaggtagctacgggataaagcgttttgtcgggataggtcatcgcgttgaggaaggtgttgagcgagcctttgacaagctgcatgaacgggtcgcgggacgggaaatgcttcgagccgttgaggacggaatgctctatgatatgcggaacaccggtgctgtttgtcggtggcgtacggaaagccgcgcagaagagcttgtttgagtcgtcgtttgacattaccgcaactctcgcgccggacttcttatgtctgagtataataccggatgaacggatatcgtcgaggtattcttcatacataagctcatagctcgggttcggggaaagctcgctgtagcttctgacttgttttgccatgttttttgtattcctttcgatatgagaattaataaaagttatagcgttttgtttagtcgttatactttagttatattatcctacgaaacacgtgatttgtcaagatatttctatattacaaatatgttacagtttgataaatactattgcaactatgtaatttcggtgctataatagtcgaggtttccgtaccataagcggtatcctgttgtcgccgcgcgtgtggaaaccgattttttgagcaaacgactataaccggacttctccactcctccggcaatgatatgcggtaactccactgccgcgcgggtatgaatattgttaatgaagaaaaacaacagtaacaagaacaaaaaatcaagtataagcctgtccgtcagtttcatgaagggcagcacacgatatttcgtattgtgtatcattttttcgctccttgcttcactgtgcgagctgatatgcccgaagataatcagcttcactgtggacagcgttctcggcggcagggatgttccgtggtatctcgcgggcattgcggaaaagctcggcggtatcgaatacatatcgtcaaatctctggacggtagcggcggcgatacttatagttgcgtttttccttgcaatcttccagtatctaagccaagtctacaaccgtaaaggttcggaaacgcttgtcgagaacatgagaaacaagctgttttcgcacatcgaacgcctgccaagctcatggttcatgaaaaatcagaccggagacattattcagcgctgcacctctgacgttgagactgtaaaaatgttcctctccgaacagctcacctcgataatcagcaccgtgctccttattgtaatgtcgctctttttcatgttctcgataagcacgccgcttgcactgatagccctctgctccattcccgtaatcgtagcttattccgcagtattccacggaaaaatcggaaaaggcttcatggaatgcgatgaaaacgaaggaaagctctcgtcaatcgcgcaggagaacctcaccggcgtcagagtagtccgtgcgtttggcagagaaaaatacgaagtcgacaagttcaccgcgcagaacaaaaagtacacaaacgcgtgggtacacctcggactgctcatgtcactcttctggtcaatgggcgacgttctctccggagttcaggtaatgataatcctcgtactcggaacagtattctgcgtaaacgggaagctcagcgtcggcgactttattgcaatcgtttcgtataactccatgctcgtatggcccgttcgtcagctcggcagagttatctccgaaatgagcaaggcaagcatatccttccagcgtatcgacgacatcacaagcgcggaagaagagcatgacgcaccgaacgccgttgactgcgacacatccggagacatcgttttcgaccatgtttccttctcctatgaaaatccggacggagaggacacaaaggtgcttgacgacgtatcgctcgacattaagaaaggctctactgtcggcatcctcggcatgacgggaagcggtaaatccactctcgtacagctgctgtgccgtctctatgagcttcccgaaggctgcggaaaaatcacgataagcggcgaggacatcaaaaacatcaaggctgcgtctctcagaaagaacatcggcatcgtactccaggagccgttcctattcagccgcacactcaaagataacataggcgtgacatttgagcgtccctcggagcatgaagacgagattcgcgagggcgcaagaatagcctgccttgacgaaacgatagaaaacttcaaaaacggatacgaaacaatggtaggcgagcgaggagtcaccctctccggcggtcagaagcagagaactgccatagcgcgtcttctcactcagaactctcccgtcatgatattcgacgacagcttatccgcagttgacagcgagaccgacgcgaaaattcgtaaggctctgcgcgaaaaaaccgccgactctacagttatcataatttctcacagaatccagacgcttatgtcagccgataagatagcggtcatggcaaacggaaagatagtagagctcggcactcaccgtgagcttatcgcacatgacggcatttacaagaagataaacgatattcagtcgtcgggaacatccgaaagcgatgaaaacggcgcaaacggaaaggaggctgctgtttaatggaagaagaaacctccaccaaaacaactcatctgaaattcttcggaattcctaaaataatcccctatctcaagccttataagttcatgatgctcggaatgatactcctatcggtttcggcgtctctcatagacatcgtatttccgaaattccaggaatacgcgataaaccactacataggcgagggtacgcttgacaccatccgcaccttcaccgtactctacaccgcgctgcttctcataaagattgcaatggacctcggaagcacgtatctcggaaaccgcgttgagatgtacatgggacgcgacctcaagcagaagtccttcgaccatctccagaccctttcgttctcgtacttcaaccagaacagcgtcggttacatccactcaagagtaatgagcgacaccggcagaatcggttctcttgtatcgtggtcattcctcgactgcctctggaacggctcgtacatgataggcgcgcttatcgtaatgttcaaaacaaacgtaaagctgacgctcatcgtacttgcgctcgttccgcttgttacagtcgttgtatctctcatgcagaacaagctgaccttggctaaccgcaggattagagaaacaaactcccgcatcacgggtacgttcaacgaaggaatcacgggtgctaaaacaataaagacactcgttaccgaagacaagatgtacaccgaattcaaggaacagaccgcatccatgaagaaagtctccgtgaatgagtcccgataccgcggaattctctggtcaacgctgaactttgcgtcatacattgcgcttgctcttgtcttaaagctcggtggaaacctcacaaaggaaggcattatggcggtcggtactctgtcgctgttcatgtcttactcaatgggcatcatggctccgatacgctggattatcaactccatctcgcagctcatcatgattcaggtaaacatcgagcgtctcacaaaccttatcgaaaccaaatctgacgtagcggactctcccgaagtcatcgcaaaatacggagatatgttcgagccgaagcgtgaaaactgggaggacatcaagggagacatcgaatttgaagacgtttccttcaagtaccccgacggcgacgagtacatccttgagcatttcaatctgaaaatacctcacggaacaaacgtcgctatcgtaggggagaccggcgcgggcaaatccacacttgtaaacctcgtatgccgcttctttgagccgacgtcgggcagacttctcatcgacggacgcgacgcaagggaaagatcgcagctctggcttcactcgaacatcggatatgtgctccagacaccgcatctgttctccggcactatcagagacaacctcaaatacggctcaccgaacgcaacggacgaagagataatggcggcgctgaaaatagtttccgctgacggaatagtcgcaaagagcgaaaaaggacttgacacggaagtcggcgaaggaggagatcttctctcaaccggcgaaaagcagcttatctcgttcgcgcgtgcagttctcagcgacccgaaaatacttgtccttgacgaagctacgtcttccatcgacacgttcaccgaacagctgattcagaacgcgcttgacaccgttatcaaaggcagaacctcatttatgattgcacaccgcctgtcgaccgtcagaaacgcggacattattctcgttgttcgcgacggcaagatagttgaatccggcacccacaaggagcttctcgataagaagggatattactattccctctacacccgccagtacgaaatggaagccacggacgccgccttcaaaacgcttaacgcataatcaaaagctacaaaatcactcgttcatttttggatgggtgattttttgttttactgttgacaattgtcacggtgtatgatatagtatctgtgtagaataaatctttattgtggttttatctgattttcggcacaaataagtaagcaaatacggacaattttattcgggaggtttattatgtcaaagaaaatcatggcggctatccttacgggactcatgctattcaccactgtaagctgcacaagcgaaaaaaacggcacgacggacgaaacggctgtggaaaagcagaacgagaatactccgcagatgctgacgaatgtattcaaaggaaacaacatcaccttgcccgaggaatacagagtaattgagggcgcgtctccgtactacgacaaggacagcggagagattacactcttatgtgtgaaagatgattatctctacgacgacgacgggaactatgtctcaagcaactatgcgtacaaaacctgcaaatacgataaaaatttaaacttaattgaggaaaaagacgtagaactgttcggagacgaccatgaaacctatacgagcaactgtgtgatcctcggtgacagaatagtctgcggagtaaggaaatccacagacggtcaaagctcttatacaatcacgatatatgacatggcaagcggagaaagcaaaacctcagagtcgatagtcggcttatttgacacagcggaagagggcggctggttctatgtcaacagtatctgcgttaacggggagggcgacatatacataggctccgatagcgagattcttgtactgagcgacagctttgtcaaaaagtttacggtatcagtagacagatgggtaaccacaatgtcgtcgtctcccgctggggatgtttatgtcatgtcgtactttgacgaaggaagcggcatagcgaaaatcaatcccgagacaaaatcctttgacgacccgatatatcccggagacaacactcgtcagcttatgttcggcgacggctatgacctgtatgttgagctggaggacggtatctatggatgcaccttcacggaggacggcgtggacagcgttatgctcatgaactacacaaactccgacataagccgaagcagcttcaccgcgatagctatgcttaacaaggacactcttatcgcaagcgaccgcagctccactgacagagaggagcgacttaaggtattccaaaaagtgccggacattgacctgtctaacatcagaacagtcgaaatcgtatcaactgaaggcttagactactataccacgataggcatagtgcagtacaacaaggctcactcggacacaagactgctcttcacggattactcaaagtacgcgacggatgaaaactacaacgccggacgtgaaaagctgataaatgatatcttgatgggactgtacaaacccgacattatcctcacggacacctacagcgctgtagcggaaaacgtaataaagaacaatatcttcatggatatcggcactcttatcgacaacgacgcaggcatgaaacgtgacgacattctcggtgctgtcatacgcgcgtgctcgacctcggacggacagctttggggacttccctcaggctacagcgtcgaaactcttgtaggaaaaacagaaacgctcggcggcagaacatcatggacattcagcgagatgttagacttcgcgaaaactctgcccgagggaacaacgctcatgcagggactttcacagcaaagcgtattttatcagttagacggtcttttcacgcagttcatcgacctcgaaaaccacacctgcgactttgaaaaccagaatttctacgacacgctgaactatatcgcttcccttcccgctgaatatgactactcggcggacagaaatcgcgacaaccgctacgagaagttccagaacggacaaatcgcgctgtattcgatgtggatgcatgacgccgcgtccatccttgagcctgagtgcgtattcaacacaaaggactacacgttcatcggctatcccacatacggcgaaaactcacgcggcggcaatgtaacctgctcgaatgtgtttgttgtaacgaatttctgcaaaaataccgatatagcgtgggatttcataaagtctgtagtagctcccgatgacgacggtaattcaataagatacggcggaggtgatatgccgatactgcgcgaaagcctcagaaaagtatgcgaagaattctacgactatgaattcgagttctactacagcggcggcggcggatacggtcccggtgaccccgacaatccgcgcacacaggacgacttggacgaacccggaattctgactcacttcactccagagcacacggaaagactgataaactatatcgacaacgactgcggctctcccattacggaagcaatacctgccgagctgcaaagcattatcacggaagaaataacctcattcacaggaggagcgagaactgccgaggaatgcgcgaaggttattcagtcgagagcaaaaatatggctggctgaacacgaataaacttacacatccccatctgacaacggaccaagcgaggactcagtatgtttaaaaaagcaatcgcatatgtcatggcggctcttctctgctttacgggatgctccgcttcacaggacgctgacgagagcgaaaccacatctgtcgaagaagaatatgtacgcccgaccaagctgaccgaacgcttcacctgtgctcctattgaatctccgagcggatttacgcctgcggtagactcatacccgtattacgacaaggacagcggggagattacggttctgtttaacaaaagcgagccgagcgattccgacgacggcaagtacaatatttcctacaaattgtgcaggtacgacagcaacaacaatttgattttcgtgcgcgaccttgacctctgtggagacgacagtatgtatgcggcaaactccgttattctcgccgaccgcattgtatatctctgtgcggaaagcaaaggagacggaagactctcgtactgcctgaaaagctgcggacttgacggcggggatgaaaaaaactccgcaaaaattgacgggctttttgacacatactctgactacggcgggttctacataagctatatgtgcgtctcctccgacggtagtatattcctcggaacggacaccgaagttctcgcgctgagctacgattttataaagaaattctccgtcaccacgtacaactacatcacggcaatgtcgctctcgaacacaggggaggtgtacatcgcatcgttctttgaaaacggaagcggcattgccaaggttgacgaggaaacaaaagctctctccgacccgatatacccgggggacaaggtgagacagatattcttcggcgacggatacgacctatacctcacgcaggacgatggattctacgggtgtactgtcacggaaaacggatgcgaggtggaaatgctcatgaactacacaagctccgacagcaccgcggactccttcaccatagtttccgttatcgacaaggacacggttttcggatatgaatacggctccgactcatacattccgacctgcgggatatacaaaaaggctcaggatgttgatttgtcaacaataaccgttctcgaaatcgcggctcctgagggcataggacgctcaacttcggcaaaaatcgtagcgtacaacaaggctcacagcgatacgaggatagtaataaacgactactcgcgctattctacagacgaaaattataacggaggcattgacaggctcatcacggacatggtgacgggacagtacaagcccgacataattataggcggaatgtacagcagtctcaccgacagtattatcgcgcagggactgttcgcagatatgtaccctctcattgacgaggatgacgagataagccgcgacgacattctcggtggaatactgcgcaccttcacgacctccgacggacagctttggggactgacttcaagctactacctcgacacgttagtcggacggagcgatactcttgacggcagaacctcatggacgcttaaagagatgatggacttcgccaaagctctgcctgaggggtcaagcctgacaagagcgttaactcagtggagcgtcactacacggttcaagggtatgttcaatcagttcatcgacatggaaaaccacacctgcgattttgaaaacgaggaattcatcgaaatactgaacttcatctcttccctgccaaaggattatgactacaaggctgacaaaaacgctgacaatgtctacgagaagtaccaaaacggcacgatttctttatacaatctctacatccgcgcgctgaatttgtttaccatgctcaaattcgctctcgacaccgaggactacacgctcataggatatcctacatatggcgaatacacaagcagcggaagattatcgttcaacaatcagtttgtcataacgaaattctgcgaaaacaaagctctcgcgtgggactttgttaaatccgcagtcgcgccgaagatgaattacagtcaaaaattaacaaacgacgacctgccgataacgcgcggaagctttaacaagctctgcaaggtcatgtacggctacgagtttgaatactactacggcggcggagtctattatcaccccgcagatcccaaaaatccgctcacctcggaagctcttaaaactcccggagaagtgcttcgttttaccgagcgcgacgcagagatactgcttgactacctcgacaacgaatgcggctctgcggtatcggaatccatcccgtatgaggtatcaagcataataaacgaggagataagcacgttcttaggcggtgcaaaaactgccgaggaatgcgcgaagattattcagtcgagagtaagcatacttctctctgagatatcataatgactttttaatcaaattctcatgaaacatgactttattaaattacttcggtgtgctataatacttacactgattaattatctcacggaggaaataatgcgaaagagaatttttgctcttgtcttagccatgctcatgctgacctcagccgcgtcatgcacaaaggacaacacatctgaccccgcagacactaacgtcacaagcacaacggacggtgaagctgtcgagaaaatcaaggttctgacaggagtttacaccgaaaaggctgttgatgtaccggaaggttttaacgctgtcggaaatatgacgccatcttatgacaaggaaacaggagagatgcgcctgcttgtctcaaagttcgacgaccagaccgacaaagaaggcaactacgtcacctcaaaatacatatacaagctcataacctacgataaggacatgaatatcacagcaaacaaggatcttgtcattcccgacagtgaaatgtcgtacattaatcaagctgtgatatccggcgacatgctttattatctttcgaacgaatacacggacaacgccgcaacatactatatctgcaagtataatctgacgacggacgagatcacaaaatccgatgagttaaacggtctgttcaacatagaaaaccccgaatggttctatttacagggtatctcggtaactcctgcgggagacgtttaccttgcttcggacggagaaattgttgtgcttaactccgacttcatcaaaaaaacttctattcagataacaaactggataaactcgatgtcatgctcacccgacggcgacgtttatatttcatcatattttgacgacggaatgggtatcgctaaggttgacactgagaaaggcgcgctcggaactccgataaccgtaggcaacgaagcgaacgacatattctttggagaaggctatgaccttttcatcggaaagagcgacggcgtttacggatgcacctttgccgaggacggtactctcacacaggagatgctgctgaactactctaattctgatatcaacagaggcaacttcaatcttttgtcagtgctcgacaaggataccatcatcggaaatgactactcattagaatccggcaatatggttattctccgaaagagcgccgatatcgacctctcttccgtcaaggttgtggaaatagcgacatccgaattcacaggctacaatgtcgcgtcaagcttagtcgactacaataaaactcacaaggactcccgaatagtgctcagcgactacactaagtacaacacggacgaggactatactgccggaaagactaagctgatgaacgatgtctccgcgggtctgtacaagccggacattataatcggcagctattacagcggcgtggcgtctgactttgtcaagaagggtatgttcgtcgacctcggaacgttccttgactcagacgcagagctgaaaaaggacgatattttcggcagcgttatccgcgcgttctctacctccgacggaaagatatggggacttacgcctgacattagtctccagactcttgttgcgagaaccgacacgctgggcggcaagacttcatggacgcttgacgaaatgatagactacgcaaacgcacttcccgccggaactcagctgcttgagggtctgtcgcagggaagcatactctcctcattccagaacgttttcaacacatacattgatatgcagaacaacacctgcgattttgaaaacgagtcgttctacaagttccttaacttcatatccaccctgccgaaggagtacaattacgaggaaagaggcgacaactactacgaggtgtatcaaacaggaaaaatcgcactctatcccgcatacatttcctcacccccgaacattaccgagcttcagtgcgttttcaactcaaaagactacacactgataggatatccgaccacaggagacaacacttacggcggtctcatcacatatgacacggcttacatgatagcaagctgctgcgaaaacacggacattgcatgggacttcatcaaatctacgataaccccaaagggcgaaagatattcaaacaatcttccgatactgaagtcttccatgaaagcgcagtgcgagacatactacgactacgaatttgagtattatttcagcggcggcgcttcgtggggaccgatggatcccgacaatcccacaacacaggaagacatgaccgaacccggaattctcgcgcacttcaccaaggaagacactgactttatcatgaactacctcgaaaacggctgtggctcccccatgacggacaccatcccgacggaagtgacaaacataatcacggaagagataacatcattctcgggcggtgcaaaaactgctgaggactgcgcgagggtaattcagtcccgtgtaaagatatggcttttggaacacgaataaaatttccatattcacccatatagcatatacgaataaatcatacccgttttggatataacattagcggatgaagttttcgtacagtcgaagttatctgactgtacaaccgagctttatccgctgatttattttatcaggcaggtatgagaaatggatggaaatcacgatttttaccgtatcgacgacgctatgagagatctgccgctcggtctcggaatggcgttcatgcaaaacttttcggcttttgaaagattccgcgagctttccgaatacgagagaagcagatttatcagcggagtacgcgacgttaagacaagagaagaaatgcgcgactatgttctttctctgaacgaccgcaaagagtaaaaactccgtctgtgtagattattctcttgattttgccgctgtttcggactataattgtattataccgaaataacaaagccggagaaaatcaatgcagaatcttgaaattgaaagaaaatatcttatcgttttaccggatgaagagttcttaaaatcgcgcgaaggatgtgtcgtgaagcatattactcagacgtatcttctgcgtcacgagaatgatgtcgagcgaaggataagaaagatagaggacggaaaaaatactttctacgtctacaccgaaaaacgcccgaaaagctccaccacaaggcttgaggacgagcgggatataacagaggacgaatacaatgagctgatgaaggaaagatattcttatctcacaaagacaaggtacgctttcccgtattccgctcatactatcgaaatcgacgtttatccatacgaaatcggaggagacgcattagtcggacgcgcagtcatggaagtcgaactgaaggatgaaaacgagatgattgactttccgagcggcattactgtcatacgtgagcttacgggaacacgtgagttctccaacaagactttggctaagcgagtgggacagtctgactaaatcagattcttactcaaaaaaaacagcgccgtgcatcggtctttccctcgattgaaggagctttaccgatgtatgagcgctgtttttcgttttgattaaaatgaagcgagagactctaccgcgctgtcaaaggttccctctcccatggagtttgcctttgatatcagcttaatattcatgtcaagcgcacgccttttcagcttcaatacggatttaggcgaggtcgttcttgtgttctgcgcggcagagttttcgtcgaaaaatgtagttgacagaagcaccgcctttgtgtagctgctgccgaattcctccgagactgtgccgagcttgtagagttcctccgtcttaatatctccgtttttgcatgagataaatatggggcagactccgcacatgagcatacagtctatttcgttctgtgtgccgttgaagccgccgttttcgtcatcccatccgatggtaatgcccgtctcgacactgcaaaacgctcggtcctcttcatgcttagcacggattccggcaaggtaggttctgtattcgagtatcgttcccgatttgttcaggcattcctcaactattttgttcttgtatctgaagaaatagcttccgcgccgcgacatttcctcgttaattataacgaatccgcacgcgacaagcgctttccacagctttttgtcaacggaatttttcgcgctcgagcctattatgtcctttgatatcgttcttatctcactttccccatatctgctcgtttctgaggaaagcctgccgatttttgcgttccatcctgcggggtcagccttgcacagcttccacagcgactcgatatcgaacacttcgggagcgtccgcgtcaaattttattccccttgagcagacaacgccgccgtggagaatgatgttctcttcgcaggtgaggtagacctcggtattgtacgagaagtcgaacacgaatttttccgcgccgtcttccccaccgaaacggaaaagaattcctctgcggctcaccggactgatacggaacgcgaacaggtttctgccgtttttcctgccgagcgtcatgcccactgccgtcaaaataacgctgtctccgccggaaatatcgactacgtagttctcgttttcgtcggacagtatgccctcaagcactccgcatatgtcgtcaaggtcgtttcttgaagctctcacggcgtccatttcgcattgaagccctctgcctgagagtatttttttgtatcgcggaatttcacgccatactttttttgtatctggagcgacaaatattgttttctgcggtttgagcgcgagcgtggatatgaagttttctatcggtgaacccgagaatatttcaatcagtgtcatactccgcctccctcatgtcgttctactataattttatcagatttgcaggatattttctgtacttttatattaatttttcataataaaaatatgcaccccatttttagtgaagtgcatactttttttcagttatttgtgtttctgagatatctctctattctcgacgagagcatcatgagcgccactttgttttctccgccttcgggaattacaatgtcagcgagctttcgcgtcggctctacgtatttctcgtgcatcggcttgacagttgtaatatactgcgtgactaccgattcaagcgagcgtcctctttcgcgggtgtctctcagtattcttctgataaggcgaacatccgcatctgtgtcaacgaaaatcttctcgtcaaacatatccacaagtctcgggtcggcgaaaatcagtattccctcaacgatgataacgcggttcggctctatcctgtgtgtctcgcggcttctgttgtggtcggcgtaatcgtaaatgggacagtcgacggcttctccggctttcagctttttcatgtgctcgataagcaaatcattgtcaaaagcctcgggaatgtcgtagttgagcttgcatctctctgagaatggcatattgtcgtgagctttgtagtagtcgtcgtggcgtatcacggtaacatcgggtgaaaattcagcggcaagagtatcggtaagcgtagtttttccgctccctgttcctcccgcaattccgatagtaagcatatcaaaaacctttcgttatcttctcgacttatcataaggaattccctctgcttttggtgcgcgggacttctttgacgtaaacgcaagcactatcatcgtaacgatatacggcgacattttatagaatgcgttgtttattccgagagagtttaggaacgggataagcggaacggaatacgctatggttctgagtaatgcaaacagaagtgccgcgagagctatcttcaccggcttccactgaccgaaaatcataacggcaagcgcaaggaatccgaatcccgccacacccgtatgaccgttgcagtttccgtccgttactccgacagcgtagaaaaatccgccgataccgccgaggaatcccgatatcgtaacgcccgcccatctcatcttctctacattgataccgactgaatcggcggcagagggatgttcaccgcaggcacgaagtctcaagccgaatcttgtcttatagaacaccacgacagccacggcaagcaaaacgagtccgatatacactgttatataagtgtttttgaagaataaatctcctataacggggattttcgacagtcccggaacttcacggacgtagaagaacacgcttgttgtaacaccgtccgagccgagcttcatcttagcgaagagaagtatagccgcgggaatgagcatattcattgccgttccgactatggtttgatccgccttcatatttatcgccgcaaacgcaagcatgaaggaatatattatacccgccgcagccgccactatcattgcaagaatgagcatgagctgtgcgttcattccgcttccttcgataaggtaaacaaacacgcatccgaggaaagctcccgtcagcattataccttcaagaccgatgttgataacgcccgaacgttccgagaacatacctccgagagcaacgagcaaaagaggtatcgcgacgggaagcgttccctgaatcaggtaataaatggtttccattacttatcctctcctttcgtttctccgctctttttcatctttccgaagagctttgcaattgacgcgctgattattccggagaacgccgagaagtagattatgaccgctataacgacgtcgattatctccggcttatatccgtaaaggctcgccattgttcctccgcgctgaataaggctgataaacaccgccgagaatacaattccgatggggtttgacgcgccgagaagtgcgacagcgataccgttgaagccgtttgccgctatgaccgagataggctcgtacgtcatggagcttcccgcaatagtggacggcgcgagaatggcaaacgcacctccgagacccgcaagcatacccgcgagagacattgttagcatgatgttgcgcttgctcttcattccggcgtactctgcggcgtccttgttaaagcctgtcgcgcgaagctcatagccgaatgtggttttgttcagcacaatgtagagtatcacagccgctatgaccgcgaagaatattgcaatattgaggtttgaattcttcactccgagagacggaagctgagccgaatcggggagatatttggttctcgtcttgccggactcatagagaagcgcgttctgcattatgagcatatcgacaaggtacattcctatgtagttgaacatgatggaagtgatgacctcgttcacgttgagcagcgccttgaatatgccgggaatgaagccccagatgaatcctccgacagcacccgcgagaacgcagaacacccagcgtattccctcaattcccgccggaagaggcacgcatagtcccatgtacagcgcgaagaacattcccattgtgtactgtcccgacgcgccgatgttgaacagacccattttgaaggcgaatccgacagcaagaccagtcatcataatcggaattgagtagtagaacacgtctccgagctttttaaagcctcccgtgataatagtaagaataccgggagcagcggacgccggacttgccgcgagcattacgaaaaatccgaaaataagtcctatcactatagcaaggcaggcggcgcggaatgctttgaatccgtctgagcggacaagctttgataatttaccgttattcatttcgtccacctcacatatttctctttgcgcccgacatataaagtccaagctcttctaccgataccttcttcgggtcaagctcaccgactatctcaccgccgtggattacgagaattctgtcggatacgtccatgacctcgtcaagctcgagcgacacaagaagaaccgctcttcccgcatctctgtccgctacgattcttttgtggatatattctatcgcaccgacgtcaagaccgcgagtaggctgaaccgcaatgagaagctcgtgttccttgtctatctcgcgagctacaatcgccttctgctggtttccgccgctcatctgccttacaacggtaagagagccttgtccgcatcttacgtcgtattccttaataagctcgtcggagtattcgcgtacttccctgcgctttatgaatccgtggttttggaacttcggttcgaggtatctcttcagcaccatgttttcttcgagggtgtagtcgagtacaagtccgtgcttgtgtctgtcctcggggatgtggctcatctcacccttgtggcgctgtcttaccttcgcgttcataaagtcgtttccgcacagctctatctttccgcccgcggctttttcaagtcccgtcagcgcatagataagctccgtctgtccgttcccgtcgattccggcaatacagcatatctcgcccgcgcgtacatcgaacgacacatttttcactgcctcgcgcttgcttattcttgacattacggtgaggttcttcacactgagcacaacgtctccaacctcggcaggctttttgtcaacggagaagctgatatcgcgtccgaccatcattcttgacagctcttcttttgtagtgcctttagtctcaaccgtgccgatgcatttgcccttgcgaagaaccgtgcatctgtcagcgacctgcattatctcgtcgagcttgtgcgtgataaagagaattgattttccctctttcgcgaagcctttcatgatagccataagctcgtcgatttcctgcggagtaagaacggcagtcggctcgtcgaaaatgaggatgtcgttctcgcggtacagcatcttcaaaatctcaactctctgctgcatacctacggaaacatcttcgataacggcgtccgggtctaccataagtccgtatttgtccgacagcgcgacgattttttcccttgccgcggctttatcgagaaatccgtttttgagcggttctacgccgagcatgatgttttcaagcaccgtgaatatctcgacaagtttaaaatgctgatgcaccattccgataccgagtgcgtttgcgtcgttggggttatttattttgataggctttccgtctttacgaatctcaccgccgtccggctgataaagtccgaagagtacgctcatcagagttgattttcccgctccgttttctccgagaagcgcgtgtatctctccccgtttcagctgcaatgtgatgtcatcgttagcgcgtattccgggaaaatcctttgtaatgtggagcatttctataacatagtcttccatagtctttgttaaaaccgctcctttccgtcatatcgtgtgtttttcaagctctcctccgatgtttgaattatttattattcctgacatttttcgagcttctttatgtaaaaagagggagaagcagttatttgcccctccctccgcgataccgttcatgcgttaaacgaggtatcatttgtacattattctgttatagtttctcagaatcagaagtctcgaattaatttatcttaccgttacgttaacctttgtgagtccgagtccggatacgagctcgtctgctgtagcgataccggtatcagccgcaactgtgattgtgcggacaggatcaactgagccgtcaacgagagtagcgtaaaccttgtcgtagtcttccttagtgaactttgcgaagcggtcgaaagcattgtcggaagaaccgtcgagaacctcagtgggaagacctacaccgttgttagctgcggtgaagtatgttgtctttccgccgtatgtggactcaaaagtaccgtcgtagatggaagtaagaactgtaactacagagttgccgaggccctttgtagcggatgtgataactgtgtcgctgtcatatctctggtcaacgtcaacgccgataacctttgca

SEQ ID NO: 2842 - DNA, 32759 bp, Unknown
  16S sequences of unknown bacteria
cccggaacgggctcgaaccgtcgacctctagcgtgacaggctagcgttctaaccagctgaactaccgggccacatacataagacgtggtggaaacaacagggctcgaacctgtgaccccctgcttgtaaggcaggtgctctaccagctgagctatgcttccatgagcgccgccctcaccagcgacgctgtatataatacaccatacccgtgggattgtcaaccggtttgcggcaatttttttcagcacgaactgcccttttcgctctgttcggcaagcgcttccagttcggccggcgtaaaccgatataccgcgtcacaaaagtggcagacggcctctgtcctcccttgttcatccggcagggaacgaagctgttcgggcgacagcgccgcaaaagcacgcagtacccgttcccgtgagcaggtgcagcgataagcaggctcccgggtatccagaacatcgaaatcaaaccccgcaagggccttcctcagaatctcctcgggtgtcatccccttatcgagcatggccgtcatcggttcgagtgccgcgacattccgttcaagccgggtaatcacgtcctccgggcagaaagggagcagctgcagcaggaacccccccgccgcccttacggtcaggtcgggattcaccaacacccccagcgcgcagaccgtcgggatttgctcgctcgtcgcgtaatagctcgtcacatcctcggcaatctcgccgcagataagcggggtgcagcccacatacggttcgctgccgccggtgtcccgcagcacgtagagcaggccgtccttcccgaccgcgcctccgacgttcagcttgccgtccggccgcagcgggatttcgaccaccggattggccgcgtatccgcgcacgtttcccgcgctgtcggataccgcgacgatctgccccgccgggccgcctccgtccacacgaagcgtcaccgtatcgtcccggcccttgagctgaaagcccatcagggaggcggcagtgaggagccggccgagagccgccgtgaccacagcggaggttttatggatctgctctgcgcgggccacgatatcggtcgcgtcgagtgccaacgccacgacggtcccatccgttgtcaggcagcgtaccagttttcccattctgttccaatccccttttgacttcccctatcctctgatccgccggtttttcccggcatattgccaatgtatgcacaagggcttatttggtgcccgtcccgcgccgcgcttcttccagtgtccgggtattgcggaccacgaaaaccagccgttccgcctccgggcccggcgtcagaaaggaacggtccccataaaccgccagggtttcgaacccttcctcctccagcagacgccgcagagtcgtcccggcgtatgcgcgttcccggacctcgtcggtcagacggtcgtaccgcccctccccggccggcacaaaaaaatccagcgtcatcgccacttcgcaggtgcgggggatatagcggttcctccacacgcagacgacgtcctcgtcctccaatacaaacgcattgtctccgagcaccacccgatgcttgtagggggtattcacgtcgaagacgaacagcccccccggctccaaaaacaggcgcagacggcgcagaaccgcccggatatcggcggtgcggagcagatgattgaggctgtcgagcacgcagaccgccccttccaccgtcccgtacaggtcgaggcagcgcatatcctgccggagaaaaaggagagaacgccccgcccgggcggccttctccccagccagcgccagcatgtcctccgagccgtccaccccgatgacttcggcgtctgccgccaattcgagagacagcgagcccgagccgcaggcgagatccagcagcgtccgggggacggcgccctgatggcggaggaagatctcccgcagataggcggccagacctgcataatccacatcgccggtcagccggtcataaaacgcggcaaaagcggcatattcgttggcagccatagcggtccgccccttccggtcaaatgggagcatccggcagcgccgtcagccctcgtccttcttgtcctccatccgggaaaacaccatgtcgtaggcatcgcagccatagatcagggagcggttgacccggctgatcgtggcggtagaagcgcccgtcgccgccacgatgtcgctatacacccgcttgtcgctgagcatcttggccacgacgatgcgctgagacatggccttgatctccgaaaccgtgcagagatcctcgaaaaactggtaacattcctccagattcttcaaccggaggattgcctcaaacagaaaatcggtgttttcatccttgattttggaattcatgggtaagccccctccacaagcgatatgcgtatagtttagcacactacagcgtgaaaataaagagggaaaggcaaaataatcggggaaaaggtgcggaacttccgagggtccgccgcgcccctgagacaatcgtcttgacaaaaccggaaaaatatggtatgctgaattaagaacatatgttctatatcttgataaagaggtcaacagtggaagaaaaaagaaacaggatcagatggccgcactgatgaacgctatttttgctgaaagtatgagaggataccgcttacagccaaagctggggataagccggaagtacaagttccgtgacgcgatggtggatgagaggatttgtgaaccctgttttgatgcatacggaagggtttttccggcggaaaccgcgcccaccacgcaggaaatccggcggagatcccatccgttctgccgttgccgcatcgaatggctgcgcagcatccaggccggtacggcaacggtcagcggggacaacggcgcggattacgcggtgaagcagacagggcatttaccggaacgttatttgagcaaggaaaaagctatagaaaaaggttggataaatcaaagaggaaacttgtgggagattttaccaggtatatctctatatgaagaacataaaaaccgtaagaaaaaactcccgaccaaacaagggcggacttggtacgaggccgatattaactatcatggaggatatcgaaatacacagcgcttgctattttcagatgacggcttaatctttgttacgtacgatcactaccaaacgtattttgaaattatctaggaggaattatagaatggaaaacgccgcgtttcacgcaacatatatatattcaattgatttttcagcggttaaccattttcgagagctgtataaacgtatttatgacggatttcatctatccggtatgggagagaatctggatgctttatgggatgttttgacaggatttatcgattggccgtgtgagatccgtctgtccggcatatcgtccctctccaagcagcggcgggcggagctgcaaaaaatcctcgatgtgatggccgaggcggaacaaaaatatccccggtatatacgcatcactcatgacgattgattctaccgcctattccttccgaatcctgtccaacatggtggatggagaaacatcatggaaataaaaaccgctgacggaacatacatatatacgatcgattttacgcctgtccgacactatcgtgatttatattcgtgtataaacgaaggatttgagttaaccggacgtgtcggcgaaaaccgagacgcgttatgggactgcctgaccggatttatcgactggccgtgtgagatccgtctgtccggcatatcgtccctttccaagcagcggcgggcggagctgcaaaaaatcctcgatgtgtttacgaacgctgaaaaagcgtatccggataccattcatattgtttatgtcgattgaagggccatagaaaacggatccggtgtaagcgcgtacctgcctttcgcgcttacaccggattttctcagccctttatcgctttatggaacacctttttgccctttttcaggataatctggcccttctcaaaatcggatgcgggcacggcggcggcgatgtcttccaccttttcgccgtcgacggacacgccgccctgctggatcaggcggcgggcctcgcccctggagggcgcgaggccggtgcgcaccagcagctcgatcaccgggatcgcgccgtccgtgaaggcgtccgccggcagggtggtcgagggcatattgtcgctgtcccctcctccgccgaagagagcgcgggcggcttcgagggccttatcggcctccgcccgtccatggacgagcgccgtcagttcatgggccaggcgctccttgttccggttgatatcgccggcccgttccatttcctcgatctccccgaccgaaaggaaggtgagcatccgcaggcacttgcccacgtccgcgtcgtcgatgttccgccagtactggaaaaactcgtaaggcggggtcttgtcgggatccagccagacggcgcccttttcggttttgcccatctttttgccctcggaggtggtcagcagggcaaaggtcatgccgtatacctcttttccggccttgcgccggcagagctcgacaccgcctaagatgttgctccactggtcgtcgccgccgagctccagggtacagccgtattgctggttcagatagaagaaatcgtagctctgcatcagcatataattgaattccatgaaggacaggccccgttccaggcgctgcttgaagcattcgaaggtcagcatccggttaaccgaaaaatgcactccgacctcccgcaggaaatcgatgtagttgaggttcagcagccagtcggcgttgttgaccatcagggcctttccctcggaaaaatccacgaaccgggacatctgctttttaaagcaatcgacatggtactggatggtctcgggggtcatcatcttgcgcatgtcgcttttgccggtggggtcaccgatcatgccggtgccgccgccgagcagggcgaccgggcgatggccggccttctgcatatgggccatgaccatcaattggacaaaatgccccacgtgcaggctgtccgcggtcgggtcgaagccgatataaaaggtcaccggctccttcccgcccagcagttcccgcgttttttccgcgttggtggtctgggcgatcatgccgcgggcgttcagttcatcaaatacgtttacacccatcttgtcgttcctccttgtttgcttccatatgtccgcaggggaaaacaaaaacgccccctgcatcgtctgcagagggcggaaaaatccgcggtaccacctcattcaccgttcccttgcgaaaacggccttacgggcgtcaaaaaacgtcccgcgctgtaacgtgcgcacacggcttccctactgggcggatccatccgcggtttcaggtcgcggctccgggatgtatttcgccctgcgcccagaccgtttcgcaccggccaacggctctctgtgctgcgcggcagcggctacttcttcccttcatcgcctgtgatgcccattaaagcacaatccgccccgtctgtcaagcccccggcttactccacccgcccgcgcatctcccgggcggcctcccggctggccggggtatcttccccgccgatgatccgggcgagctcctccacccggccgtcctcatccagcggccggacatcggtataggtccggccgtcccggaccgatttggcaatgaggagatgatgatgcgcctgagccgcgatctgcgcaagatgggtgacgcagaggacctgacggctgcgggattcatcggagccccgggccgtttcccgcagcttcacccctaccttccaggcagcgcggccgctgataccggtatcgatttcatcgaatacgagggtgtcgatgtcgtcggcgtcggccaggaccgacttgatggcgagcatcacgcgggacagctcgcccccggaggcgatcctcgcgatggagcgagggggttccccgggattggcggacatgaggaattccacctgatcggcgccgctggacgacaggggcgccggtacaatggacacctccatcgtcacatggggcatgtccaaaaaggcaagctgctccatgacgctcttcgaaaaccgctccgccgttttcttacgcgcgccggtcaggcgggcggcggcctcggcagcggcccgttccgccccggccagggcatgccggaggcgttcctgccgctcgtccgcgttctcgatgtcgtcgagttcccgccgtgcctgctccgcatacgccagcacgtcggggattcccggcccgtacttgcttgccaggcggcggatgaggtccagccgggcttcgacccggtccagttcggccgggtcgaattcgaggcgggacaggagatcccgcagctcgtccgcgcagtcctccagttcgtacagcgcggtttccacccgtttggacaggcccgccgccgcctccatataccgcccggctcccgatagcgacgacgcggccccctcgagacgggagagggcgcccaacgtgtcctcgtcccccgatagggcctcttttgccgccgccagcccttccgcgacggcctccgcatggcgatagaagcggcgggaggcctccagctcctcctcttcccccgccgtcagctccgccgcctcgatctcttcgatctgatagcggagcaggtcgatccggcgggccttcatcgtttcgtccatgtccgcctcgtcgagctcgcggcgcagggagcacagacgggaatacgcctcgcggtacgcctccagcagaggcgcgtggcctccgagccggtccaggtaggtcacatgccgttccggggacaggagggcctgattctcgtgctggccgtgtatgttgaccagccgccgccccacgtcccgcaggatggagaccgtcaccgggcggccgccgatgcggcaggtcccctttcctccggccgagatagtccgctggatgagcaggcatccgtcctcatccggttcgatgtcccattcccgcaaagcatccgccgccgcgggcgacagatcggaaaacaaggccgtcacccgggcctcgctgcttcctgtgcgcacgatatcccggctgacccgttcccccagcacggcgttgatcgcgtcgatcacgatggatttgcccgcgcccgtctcaccggtcaggatgttgaggccggcatcgaacgcgatatccgcccgctcgatcaccgcgatattctcaatgtacaggctttgcagcatcctacagaaccccttccggtcgttatccgccttttagcagctttttgagctcccccgtgagagaaacggcctgttcctcattcttggtgatgcagatgaaggtgtcctctccccccaatgtgccgaccacctgatcccaatgcatggaatccatcgccgcgcaggccgcctgcgccataccggacaggcacttgaccactacgagattgcccgcgtagtcgatatgcagcacggtatccgcaaacagggagtggaatttcgaggatatgttttcattttccagccgcaccgtcgagtagcggtaacggccgtccggacctaacgccttgatcaggcgcagctcctttatgtcccgggaaaccgtcgcctgggtgacgttatagccgtcctcccgcagcaggaggagcagatcctcctgcgtttccaccgatttctggtggatgatttccaggatcttggcatgccgtttggttttcatcgccatcactgcctttctgtcaacggttcatcagcttccggttgagcacctcgtaaaagggcctgcgccccagcatgatcaggcaggcctccgattcggcccgggagaggcgtacctcttcctccggcccgagcggcaccgcttcttccccgtccacggtcagatagatcggcgcgtccggctcccccgccgggcggacggcgagcaccgcgtcctcgtcgaacagataggagcgggaatggagggaatgggggcagaccggcgtcagcagcaggcagcgcagggccgggtcgatcaccggcccccctgccgacagggaataggcggtcgagccggtcggcgtggcgacgatcacgccgtccgcccggtagcgggccaccctctccccccggttggaaacctccagttcgatcatccgggacagggagccgcgggagaccaccgcttcgttgagggcgctgtaacgggtgcctcctccctctcccgtctgcacgacgatatcgagcagcatccgtttttccacggtatattccccccggatcaaggcggacagccgctcgagctcgtccgcctcaagccccgccatgaagccgaggcggccgccgttgatccccaggaccgcccggccgcaaatggccgcgcgtttagccgtatggataatggtgccgtccccgccgagcgccaccgtcacatcgctctcccggatgagcgcgtcggcgttcgggctgggaaaggcgtccccctccccgggcagaaggacttcggcccccagcttccgcagggcggcacagacgcgggggagcgcctcacgcacccccgacgcgcgcgggttgggcagcacggctatccgcatacgggttccatcctttcctgttggtctatcgaggtgaaaacgcggcgaaagcgtcttttacgagcccctgcgtgtccgggcacaggggcgggccgtcgcagggaggtgcggtcagtaccgccaggtattcgatattcccctccccacccgttacaggggaaaaagacagccagtcgaggcgcagtccctccccagcaaaaaacgccagcatgtcgtcgaggacgcggcggtggatccggggatccttgaccacgccgttcttccccactgcctgccgcccggcctcgaactggggcttgatgagcaccacaagccgcgcggatggggcgagatagggcaaaacggcgggaagtaccgccttttccgatataaacgaaacgtccgccgtcaccaattggaccgtcccggcgggaaccgcggctgcgagctccctcgaccgcgcgtcggtcccctcgaggcagatcacccggggatcttcgcgcagggaggcgtggagctgtccatgccccacgtccacggcatacacccggacggcgccgttttgcagcatacagtcggtgaagccgccggtggacgcgccgatatccagcgccgtcagcccggcaagtgcaagaggcgcttcccgtaccgctttctccaatttgaggccaccccggcccacgtaagggcatccgccttcacaaataaggacagccccggcattcacaagggtggagggcttggtttccggccggccgtccacccggacgtggccggcgcggatctgttccttcgcccgttcccggccggaggcgagcccccgctccaccagcagcgcgtccaggcgcttacgcgggctgttcatggccttccgcctcccgcacggcctcgatcatgccgtccacatccaaacccgtccggcggaagccggccgagacgctgcaggcgggtaaaaacccatcgatagctttcaggcggaactcaccccggaatcccgactccagcagccggctttgcagatgctggccgatcccgccctgacggcttccctcctcgaaaaagaatacccagtcgtattccgccgcgatggccacgcattcctccggcagaggccagatacgggtcagcttgagcagggagaccggcatgccctcctccgaaagctcccgcgcggcgataagagcataggaaaacaggcgcccgtacgtcatcagcaggatccgggctttcccatttttcagatgggtgtatggcttataatccggctggaatccttcacatccgggcagctctccgcctttcggataccgcacgacggcgatgccggccgcatcatacagggcctgcttcaggctgatgtcgagctccgcgaaggtggaagggctgtagatcgtcacgtgggggatcgtggtcaggaagggcacgtcgaaaaccccctgatgggtttcgccgtcgtccggcacgatcccggcccggtccacggccaggacgatgtggttgttcatgatggatgtatcgttgaggatctggtcatagcagcgctgcagaaaggtggagtagacggcgaaaaccggcagcatcccgccggtggccagcccggaggcaaaggtaacggcgtgctcctccgcgatccccacatcgaaaaaacggaccgggaaccgctcagcgaatttcgtcaggcaggtgccgctcttcatggcggcggtgatggcacagatgcgcagatcctcctgcgccaggcggcacaggccgtccgccatcgtcgaggagaaggatttggaggagggcggcgtcttcccggtttcgatatcgaaccccgagaccccgtgataggtatcgggattctgtgcggcgaagccgtacccttttcccttgaccgtctcgacatgcagaagaaccggacggctgaggttcttcgcggtctgaagagaagccgtcaggtcatggagattgtgcccgtccaccgggcctaagtaatagaaccccatctcctcgaacagggtactgctgtggtacatggcgtttttgagccgggatttgacccagacgatgaaacgctggatcgctttgccgatcagcggaatatgggcgattaggctgctgatccccatcttgaaccgcacataccggggacgggaacgcagcgtggccagatggcgcgcaacgaatcccacgtttttgctgatggacatccggttgtcgtttaacaccacgatgagccggtcggagcttcgtcccgcgttgctcagcccttcataggccagtccaccggtcagagcgccgtcccccagcacggccaccacatagccgccgtccccggacagggtcttcgccttggccatgccgttcgccgccgagacggcggtgctgctgtggccggcgatgaaggtgtcatattcgctttcctcgggcttggggaacccggaaatcccaccggtctgccggagggtatcgaaccggccatagcggccggtcagcagcttatgagtatagcactgatgccccacatcccagacgatccggtcgcggggggtgtcgaacattttatgcagcgcgaccgtcagctccaccaccccgaggttggaggagagatgtccgcctgtcttggaaaccgtctgcaccagggtcttgcgcagggacgcgcacagctcctcgagctcggcgggcgtcatcttccgtatatcctcgggcgaatgtatctgctcaagcgaacgtttcatgggccaagcctcgtttcctcacagttgccggtgccggccctcatgccggcacgatcatcccgatcaggatccccagcagcaccccgcccaaaacctccaaaggcgtgtgcccgataaattccttgagatcgatttcggtgacttccttatcgggaataccgtcgccgtccacatcggcgttttccgtctcgatctggtttaagtacttattgagcaggcgggcgtgttcccccgcctcccggcgaacacccatggcgtcgtacattgtcacgaacgcgaacatcaccgccagggcgaaaagcgggtcggacaccccataaaaccgggcaaccgaaatcgtcagggcgcagaccatggccgaatgcgcgctcggcataccgccggctccccagagccgttccacattcacttttttggtcatgcaggcggtaatgatcagcttgagcacctgcgcgcacagccaaccgagaaccgcggcgaacagcacacggttggcaaaaaattccttgatgagtcccatccaatttcacgcctttcggtctacggacggtattatagggaacgggccagcagacggtccgccagcagacgcagatccgcggtatcccgcttgaacgttttgagcgccgaaaccgcggcgtcggtgtgttcctgtgccaggcggcggacttcgtcgagcccgagcaaggacacataggttgtcttttcgttcgacgcgtcgctcccaaccggttttcccagctcctcggacgtcgacgtcacgtccagtatatcatcaatcatctgaaaacacaaaccgatatggatgccgtaccgctgcgcggccgccacctgcctggccccgccgccgccgatgatacagcccacttcgcaggccgccgcgatcaacgcggcggttttgccctcctgcaggatgcggaggaggtcgatatcaatggcgcggccctcgctttccagatcgatgacctgccctccgaccatcccatagacccccgccgccttggccagcgcgaaggcggcggaaagcgcccgttcagccggaatccctgcccggttggcaggatccagtatggtttcaaacgccagattgagcagcccatcccccgcgagcagcgccatgtcctcaccgaacgccgcgtgaaccgacggcttgccgcggcgcagcgggctgtcgtccatgcagggcaggtcgtcatggataagagaatacgaatggatcatttccaccgcggccgcaaaaggcatggcccgtcccggctcatcgccgcaaaggcggcagaattccagggccagcaccgggcgcaggcgttttcccccttcggagcaggcataccgcatcgcccgcatgacggtggcctgtggcaggtcccccgccggcagatagtccggcagcgcctcctctaccgcctggcggtgcgcatccagtaccggggtatacagctcactcaatggtcgtcccgtccttcctccgtctcctgcgcctcggcggcgccggtttcccggatcccttccgcctgttcaacagcggtgagtttgacgatcttctgttccgcttccttaagggccttggtacatgcggccgtcagccgggtcccctcttcaaaaagcttcagggattcatccagggtacagcccccgttttccagcaggcccacaatctgttcgagcctggccattgcgtcttcaaacgtctgcttttccgccatattggcgctccttcctttcccacacgggctgccggtcccgtccgtttgaccggataaacgcccattccttcaaacgatttcgcttgcctagcggttcgccgtccttttttcggggacgacccgcctggcttcacagtccacccggccgtcggacagacggagggtcaaacggtcgcccgggcggacatcccccgccgaccggatcaccgcccccgcatccgtaaccgggatcgcgtagccgcgggacattaccttgaggggactgagcgcgtccagcttgccggcagcgccggccagccgccgctccgccttggcgatgcagatacccgccgagcgcgcaaaggccttggccgtatagtcgagccgcatactccgttcctccacatagaaaaggggcgttttcaggcaccgccgggcggccaggttttccagcctccggctctcctgccggatccgtgcgtccgcagcctgcatcagccgcgcctgcagctgtgtcagccggcccagaagctgccgggtgtcgggcaccgccagttcagcagcggccgagggtgtgggcgcccggagatccgccgcgaaatcgcagatggtaaagtcggtttcgtgccccaccgccgatatgacggggatcggggacgccgcgacggcgcgggccacattctcgtcgttgaaggcccacagctcttcgatggaaccgcctccccgcccgatgatcagcacatccggcgtgtatttggagccggcctgccgaagcgccgcaaaacggttcagtgcgtcgatgagctgggcgggcgccccttcgccctgcacgagaacgggggcgaaaagaaccgccgcgtatgggtaccgccgtccgagaatgttgaggatatcgcggaccgccgcccctgtcggagaagtgatcaccccaaccagggacggataggacggcagcggccgcttacgccgttcatcgaacaggccctcggcagcgagtttggccttgagctgctcatacgccacctggagcgcccccaccccgtcgggctgcatctcttctatatagagttggtacgaaccgtccttgtcatacaaggagacccgcgcttttacaatcactttcatgccgttttcgggcgtaaaaggcaccttggaggcaaaggcacggaacatgacagccttgacaaccgccccttcatccttgagcgtcagataaaaatgccccgaccggacgtgattggtgaagttgctgatttccccgccgacatacacgcccgtcagatgcggatccccttccagcagggatttgacgtatcggttaagctgactgacggatatgacccgcgccggtttggtccctccgatatcctgcataacggcctccctgtcacgtatgatcgtctatggaatcgagaacgccctatcgctgtatgagcgtaccatcgcgggggtcccaatcccctccgctacccagcatttcaatcattagacggcaaacccgccgtccacaccaagcacctgcccggtgataaaacccgcctcatcggaggcaagaaagcacagggcggccgccacatcctccggcgtccccagccggccgagcggcgtctcctccgccagggaacggcggacagcctcatccaggcccgcgcacatggcggtatcgatcacccccggagcgacgcagttgacctggatcgaagacgggcccagctcctttgcgagcgctttggtcagcccgatcagcccggctttggccgcggaataggcggcctcgcaggacgcccccgtcaccccccacatggaggagacaaacaggattttcccccacttccgccgcaccattccggggatgacgtgacggcatccgtaataggcgccgtccaggtgcacccccatcagggcgcgccattcctccggcggcagatcggtcaggagcttttgagacgccgtaccggcattgtggatgaagacggaaatttcgccgaaaactgactcggtctgccgcaccatttcggcgacttccctgtcgttggaaacgtccgcgccgacggggatcgcgttggcccccgccgcttccaattcccgcacaagggattcggcggtttcacgggaacgatgataatgcaccgccacggcgtacccctgtttggcaaacaaacgggccgtggcgcggccgatcccccccgaagcccctgtaatcagaaccgaccgcatccttccacctccgcgaatatgtaaggctttataactttacaaatcgagcgtgatctgtttattgcccggcgtataagagcgcagggtgacgcccaccatttgaaacatccttttagaggccgtcaccgcatcggtatcggcgtatttattctgcaaatacaccacctcccggatccccgactggatgatggctttggcgcactcattgcaggggaaaagcgtggtgtaaagctttgcgcctttcaggcctgtccgtccatgattgaggatcgcgttgagctcggcgtggcatacatagagatatttcgtctccagcggcgccccctcccggtcccagggcatgagatcgtcgctgcacccggccggcatcccgttgtatccgaccgacaggatcttgttgtcctcccccacgatgcaggccccgacctgggtgccgggatccttactgcgctgggccgacagcagggcgatccccataaagtattcatcccaggaaagatactgttcccgtttcatccgactcgcacatcctttccatcttttcccccggccccttccgatgccagcagaatgggcaggagggaagtataagcccggaaggcgcttggaagcgccacgtcgtcggccagctcccgcccggttacaaagcggcagccctccggcgggtcaaaaggcgggagcaggagcagcgcgccctgcatatgccattccacatgggagaaaatatggcggcccccgccgagcattcgtacagaagccgggcggagcccccattttaccgcttccttctccgcggcttcccggatccgcgaatcgtcggacgcttcgggcagctcgagccccggcagttcccacaaacccgccagcaggcccttgccaggccggcggcggagcaggacgcggggcgttttttcctccgtcaccaccaccaggatcaagcgatgctcgacccggcgggcttttttgggggaacggacaggcagctcccgggcgatccccccggcgctgcccctgcaaaatgggcggaccgggcaggccgcgcagagcggctcggtattgggaaggcagaccgtctcccccaactccatcaccgcctggttgaagatgccgggggcatcctccggtatctgcgccagcaccataccggagagctcttttttgaccgccggacggaggatatcgtcccggcaggcggtcaaccgggcaaacacccgcaatacgtttccatccaccgccgcggccctgcggccataggcgatggacgccacggccccggcggtatagtctccgatcccgggcaagcggagcagatcctccacccggtcggggatgcggccgccatactcctccatgaccatccgggcggccttctgcatatggcgcacccggctgtaatacccgagcccttcccagagcttgagcagcagctcctcctccgccccggcgagggcggcgacgtccggaagggcggccatgaagcggtcgaaatagggcagaaccgcctcgatcctggtctgctgcagcatgatttcggatacccatacccggtagggggtcggattctcccgccagggcagggggcggacatgcaggcggtaccagtcgatcaggggacgggccataccgtcgagtgttctgttcggttccatcgcctctccccctttccgccgctccggcggcatcagcctttccgccgccattcatcccaaacatcggggcagtagccgatcgtggcctttttgccgttgcggacgatgggggtgcgcagcagcttcggattttccagcagttttgcctcctgatccgcttcataggcgaggtagcggacgagctcggcccctttcgccttatcgtcgaggagagccgtcaggccgcccacggcggcgcagacgctcctcagctcgcccttgctgatcccgtactttgccacatcgatccgctggaagggaatgttccgttccttgaagtaccgttctgccttggcggtatcgaaacacttgggttttccgaaaatttggatattcacggcgccatcctccttacgaacggctgaattcctccaggaccaggcccttgttgtgatcgagcgcccactggatgttccaggaattggtgaacaggagcagagggcgcccccgcatatcctgcacccgcttggtatcggagctcagatccagggccttgacgtccacgtcctccccgccgatccagcggatatactggtacggcagcccctccatccggatatccacgccgtattcgttcttcagccggtattccagtacatcgaactgtaatgtccccaccacgccgacgatgacctcttccatgccgccgcccagctcctgaaaaatctggatggcgccctcctgcgcgatctgcgaagtccctttgatgaactgcttgcgcttcatggtatcggtctggcggacaagggaaaaatgctccggcgcaaaggtggggatcccctcgaaggcgaaggatttaccggaagcacaaaccgtgtccccgatggagaaaatgccgggatcgaagataccgaggatgtcgccggcgtaagcctcctccacgatttcgcgttcctgggccatcatctgctggggctgggacaggcggatttttttgcccccctggacatggaaaacctcctgccccttttcgaacttgccggaacagatgcgcatgaaagccacccggtcccggtgggctttgttcatattcgcctggatcttgaatacgaaggcggaaaaatccgggctgaagggatcgacttccccggctgaagaccggcggggcaggggcggcgtggtcattttgagaaaatcctctaaaaagggctcgaccccaaaattggtcagagccgacccgaaaaaaacgggcgacagcttgccgtggcgcaccaagtcgaggtcaaagtcgccgcccgcgccgtcgaggagctccacgtcgtcctgcagcgtacggtaaagcgcggagcccagcgtgttttcaagagccggatcgtccagtcccgcctcgttcgcggcagcctcatgcccgatgccgttataggaaaacgagagcacccggcccttctcccgctcgtacacacccttgaaatccttgcccgagccgatgggccagttgatcgggtaggtggcgatgccgaggacctgctcgatctcttgcatcagttcgtaaggatccctggcctcacggtccattttattgataaaggtgaagatcgggatatcccgcatgacacagaccttgaacagcttgatcgtctgtttttccacgcctttggacccgtcgatcaccatgaccgcggaatcggctgccatcagggtgcggtaggtgtcctccgaaaaatcctcgtgcccgggggtatcgaggatattgatgcagtagccctcataatggaactgcatgacggacgaggtgaccgagatcccccgctgcttttcaatctccatccagtccgagaccgcgtgtttcatggattttttgcctttgaccatgccggcggcctggatggcgcccccgtagagcagcaatttttcggtcagggtggttttcccagcgtcgggatgggatatgatggcgaacgtgcgccgtttttcaatttcgtcgacaaaactctgcaaaccaaagctcctccatcttccggttaaccgtcgttccaaactattctattttaactgtttccgggggaataatcaaggcttttctgaggtcccggcgtttccacgcaggaattcgagcaacgtctcccgctcgttcggcagacgcccctcgatcacctcttcggtcaggcgggcgagcgccttccctaccagcggcccggcgggaacgccgcaggccatagcgtcgttcccatcgacggccaaatcccggacggaaaagcaagccccctcggcgatcaccgtgtcgaggcattgctccagcgcgtccacggcagccagggaggcggatagcacggatggcgcgtggcctttggcgtctccccgcttaatttcgatcaaaaggcggaattcctcttccccgaatctgcaaagccagcgtttgaccgcgggctgttcggcagggatgggcgtgtcatgataccggacgagacggacgatggattcccgtgttttccggtcgtatttcaaagcgcggagcgtttcttccgcgatcgaggcgctggccggcgcatggccgtaaaaatggccgtgcccttcctcgtctagggtgaagcgggacggctttcccgcgtcgtggagcagcagcgccaggcggacgtcccggtcggggatggcggcggccacacaggcggcggtatgccgccagacgtcgagatgatgatagacgctgtgctgctcgaatcccaccatcggcgcgataaagggaagaaaaacggccaggatatccggatactccgtcagcatgcggtccaccccggccgtgacaagaaaacggtcgagctcggcgcggagccgttccgccgctacaaaccggagcccttcccgtttttcatgcagggccgcggcggtctccgggacgatccggagatcatacgccccggcaaagcgcagcgcccgcatcaggcgcagcgcgtcttcctcaaaccgccgccgcggctcccccaccgccctcagcaggcggttttcgacatcggcttttcccccgaagggatcccgcagcccccgctccggatgccaggccatggcgttgacggtaaaatcgcggcgggccaggtcgtcgcccaggcaggaggtgaaacggacgccgtccgggcggcggtggtcgctgtaagggccatctacgcggtaggtggtgatctccagcggcagcccgtccaagagaaccgtcagcgtcccgtgagcgatcccggtttcgatgagacggaagccggcaaataccgttttcatctcttccgtcaaagcggcggtgcagatatcccaatcgtgcggaaccaggccgagcaggctgtcccgcacgcacccgcccacggcgtaagcctcaaagccctgttcctccaaaagccggatagcggcggccacctgctgcggacagcgcatcgcgtctcctcctttcatgtcaatttctggtctttttttcaaaattcgtcatccagcgattcccgccgctgatcgcccgatttccgcccacactaaccgtggaaggaacggcggccctgccgtgtgggttttccttccagttgacacaaacgggggtgccatatggacacgttcagcgggccgggcgtctccgcctacctgcgcggaagcgatccggccaacgatatcaaccggctgccggaggacatccaggagcaaatcaacgcgcacgccgaagaattccgtaccgaagcggatatccgtgagtttgtcgaaaagctggctatgcgcgcctgagaggagggatatcgtggaacagaacacaaaccaagcgccggtgtgtaaaaaccaggaaatgcagcaatatttcaacaccctgccccagttcgtgcaggagacgctcatcctgtccggtcctgaaatgaacaccctgcaggagctcaaatgctgtgcggaaaatctgatgaaaaaacagggctgacgccccgaaacctcctggcaaagccagacagtccgggatccccggattgtttggctttgctttttcgggccggtgcaggaagggcgggccgtcctgacttttcctatcctgacccgaaacccggcctattattgtcccatttcaggccgggttttgaattttttgactgggaaatacagggtatagatttcatgcgccacctgatggagagggacaaaccggatattgaccggctggttcaccgtatgataagccgtccgccagtgatcccattgccgttcataatccggagccaaaatggattcgggatgctcgggatccccatacagggtgcgttcttccccaatcaggccacagagcgccaccggaccatccaggaaggcgacccggtccggatcgtccgggagcggatacgcggtcagcccctgtgtgagcacgacgtggatatccgcgtcggacagatcacacggcaaggtgacgaatcccgatgcgtcggccgccgcgtcccgcgcctgtccgccgacttcgaccgtcatcggtcccttctgccaggcagggcggcgcagcttcacccgtccctgaccgccgccggtgacgcggatgcgcaggtgtcggtcgtgcggcctggaatccaccgccgtgttatatggagacgacgccagattagcccccgtccgccgttcctcctcgattttgaccgtcatggtcctcccgccggcggtcatggtggccgtgaccggctgatactgtgcgatgtatagggtgctgtccccttcccgatataccgcgttctccatcagcatggtattggcctgcacggcggtgcaatggcagcaccagaaatgcgccgtctcgcttccccaaagcttttgcgccccggggttcatcggcaggtaataggccacgatgccggtttcccgggcggtttccggtttttcaatgcaggtttccttgacgaaggtttgggcatacacgccattatacaacgccttttcccaaaaatccgcgtacttcgattctcccgtccagcgaaacagatattccgacagccgcatcaggttatacataacgcaatgttcctggttgtgctcgccgagacgggcggcctgcttgccgatcggggtgtagatctcgcagcaggtctggccgccggtgacaaaggtgccgcgttcctcgaccgcgagcctccagtaattttcaacgatccggcgataccgctcctcccccgtgacctcataggcccgggcggccccgtggatttcaggaatcgtggcgttcgcgtgcatattggtcaggatatcttcgccgcgtgacaccggatcgaacagacgggggcgttcataccgccgcatcagctcgagatggccggcttcgccggtgacggcgtacaggtcggcccagagctccatcatgccgcccgtctcttccagatccatcatatccgacatctgatcgcgggtaacgccgtcggtaaagcggataaaccactccgccgcgccgcgcagcacgtcgagcgcttcggcgctgcccgcatagcgggccgcgtcgaacagtcccatcatcgttttgtgacacacatattgcggagcccaagtccgttttccgcgcgccagccagtagaggtgcttttccgggatcggaaaggcccagccgttgccattttccctctggcaatgagcgatttccgccacgatgccgtcgatccgcgcccgcaacagcctgtcatcatataaaaagacgaaacgggacgcggccgacagccagtggccggtaaaggtaccgcggatgggggaaaacggaccgtcccatccccaatggataggaggcggcgtactgtccttataatggatcagcccggcctcctgccgataatacagcagcaggttttcatcggtcagccgcatcagatacgcgcggcaatcctgttcccgctgcttccccatcccgccgtccagcaccgttcggatacgttccagcatcttctaagccgcctcccgcttttctgggtttttctctgtcccatagtacggcataacggcctgcctgtcaaggatacgctccgatatccgtctgccggtatttgcaaaaaccgcacacagtttgtccatccgcgcatattctgatagggggacggacgagtcccctgaaaaggaggataaatgatgttcagagataaccaatacaatcgatgtccgtgcggcatgccggaggatggagctgaacaaggatgtaactgctgcccgctgccctgcctggggccgacggggccccgcggcccgatgggcccgatggggcctcaaggctgtccgggcgctcagggtccgaccggaccgcagggtccgcgaggcgtgactggagccatgggccctcagggtcttcccggccctgccggacccacgggtcccaccggaacgacaggggcaacaggagctcagggcgtaacgggagcgacaggcgttaccggacccacgggtcccaccgggccccaagggataactggaccgacgggcaccacgggggcaaccgggtccaccggtccgaccggtgtcatgggccccatcggcgctaccgggcctactgggcccacaggtgttaccggaccgaccggcgtgacaggccccaccggagcgacgggttccacgggcgttaccgggccgaccgggccccaagggataaccggaccaaccgggcccaccggacccacaggagctaccgggccgaccggtgtgacaggtcccaccggagcaacgggttccacgggcgctaccgggccgaccggcgccacaggggctaccggtacagatgggaccgccgacacgatcacagtccgaaacacgaccacgtccgagcccggaaccgacgcccgcgtggacgacgtgaccggaggccccaaccatgtactggatttcaccattccccgcggcgccaccgggcctacgggaccgaccggatcccaagggataaccggaccgaccgggcccaccggacccacaggagctgccgggccgaccggcgtgacaggtcccaccggagcaacgggttccacgggcgctactgggccggccggacccatcggtgctaccgggccccaagggataaccggaccgactgggcctacaggtgttaccgggccgaccgggcccaccggacccacgggcgctactgggccgaccggaccaacaggagctaccggacctgcgggagataccgcaacttgcgcatgtgtagcgcagatgagaaatatccttcagcagatcatacgactttacggaaccgataacgtggtcgtttccatggaaagcggagataatgtgagcggtcgcccgggaagccttcttcccggaccaaacacaaatccgaacgccggccttttccaactgacaaacgctcagggcgtcgtacaggaggcggtttcaatttgcagaattgcttcagtcagaatcaccagctccacttataataatgctctcacctaccttctgacaccaacgcctacatctacaggatgtgccgcggattgcgaagccgcaatccgttcgtatcttccgataggcaccacgagcgttaatgtcaaatccggcggtcaaactgtaggtcagggaaccgttataaaagatgagttcggtatgatcgtcctggtcggcgcaaacaacagtgatcccacctttatttctacctgcaaagcggaaataatcaccaaataaacaccttatcagaaatccgtgtaccgggtttaaccatcccaccggtacgcctgcaaccgcactcgcgacgaccgtcgccccagcgtggcgacagcgccacaaacgagatcctcacaccgtccgatggcacaactgtccccgtcatcaccacgtggaccgctctcctaacggctcggggtggaacggtatgccgtacgcacggcaataggcatcctcctcacgaagcactgcccacaccacaaaccctatccgctcttcaaaacgagaaatctcccgtccgtatccatcgttttgaccgtacaatgaatcggtgccggccgcattttctgcggccggcaccgtcccttttaaagccgatcccccgtcctgccgcagaggacgggggatactacccatatggggaatcagtcgccgccaggaccgtcccggcgctcacgtttgtccggctgtgtggtcacgtttgcattggtccattggttgttgccggctgttttcttgttctttttttgatctttccgttctttttccatcccggttcttcctctctttgtcccgttcatcgcctgcggcgggcattgagccgtctgccatggatagcatatgcggataccggacggatatgcgtcacggaatattcagataatccagaataccgctgtatatcccacgcgcaaagctctggggatcggatgaaagcagcgcggcatcgtacgggttcgtcagataccccatctccaccaataccgccggcatccgggtcctccggagcacgtacaggctcgggttggtcctcacgccccgattgggcaaccccgtcgcatagttgagacccgccagaatctgctcgcccaaataataggccgcgctgcccacgctgtatacataggcttcgctgccgctcgcggtggtgactgtgctcgcattgcagtgcaggctgatgaaataatcggccccccagctattggccgcgttgactctggcggccaggctggtcgcgttgctcgtccccagctgttcggtcggggaattgcgggacaggcgcacttcaaaatttgggttttcccggagcagctcggccaggcggattccaacctcgtaggtcacgtcctgttcccggacgccgtttgcctccgccccggcattcgggttttgcgggttatgtccctggtctatgaatattttatacacggttgactggttcatggtttcacaccccctttgtcttctgctccagtctatgcgggacagggggaggttgtttctattttatctgttcaaagcggcgtatagcccgggaaatccaggttatacgccgctttgctgaacaggactccgtggaaaatcccacagagtcccgtcttttccgctatcaggaatgccggtgtacatcggcagcatccaggcctttttccttgtagctgttcaggatatcctgacggccgccaaggcggctttcaaacacctttttggatttttgcagctcgctcaaattggccggcccccccatacagccgcccacacagcacatcccctcgatgaaatcctcggaaagccgtcccgctttgaggagcatcagggccttgcggcattcctccgccccgttgcagggcagggccttgatctccggggcatcgccccgttccgccagaacccgttccactgctttggtcacgccgcccgacaaggcaaaccccttgccatagcgggtagcctcctcctccccggcctcttccccggccggttcaatctccttcgcgcacatcatggcgtacagctcttcaaaggtgagggcgtaatcgagctccccgatatagctgcccatgacctcgtttttcttggcgatacagggaccgacgaacaccgtcgtaacccccggttttttcgtgcggacataccgctccaccgccaccatgggggatacggtggtggagacaaaggccatcagctccgggaaatgcttgcgcaccatgctgacgaaagccgggcagcaggaagaggtggtcgccttgcccgccgccttgttctcgaggagctcctccgcctcattgacggccaccatatcggcgccgagcgccacctcgtacacgtcgtcgaaccccaggcggcggaccgcttccttgatctgggacagggtggcggtgccgaactgcccctcgatggacggcgcgagcagcgcgacgacctcccgtttgtcatcctgcagggcgtcgatgacaccagtcatcatggacacatccgaaatagcgccgaaggggcagccggcaacgcaggcgccgcagttgatgcatttgtccgggtcgatggtggcgatgtcgttgtcgtccatgctgatggctttgaccgggcagctccgtttgcaggggcgctcgatttcgacgatggcattataaggacaagccgccacgcatttgccgcatttgcggcatttttcctgatcgatgacagcgcccttgggggtgctggtgatggcgccgaagggacaggctttctcacactttttggcaaggcatccctggcagttctgcgtcaccgagattttggtgatgggacagccttcacaggcgcaggggatcacatggaccacctgggcgctgtccgcgtcggtatacagcacgtccaccggcagcttgcccatagccatccgcacccgctggcggatgatctcccgctcgcgatagacgcagcagcggaactggggcttgatgccctggatcaggtcgtaggggattttatccttgccttcgtcataaagggtgccggcgaacgcgtaggcggcggtagccttaagcacctcgtgcttgatctgtacgatatcggtcacatggttcatgttgagtcctcccgcgcccggccgccgccgggacatccatatcggtcgtgtcttcttcaataatatcggattttaaccaccttgccggctgcccgcagggtatcggccagatcctccagcaggcggatcttgatgctgaggtccaccggcagattggggttttggtgggccgggttgatggccttgccgatgaacatgtagagatgggtacagcgctccagcaggacccgggcgatcatggccgcgccattctgcgcatccaggagcttcaggctctccgcgtcggcggggctttgcagcacctgcttcacaatgacattggcctgccggatggtgaggaccccctcggtgacgaggtcgatccccttgatatgggcgatggggggcagatcgtcgtcatagctcaggtcggtggtgacctcccggcccagaacccgggccaccaggttggcactgctgccgccgcagacgattttcaggccgtccggcgacatgaaatccaccaccgcccgctcgtcgtcctgcgggaaccggggcgggccggaatacaggctgacaatttgttccggaatcgccttgacggtggcgacggtggtgtcgtcccccggcttgcgcatgtagagatcctcgcaggcgccgaggagggccgccgtcatccgggcgctggtattctcgtccttccagttgtcctccaggaattcgcacacgctctcccagttccagccaagattgagcaccgcgccgatcccggcatacatcaccccgtcgctgatgagggtgagcatgtcgccgcattcgaggtcgaaaaccgcctctttgatggtcttgccccccacctccctcgtggtgtagtcgatgggatagaccacgccgtcgtgggtgtagatgcagccggggcagtcgaactcggtcaggtagaccgtcccttccggcgtgagcttgaggatggaaaaggtggaataggccatgtggcgcaccttgcacaccggcagggtgtggataatggtgtccaccgtgtcctcgagggtggcgccggccttcatcatggtggcgatgatcttggaggtcagggtggccaggatgttggccttgaccccgctgcccaggccgtcggacagcaccacgatcacgtcctcgtccgtccggacgatctccaccttgtccccgcagagctcctcgccctttttgttgaggctcttggtggtcacgtcataatacagccgcccgctcatgtttccgtcccctcgctgagaatcaggtttttcagggtattcagggtggttttggtctcggcggtggtctcgccgagcaggctggcgatctcctgggcggcgatcatctgcttttcgatgaccttctgcgccatttcggccgactccagccgcgccttgaaggcgctttcctttttggcttcttcctccgtaacatccttcatcaccccgaccaccagatcctgctcaggcacatagaccagggtggacatgacgatccggccctgcccttcgagccttaccttcttgtccacgatattccgatgggtttcgaaaacttcctcgaagtcggaaggatccatgtattcgaacagatcccctttgaccgcctgctggcgggagacgccgaacagtttctgggccggcagattgatctccaaaatccgcagctcatgatccactgccaggatatagttgggggtcacgctcagggtgacgttgctcagggactgggacagatcgttgatatagggcaggcacatatacagctcggccttgccctgatacacggcgatggctttgtcgcggcaggtgggatagccgcaggatccgcagttgagctccttatccggagtgggcttgccgatttcggtgaggattttgcggatcgtctgctcatccggaaccgccgcgtcccgcgcgatcggctcaaaccgctggccgagacccggacaggagggcgcactgccgcgttccggctgtttcgcgtaatcgcgcaccaccagctgcgcccggaaggcgccccgcctctcctccgcgatcagcgggccgcccacgcagccgccctcacaggcgttgagctccacaaacaggcggtccggccgttccgccttctgcagctcttccagaaactgcatgacgttttccaggccgcacacgctcataaaggtatatccggcgtatccctcctcaggagagaccttgccctggaaggatacatcccgcaggatgccttccgggacgggataaatccgggaatacggggactcctccggcagccgctctccctgctctgtcacggcgatccgccgctcggagagaatctcgtccagcttccggaaggacagcaccgcgtccgcggactcgggatgctcgtcgatctcccggatcttggacaggcacgggccgatgaacaccactttggtctcggcgccgaagcgttctttgatcatccggccgtgggcgagcgccggagacaccaccggggccatatacggtaccagggcggggtagtactgggcgatcaggaggttgactgtggggcagcaggtggtgaggatgcagggcatctcccccttatccatgagccgccggtattccccggtcacctcccgggccccgacggcggtttcctccaccctatcgaagccgagggcgtaaagcgctcctaccagccgggcgctgtcccgcccgtagatacccgcataggagggcgccaggcttgccaccacgcgggtatcgggatcggccagcatggacagcaccctggccggatcgttgaccaccgtcttggccttttgagggcatacgttgatgcaatgcccgcacaggatacactgatccgcaatcacctcaacctgatcgttgctgtagcggatcgacttgacattgcagtatttcaggcatttatagcagtttttgcagttggcttttttgacactgatatagccggccatcgctgtccgccccttccgacgatttatcgggattcctgccgcgcgaccactttgctcgcaaagaaaccgtccaccgtgtccagcgtcaggctgtacacctggtcgtcaaatttgacgcagacgccctcctctgcgcagtgtcccatgcagaaggagcccttgagctccaccttgccttccagaccgttctccgcgatcagtgccttgagccggtcgatgagctcccgcgaatgctggagatggcaggaactgcccacacacaccatcaaatccatgctatgtactcccttcgcttctttaatcacccctcgtgaaaagagggcgttatccgaaatatccacaccgctcccgaaaacaaagcggttatattgagtatagcatattgttattttttagtcaatgttgaaacactggtttccagcatttttcgacgatcgtatgcgtcattttttccccttgccaaaacacaatctccgccgtatactgggcgtgtgaatgaaagagggggtgggttccatgtcgccggcggatatcgtgatcctgatcctggccgtgctgtgcgtcgcgggcagcatcgtcctggcattgcggcgccggaaaaacgggcggtccggctgctctggcggatgtaccggatgcccccatgccggacagtgtgaacggcggacgccgccttccgatactgggcatggaacgtgataaatgttcacgtccggattcggccgaacacattgccattaagtggaaaacagagtataatggccctgtcctcccgacatggataggaccgccgcgtccccatgacagaggtgccgaaccggcggccgtgccacgtttttttgcgggacaagcggcaggccccggacgccaccggagactcgcgcacatcaatatgacagggcatcggacacggtgccctatttttttaagcagaggaggtgccggaggtgttcgccaggatcaacagcatgggtctgctcggcgtggacggcttcatggtggatgtggaggccgatctttcccagggactgccgggcttcgacgtggtaggactgcccggcgccgcagtcaaggaatcccgggaccgggtccgcgccgccatgaaaaatagcggcttcgcctatccggtcagccgcatcacggtcaatctggcaccggcggatatccgtaaggaggggtcggtgtacgacctccctctcctgctcgccttgctcagggccagcggccagctgaatgcgcaggtggacgacagcgctttcgtcggggaactgtccctgaccggggacgtccgcggtgtccccggtgtgctccccatggtcatcgccgcccgggatcatgggctgaaacgcgccttcatcccggccgaaaacgccgccgaaggagctgtcgtggacggcatccgggtctatccggtgcccaccctgtccgtcctgctggagcatctcaccggcctcgccgcgatccagccgctcgaacccgttgaatttcagcccgggcaggatcccggcacccccgatttcgccgatgtgatggggcaggcggccgccagaagggccctggaaatcgcggcggcaggctcccacaatatcctgctcatcggcccgcccggctccggcaaaagcatgcttgccaaacgtctgccctccatccttcccgacatgaccaggcaggaagccctcgagaccaccaagctccattccgtggccggcgcgctgcccggcggggtggggctcctgcgcgcccggcccttccgcgctcctcaccacaatatctccgctccggggctggccggaggcggcagtatgcctcatcccggtgaggtctcgctggcccacaacggcgtcctgttcctggacgagctgccggaattctcccgtcaggcgatggaatgcctgcgccagccgctggaggatcacaaggtgaccatctcccgggtcagcgcctctctctcctatccctgctcctttatgatggttgcggccatgaacccatctctcaaatttaggtaaaaaccaatcactcaagcgagcgaccagcatctttgtacgggcaatccttgcataacaaccccaatatggtggtttctatgtagtcatttggaggcccgtcatccgtcggagcctcgcatatatatgccttgttcattattttacacgcgaaatagtgctcgaccttttcacccccaagtatgatcctgtcctctttgccgcctaatacagcacgttggcatgaaatccacttcatttgccgcacccccatataactacaatgccgacaccacaacgtaattatacaggacgtggacgaacatgtaaacagacccgccatttggcggggagctatattgacaacggccggaattttgagtatattaaaaacaagctattgtttgtcaatatccgttaaaaactgcgaaaagcggtgaaaaattgaaataaatggatagattgtgcttctgataagtgtgatttggttaaaattactgtttacaaataataaattattgcgtataatgatagcaacagaacccgacacgcctctcaacgatgcggaccacgtcgggtcatttaatttatttggggttgtttactgagaaccatataaaaccagccg

SEQ ID NO: 2843 - DNA, 4933 bp, Unknown
  16S sequences of unknown bacteria
gtcaatgcggttgcacagggcaggggcaaaggcgttttcccaacggggattccattctcttttttgataaaggtatgctttgatatggtcgatcagcgtattagcgctgccgttttcatctgcgtgcaccacttggccggggcgcttgttgaccagcaaaatatgttcatcttcatagaccacgtccaaaagcggggcagcaatggtcaggaaagcgttttcactgttgggtttttcaaagaattcgtcgttgacgtaaagctgcagcagatcgccttcacacaaccgcgtgtcgcgcttactccctttcccgttaaccttaacccgcttcagacgaatgtatttttgcagcagggaggggggcagcagcggaacggctttggacagaaaccggtccaacctctgcccggcatcatttttcccaatctgcagttctttcaatcctgccacgctccttttactttggtctgttcagtcaaaatttaatttatcatatcacagatccgctgaaatagcaaagaaatcagggaaaggaagcagagcttggcgcaaaagaaggattttctgaaaaaactgcaaaaaactatttgacaattttgcttcttcccattataatactacccgtaccattgcgaggtgtattatgctgttatccgttcgtgaaattatcaatacccccgggaaaaagatcggtttccagttctcgatggatctgtcttgtgtggaattcggcgggtattgcccagttgcggagcctgttgtggtaacagggaccgttcgcaatatggcaggcgttctggtaatgcagggcaccgccgaaacaatgcttcatgcgttttgcgaccgttgcggcaaaccgctggtctgtaaaaaaagcgtcccgtttgagcatttgctggcacaggagctggaaaatgcagacaaaggagacgacgagatcctgttgattgaaaacggtgaagtggatgcagaggatgcggcccgtacggcattcattctcggaatggacacaaaactgctttgttcagaagactgcaagggtctttgcccgatttgcggtgcggatctaaatatgggtccgtgcggatgcaaaaaggaaaccgatccgcgcttggctgtgctggctaagctgctgcagcgggatgaggacaaagactgaattttgaaaaatacactgctttaagcagttacttaccaaggaggtgtcacgaaaatggcagtacctaagggaaaagtatccaaagcaagacgcgataaaagacgcagctccgtttggaagctgtccgctccggcgctggtgaagtgctcgaagtgcggcgcgctgcatatgccccacagaatgtgcccggaatgcggctactacaatggccgtcaggtcaaggctgttgcggttgaggccgaaaagtaaggttgcttggtgaaatggagaggggaagaaaatatcttcccctcttgctttttatttacttttcattgcgattgtgcggaaatttgcttataataacggtagagcagagtgcggctggccataattggcattttccgcattgttgcagcaggaggaggagcaaaggctttgtctggaaaaattgcatccattgatcccggttcgcccgctgcgcgcgcccgaatccatgtgggtgaaaccttgctgagcatcaacgggaaaacgatcaaggatgtgctggactatcgtttttatgcctatgatcctgcgctgaccttggtgctgcgcgggccggacggtgctgaacgtacagtgcatatccgcaaggaggaaggcgaggatattggcctcaactttgaaacgtatctcatggatgaggagcgttgctgctccaaccactgcctgttctgttttgtggatcagatgccgcccaatatgcgtgatagcctgtattttaaggatgacgatgcccgtttgtcttttttgatgggcaattatactaccctgacaaatctcagcgaacgggaagcgcagcggattattgatctgcggatcagtccaatcaatatttccgtacatgccacggatccaaaattgcggagcatcctcctaggcaacaaggccgcagcccgaggactggaatatatgcaagcctttgcgcaaaacggcattgtaatgaactgccagattgtggtctgcccagggctcaacgacggtgagcagctttctcgtacgatgcacgatctggcggagatgggcgtggccagttgtgccattgtgcctgtgggcgtaacaaagtaccgcaaggggctttataaaatgccggtggtagacgagcgaacggcgaacgatattctggatcgtgtgctcccgttcagtgaagaatgctttgcgcgcttcggcacccggctgtttttctgctcggatgagatttttatcaaagcaaagcgcccgctgccggaagaagaatattatgaaggttatgttcaactggaaaacggcgtcggtatgctgcgcagcatggaaatggaatttatgagcgcgctgcggcagttggaaccggacacaccctgccggccttttgcgattggcaccggctgtctggcggctccttttatccgggaactggtggacaaagcaaaagagcgctgtccggctgtgcagggtacagtttatgctgttgttaaccattattttggggaaactatagatgtggcgggtttggttacagccacagatctgatgacgcagctcaaagggcagccgctgggagagcggctgctgctgccggccaatatgctccgccacggtggcgacatctttctggatgattatcgtgtgagcgacgtggaacgagcgctgggtgtgccggtacgtattgcggaaacggatggtttttctctggtggacgcaatttttgaattggaatactgaaaacgaaaacaagaatttgagacttatggagaggggagtgtatcccaatggcaaaacccatcgttgccatcgtagggcgtcccaatgtgggcaagtccctgctgttcaataaactgatcggtcagcggctttcgattgtagaggacacgccgggagttacccgggaccgcatctacggtgaaacggattggaatggccggcgttttacgctggtggacacgggcggcattgagccgaacaccgacagccagattctgaattttatgcgcgaacaggcgcagatcgcaatcgataacgcaacggtcattatttttctgtgtgatattaaaaccggtttgaccgcttcggaccaggaagtggccaatatgttgctgcgcagtgggaagcctattgtgctgggagttaataaaatggactccacgggcgcgctgaatccggatatttatgagttttacaaccttggtctgggagatccgattccggtttctgccgtccatggtcacggcaccggcgatcttctggatgcctgcgtgcggtatttcccggaggaggattttgccgaggaagacgaagattacatcaaagttgccctgattggaaagcccaatgtgggtaaatcttctctcgtaaaccgtattttgggtgaacagcgcgtcattgtcagcgatgtggccggaacgacccgtgatgccatcgattcaaagtttgaaaaccagcagggaaaatatatttttatcgacactgccgggatgcgaagaaagtccaaggtagaggaaaatgtggagaaatacagcgtgctccgcgccaccatggccatcgagcgcagtgatgtatgtctgattatgattgacgcgcaggagggcgtaaccgaacaggacaccaaggtagcagggcttgcccacaacgccggaaaggcctgcattatcgtggtcaataagtgggatgccgtggagaaggatggcaaaaccatggatacctaccgcgcacaggtgcgcacggatctggcctacatgacttatgcgccgattctgttcatttccgccctgaccgggcagcgggtccaccgcctgtttgagctgatcaattatgttaatgagcagtccgcggtacgcatcaccacggggatgttgaacaatgtcctctccgatgcgcagacccgcgtgcagccgcccacggacaaggggcgccggctgaagatctattatatgacgcaggtgggcgtcaaaccgcctcattttgtatgtttctgcaacgatgcaaggctgtttcattattcctataagcgttatcttgaaaaccagctgcgcagcgtttttggcttggaaggcacgccgattatcatttccattcgcgagaagggtgatgagggctgatggaaacgatgctggttctttgcctgccggggctggcggcgatggcggcagcttatgcgctgggatgtgtcaatggctccattttggtatccaagtatattttcggggatgatattcgaaaccacggcagcggaaatgccgggctgaccaatttttaccgtactttcggcacgaagggcgttgttggcgtgttgctcagcgatattttaaaagcggtgattgccgtgttgctgggcgggttcgtgtttggatatttttttggcttgcctatggtgggtaagctggctgccaccagttttgttttattggggcacatgtatccggttacgtttcatttccatgggggaaagggcgtgctgtcaggcgtatcggcgctgatggttatcgattggcgcgtcgccctgcttgcattggcggtgtttctgctggtcgtggcgctgacccagtatgtgtctctgggatccatctgtgcggcgctgacctttgtcgtatgtctgtggctgttttaccataatgtatgctttgaagtgctgggagcggtccctgcgggacttttgattttcgcacatcgctccaacataaaacggcttcttcatggaacagagaataaattcagtttacatagaaaagaggatgcggcaaaatgaaggttgcggttgttggcagtggcggctggggc

SEQ ID NO: 2844 - DNA, 3912 bp, Unknown
  16S sequences of unknown bacteria
cgatctcaccaagccgcaggtgcgcgcgatcgcagaggagctgaagctggattctgtttcccgcaaaaaagattccacgggcatctgtttcatcggcgagcgggatttccgcgccttcctgcagaattatttgcctgccaaggagggagagatcatcaacattgcggatggccgtcaggtcgggacacactgcggcgtgctgtactatacgataggacagcgcaaggggcttggcatcggcggagacatggggccctggttcgtcatcggcaaggatgtcgcgcagaacattctctatgtctgcaatcaggatgagcgaacattcggacagctgcatcgtcagcaatgtcaactggttcggcgcgcagcttccccatggggagatgcattgtacggcgaagttccgctaccgccagaaggataatgccgtcacgctgcgcttcatggacgagcatacggcattcgtcacttatccgcagacggtcgcttcggtgacctgcggtcaggaggctgtattctacgacggcgaagaatgcctgggcggcggcgtcatcgagaacgtgtaccgggaaggggaggatctcaacctgcgcacggccgcagcgctcaggaagtgaaggatatgacgagcaaggtggagctgcaggccaaatgccgttacatcatcttccgcaatgagtccaatcattacaccgtggctcgttttcaacaaagcgatgcgaagggcgaacagttcatcgccaccggatgcatggctcatctggagagcgatgtcagctatcggctgtccggggaatatgtccagcacccgcgctatggcatccagtttcaggtcagcgagtgcagccggatcatgccggatgatcgggaggcgctgatccgctttttcagcggcagtcattttcatggcatcggtccggccatggcggcgaagctggtcgatacgctgggcaaggacctgagcgcgaagatcagggaagacgcgtcctgtctggatctggtcgaggggatgaatgagcgcaagaaacaggcggtcctcgacggcttgcgggccagcggcgcctttgatgaatcatatgcgtttctgctggccaacgggctgagcaccagacagatcagcgtactggaggagcattatggcgatgcgtttgctgatgtgctcgaggaggatccttaccgtccgttctttgagatcgaggggttcggattccgcagctgcctgccgatgcgcgccgtcagcgcgcgctggtctatgataccctgatccagtactgcttccgcagcggatcgacctttctgcgcatggaacagctgcaggcgcagatcatgcagcgctatggctttgcgccggatgaggcgctgcagacgctgatcgaaaaaggcgtgctcgtcgaagaagagggacggctgtatgatcacaggcagcatgcggcggaatgcgtgatcgccgcaaggctgaatcatccggagccgcctgctgcggagccagaagatctggacgaagcgatcaagcatgtggaagaaacgctcaatatcacctatgatgaaagccagaaagcggcgatccgaggctttttcaatcattccttcatgatcctgaacggcggaccgggaacgggaaagacgacggtgatccacggcatcctgctgctggatcagaagctgtatcccgatgatgaggtgacactggccgcaccgaccggacgtgcggccaaacggctcagcgaactgagcggacgagaggcttcgacgctgcattcgctgctgaaatgggatctggagaccaatacgtttctaaaggatgaaaaggacccgctgtcgagcgatgtcgtgatcgtcgatgagttttcgatggtcgactcattgttgttcgccgcgctgctcaaggcgctttgcccgcagaccaagctgctgctgatcggggatcaggatcagctgcccagcgtatccagcggcaaggtcctgcaggatctcatcgagagcggacgctttccgctttactgcctggatacgatctatcgtcagtctcagggcagcggcatcgcgacgctggcggcggccatgcgaaacggcagcccgctgacatttgagcaggatgtgcgctttatcgaatgcagcgcgcagcaagtgcgccaggcggtgatccaggtcgtggagaacgcgctggcagccggatatgcggcgaaggatgtgcaggtgctctctccgcgctatcagggcccaggcggcatcgatgtgctcaaccaggcgctgcaggagatcatcaatcccccagatgccttcaagcatgagctgaaggtcggataccggctgtttcgcgaaggtgataaggtgctgcagctgcgcaacatgcgcgaagacgcagtatacaacggcgatatcggagagatcatcgagatcgttccgcctcaggaggcggtgggcggcaatgcgcagatcatcgtttccttcgatgatcagatcgtggagtatgaacaggacgcgctttcctatctgacccatgcatactgcatgtccgtgcataagtcgcagggcaatgaatatccggtcgtggtcatggtcatcctgcctcagcatcgcttcatgcttgaccgccggctgctctacaccgggatcaccagggcgcgccgcgcgctgatcttgctgggcgatcccgcgttgttttcggccgcgctggcgcaggtggaacgggaagtgcgcgatacgacgcttcagcagcgtctggcccgccagtatgttcccttgatgatggaaaatgatgaatagcttctcgcttcgcttcgcatactaggagcgaggagttgatgaaatgagcaaatgtgttctgatgctcggcgtcgggctgatcatgggcgcttacctggggtatgccaatgaggaagaaatcgatgagatggctcacctcatgcacaagaaccagaaaaagatgtcccgcaaggcgcatcgcgcctaccgcacgatttgttcctgcatggatcactgatgtgcgaaaagccggtggaagaaagcgttctgccggcttttccatgttgattcctgcgccgggttgtgctaaaatagtgccgttgataaatgacgttgaagaagaaaagtacctctgatcgttcagcgcagagaggaagcggctggtgcaagctttcgtgaaggtaagagggaaagctgctttggagtcagacgcttgtcagcgggataacggcactgagggcatcgcaagatgaactaggatggtaccgcgtagtgttttacgttcctggagaggggacgtttttttattgtcaggaggaatgaagcatgaaacagttgaccggcaatcaggtaaggcagatgttcctggagtatttccgtgaacacggccacatgatcgaaccaggcgcatctctcgttccgcacaatgatccgactctgctttggatcaatgcgggcgtcgctgcactgaaaaagtattttgacggcacggagaagccaaaatgcaaccgcatcgccaacgcgcagaagtctattcggaccaacgatatcgaaaatgtgggaaggacggcgcgccaccacacgttctttgagatgctggggaatttttccatcggcgattatttcaagaaggaagccattcattttgcatgggagttcctgacggaccccaaatggatcggctttgacaaggaaaagctgtatatctcggtatataccgatgacgatgaagcttaccgcatctggacgcaggaatgcggggtaagccctgcgcatatcctgcgcacggatgacaatttctgggagatcggcgaaggcccgggcggaccggactcagagatcttctatgaccgcggagaggcctatgatccagatgggctgggcgagcggctgttctttgaggagatggagaatgaccgctacatcgaagtctggaacatcgtcttc

SEQ ID NO: 2845 - DNA, 32759 bp, Unknown
  16S sequences of unknown bacteria
tcttgattgtatcgtaccgcctccctccctgtcaaccggttttgctcctgccgcttgtgcaaaagaccgcccgccgggttttcccccggcgggcggtcttttgcggtcggttggaaggattagagctccgttgcccacaggccgtggaggttgcagtaggcgtagacggcgacgggctcgtccccttcgcccaggcggaaggtgacgctggggtcgtcgccgggcttcagggccttgcgctggccgccgtttgcggtctgcaggtagatccactggatggagtgctccgggagcatggggtgcgcggcgctgcccacgcagacgcggaccgcgcccggctccgccgtgacgacgggcaggtgcttctccccgctggcctccacggtgttgggctccagggcctccatctcctccccacagcagaagaggggctggccggactcgtgaatccggccgaccaggttgccgcagcggcggcagagcgagaatctggacttcttcatcgacgcttcctcctttatggttctccgggggccgaggccctccgggttgggatcagggttctccggccgtcaggagcgcggcggccgccttccagttttccgtgggccgccagaccagcgcgccgtcgcggatctccatgcgctcctgcgtgtcggaatagacggcctggatggtttccggcgtgcccgcgggcaggggcatgcggatctcctccgggacctcgccgccaaaggtgtgcagcagggcgaaggcctccccgtttttgcccaggcgcacgatgccctgccagccctcggggtggcgcatccgggcgatctccgggctctggtggtaggtctggccgtcgcggataatgggcgcgatgcgccggtagaaagcgatggccgcgtcgatgaccgcccactgcgcgccgctgagctccgtgacgtcgccggacaggcacatgcgccccaggaacgtgctcgccagggaataggcgatgcgcttgcaggagtccgtcttgcggatgacggcccagatctggctctggcggggcaggatggcccggtgcaggttggcggcgatgatcgggatctccgggcactcgtgcgcgtcggagaaggaggccatgctcgttgccgccatgaagcccggctccagccggtggccgccggaggcgcagttctccaggatgatgccggggacctcgcgcttgacctccgcaaggaagtccatggtcgccatcatgttccggcgcaggccctcgcccggggattccgcgccgtcgcagccgatgccgatggtgtcgttgtagtcgatcttcatgtagtcaaagccgtacttctgcaaggtgccgatgacgcgctcatgcagatagttctgcacccagggatccgtcatgttccagaatcggcggccaggcgtgctgagcacctcaccgtccaggtgcagaaggtgctccgtctcctggtaggcggccgcggccgggccgacgttctcgatctcgaaccagatgccggccttgaggccctcggcgtggatggcctcgacggtcttttccaggccctcggggaagagcgtcctggaggggatgtagtcgcccatgctgacggcccaatggacgccgtccgccttgtaccacccgcagtcgatcacaaagtaagagatacccctgccgcggatggcctccaggatcttgacgatgttctcgtgcgagggcacgccccaggtcgtgcagtattcgttgaagaggatgggcaggtcctgctcggaggcggggcccgcgtccgccgcgcgcacgcccgcttccacgagccgctggcagaggtcatccagccgctcggtgctcgcgacggtcaggatggcctccggcgtgcggaagcgctcgccgggcgcgacgctcttcttccaatggccgaactcgcggtccgcaaggccgccgctgacggcgaggttttcgtccctgcggtagatctccatctgccaggaggccgggtgcgcaatctgcgcgccccagaagacgtggttctccacgtcctccaccgccaggaacgggaagtagtggttcactggcatggagccgacctggccgaagcgctcgcaccggacggcgcccatcgcccaggagggttcgagctgcagctcctccagcgtctgggtcagcaggcggccctcctggctccagcgggactgcaggcggtgcacccgcagcttgcccgcgccgtcccccggcaggtacggcgagatttgctccagcgagaagctggagaacaggagcagcgtccgagtcgtgtctccattattttgatactcgcagaacgtgcggacgaagcggtcgccttcctgccaggtgagcgtgtgcagcacctcgttgccgcggtcgtccgcgagcagggtctcgatgcgggtcacgtcgccctcgcgcttcagctcctgctccttcttgcgcatgcgcagggtactctccccgttgcgcagcgtgttgcccatggcatagccgccgctatagacgtcccccgcaaactggatctgcaccagggggtccagtgcggccttcttttccgtgagggacgggaccgggcagtccgcggggaacagcagcagccccacgcggccctccgcgtcctcggtatagcgagccatcatatctcccaagcgatagtccatctctgtttttctcctttcctccacgccgggttccttctcggaaccattgtaccaaatgcgcggggaacggtaaagaagaatccaaaaaaatgcgcccgcatcggggttggagcccgcatcgggttggtgcccgcatcgggccgtcatctgccggggcgctgggtctgctttttctggtgggcgcagagcagccagctcgtccgctcggtcaggtcctcctcgccggagtagaagaccgcgacggtgcaggttcccttgcaggccgcgcagagggcgtccagctgccgctgcgtctcctccagaccgcgctcgctgcgcggaacccagacctccagcaggcccaggcgctcgttgcgccgcacctccatgccgctcccctccctcggactttctccccctcaggattccccgcggcgcgcgcgcgtatgcgcgcaaaaaagggcgggagggctccggcagtttcgccgggccctcccgccctgcgcccgatcgggcggcgctattcgaggacgatcagctcgtggctctccaggcggtcgagcgcaaggacgaaccagtccccctcgcgccgcacggggacgctccccccgcgaacgcgcagctgcgcgcgctccacggggaattcctgcgcgcggacggcgatctcgaacgggccgacctcgtactcctcctccaggaagccggggttccggttcgcgccggagaggttgaccaggtgcagcaggaagcggcccgcctggcggtagagccggcagtccacgtagcccttgccctgcacgcgcagcgtctccttcccgcccagcgcaaagcgcacggcctgctccagcaggtcgccgtggtcgcccaggttgtactggcagtacctgcggtcgatgtcgccggcaaagtagaccacccttccgccaaagccggtctccccggccaggatcagggggcggccgctgtccatccgctccgggtccatgaagctggtctccggcgggtagatcgggaaggcggggacgaaggtcgccagcgtcttgagccggtcggaggcgacctcgtagaactccccgccgaagggcaggatgtccgcatccgcaaacccgcgcaggatcgggtggtccggcgcctggatgcgcaggtaggtgtgcagggcgtactgctcccagctctcgcaggcgcgccgctgctcgcgcaagggggccgcgtcgcggcggcggatgccgaacagctcgtccagcgggaagcggctgcgcgcctcgccccactcgtccagcatgcccgtggcgccggtgtagaccacgctgccgccgcgccggacaaagtcctcgaccatccggatctgctcgtccgacatcactgcaagctccggcaggatcagcaccgcaaggcccggggcgtagcgggcgatgtggtccgcgtggagcgggagcgccgggatgcgcgcgcgggtcagcgcgcgggtgaagccccgccagggctcggcgcagagggtccggctctcgtcctggccgtagaagctaacgttgcgctggctccacaccaggcccacgttcgcaacgggggtgcggtggtagagcgcgtcctcgttcctgctgtgccagtcgagcagggggcggccgttttcgaactggcgccggtcctcctggagcgcgccgatgaagtgcatccagggcgagatgcccccggccatgccctcctgcatccacttgcgcatctcgagcttggggttgcaggcgcggcggaaggtctgcacgccgcggacgtagttggccatgctctccgggatgacggcgtcccacccggccagggagtggagcagcatgccgttgaggctgttctgctcaaagccgttgagctcgtcgcgggactggtggtccgtaaagagcatgggcgagcgctcgccgatctccttgaggtcgtagagcgcgcagtgcgcggagaccgggttggcgttgaccatgcccatccacaggcagtcctcgccgccgaactccctggccacggcgttgaaccgctcccagttctccagccgggagcggaagctccactcgatccagaccttgtaggtcctgtcgccccagtccggcgcctgcggcaggtccaggcccgtatccctgcggaacttttcgcggcaggtgtcgcaatagcagatctgcttggcggacgggccctgccaggagttgtccgtgatgccgtcgggatggtaggcggtcaggatctcctccaggagctgcgggatgtactccgtgtagtagccggagttcacgcaggagaggaaccggccgcccgcggcgtacggcgcgccgctgcggtccttggcgaaccagtccgcccgcgcgtcgacgaattcctttgtggcgcggttgatgtccatgcgcgccacgacccgcaggcccatctcccgcgcggcgtcggtgaactcccgcaggaggtcccggtccttgaggtagcgggagcggtactgcagcgggaagcggctggggtagtaggcgacgatgccgcccgcgttgacgatgatgccctggatgtggttctgacgccaatactgcttccagaattcgatatcgcagacctcggcgtcgatctccgtcaggttggtttggcaccagcggagcgtcgtttcataccatttctgttctgccatgtctttttccccctttttgtttatttttttgccgcccttggtgcggtgtccacacctgcggcacgcatccgggcttcgtctcaggttggttcggcgccgaggcgtcgcttcccgctctttcggttctgccgcgcccttttccccttttttattttctccgccccggcgccgcgcgggcgctcacggcaagcggtagtacacggtgtccacgcccgggccccggtcgtccggcaggcgcaaaacgcaggtgaagccgagcttctccatgagccggagctgcgcggcgtttgtggaccaggtgcgcagcgcgatgggccggcccggcagctgctcgtgcgcccaggcgatgaccgcctcgtagatcctgcgcgcaaggccctggccgcggcaggcgggcgagacgcagagcgtggacaggtagcagaccgtgggccggcccggcagcgcctcgcagacgtactccggccggaaggagagcaggcccacggtccggccgtcctgcttccacagcgcgacgctctgctccagcagggtctttgcatacgccgcgacgccgtcgccgcccgcggccccctcccagctctgctgcgtggtgctcgaccgcgccgagagcgggggcacaaagtcgttgtcgcacgccgcgaggaggtcccggacctcctgtttctccgtctcgtcccgcacgacggggcgaatgacgcattcttccctctgcatcagtgcagcctcccttccaggatccgcagggccgcgcgcgccccggcgggcacgctcgcaatgtcgatccactcctgcagcgtgtgcgcgccgccgccgcggcacaggccgcagcacaccgcgggaatccccatcgacagggggatgttgcagtccgtggaggcgcggccccaggcgggcgcgaccccggtctccgcctcgatggcctcgctgcacacggcggcgatctcccggatggcctgcgcgtcgacgtcgcccatgcagggcctctccccgaccgtctccagccgcacgcgcacgtccggccgcatgaagccctcgagcgtgccctcgaggaacttgtcgcacgctcgcagggcgcgcgcgtcctccgaccggtactcgaacagggcgctcgcctgctgggcgatgacgttgacggaggtgccgccctggagggtgccgacgttataggtcgtgtgcgtgccgggcgggggcgcgaagcggtagagccggtcgatggccgaggccaggaccgccacggcgttgggccggccaaagtcgtggaaggagtggccgccctgcacctcgaccgagatccggtaccgcagcgagccgatgcagccggtgtagacctcgtcccggtagaggtcgaagctcacgacctcgcgcaggcggggcgcgaagtccgccatcagccggcggcagccggccaggttccccaggccctcctcgcaggtgttgagcgcgaagatcgcgccctggcccccgcgctcggccatgtacttcatcgccagcatcagcaggaccgcgttgaccgtgtcgtccccgatgccggggcagctccaccggctgccgtccacgcggatgatcaggggcgtctcctcgggaaagaccgtgtccaaatgcgccataaagagcgcgttctccccttccggcgcggcaaaggccgtgcagaccacgttgcccgcctcgtccacgtgcaggcccggcacgccccaggcgctcaggcggtccaggcagtagcccgcgcgccggtgctcgccccgggacggggccgggatgcaggtcatctccttgagcgtttgcaggagcaggtcctggttttgttcgacgaattccgccggcgtcgtcatgcttttcccccctccgtttgcacgatggcctgtccctgcacgcgccagcgcgtgccgtagggcgcgctgacccggttgaggtaggcgcagatctcctccgcggcgcgcgcgtccgcaaggcgcggcacgcccttttcccacttcggcccgtccaggcccaggtcgaccggcaggagctccagctccgcgcacttgccgtccaggatcgagaagcggggcagcaccgtctggtacacgggccgccgcgcgcccaggctcgccgtggcctgcgcggcccgggcccgcagcccctcctgcgcggaggcgtggatggagacgccgtacttctccaggaagtcggccgggagcttttccaccgtgtcgttttcaaagaagaagttgcccaggcagtagaagatcgggcagccgttgtagatctcgatgccctggacctggtgggtgccgctgccgaccacggcgctcgcgcccgcgtcgatgcaccggcgcgcaaagtcctccaggaagtagtccggctcctcctcgcacgcggccttgatctcgtgggagtggaccaggaccacgacggcctggcaggcggcgcgggcgcggcgcacgccctccagggtgcgctgcacgtcgcgctcgtccgcgcggctgaagcggccctcctgcgcctcgctctccacctcttccagcaggacggggccaaactccatcgtcccctccggcagcggcggcaggaagccctggctgcggtgggcctggcgcagggcgttcacgcccgtgcgcgccgcggcctcgcgcagggcctgcgcgcgcgggcgcgccacgcggtagacggtctgcacgcgcagggggttgaggcccggccggccgggcatgctctcggtctggctgcccgcgcgggcggcgtcctcgaacgtggcgcagacggcgaagaccgccgcgcggccgcccggcgtctccacgatcgcggggcgcgcggcctcaaagaggttctgccccgcgccggcggccgcaatgccctcccggcgcaggaaccggagcgtgtcctccaggccgccgtaggaatagtccatggtgtggttgttggcaaagccgaggacgttgaagcccaggcgggcgacgtccgcaaggcagccggggtccgcggtcagccaggttccgccggaataggcggaggcataccgcgtgccgtcggtgatggtggtttccaggttcgccagccggacgtcggaggcggcgatggcctcgcgcagcgcgctgtcgcccgccgcgggcaggcggcgcgtgatgaggatgtcccccgccgcggtgaatcggatgggtcgttgcatgtacgcttcctccctaactggtctcggaatctctccggcgcctccgccgtcggccgggcggtgaaaggcgcgcgcaacggtgtttgtattcccgtttccgccgcgcaattcctgcttttttcacaaaaaaagggcggccggcaccattgtgccggccgcagggaaccggggagcgtccttcctgcacaggggaagcgcgccgggtgtgcggttagaagtcgatgacgatcttgcccgtctttcccgtatcgaagagccggaccgcctcctgtatctgtgcaaaggggaagcggtgcgtgatcatggcctccaggtccatgtgcttcttccggatcaggtcgaggatggcgaagtgatcctggcgcggcatgatggaggagccaaagagcgtgagctccttgctgatcgcggtgtagaggctgggtgcggcgtccgccttctgggacatggggccgttgaagcccaccatgcagatcttgccgtgcacggccgcggcctccagcgcctgtctctgggcgaccatggacccggaggactcgtagatccgatccggccccactccgcccgtgagcgctttgagttgctcaacgacgttctccttgcggaagtccacgaccgcgtcgcagcccatcttcctgcccagcgccagccgttcctcgatgccgtcgattccgatcaccgtcgcgcccagggcgtgcgcataggccaccccggccaatcccacggggcccaggccaaagaccgcgacggtgttctccccgttgggctgcagctttttcagcgcggaataggaggtgccggcaaagcagccgatgaaggcgcccacggcaaaggaaacctccgggggaaggggcaggcagttcgcctcgcgcacgaggaccttgtccgcaaatacgccgtgcaccgcgccggccagcgcgcgccggtcctccgtgcagaattgcatgtagccggacatgcagttcctgcacctgccgcagccgatgacgtggtagagcgcgacccgatcgccgacctgcacattggtcacgccggggccgacggcggagacgatgcctgcgccctcgtgccccatgacgacgtttccgttggggtgcgcagaatgcaggttgtgcagatccgatccgcacaggctcgcggcctttacgtccacgacgacctccccggccgcgggaacggggttgggaatgctgcgaaattccatttgcatcgtagccggaaagaacaatcctttcatgatgtagctcctcctcgatttgtgcgcgccctgccccgctgcggggcagggcgcccttcggttagcgattgctcacgtactcgatcatctcgtcataggggccggagatatagggcatgtactccgggttgttcaggtcgtccaggacgggctgtaccttgggctccatctcctgcagccattccgcccagaccgcgtcgatctcctccacagtgcaggtgctcacgacctcgacggccttggccttgagctcctcggtgaacaggccgtacttgtccttgttcggcgtggaggtgtagaacaggttgtaatccagatggcgccgggtcgcgtgctcgttgtcccagtcctgcgaccatgcgtattcgtcgatgtcctcctggcggtacttggggttgttcaggtccgaatacccgccgtccagcatgatgcggttcatgaatccgcggcagccgctgggatacgggtcgacgtaatcgccgttctcattgaccggccagagcaggttgatgctcccgtcctcgttcagcgtatagtccgtgccctcgaatccgtacttgcggaagcgcgtgccctcctccgagcagaggtaatcgcagaagtcgaggtagcgctccatctgttcgtccgtcacgcccgcggccatggaatggccggaccaatagcagggggattccttctgccagaaatcgttctcgtccaggggcgaggagatcttggcgatctgcacgcacgtctcgcggtccagctcggggaaggcctccaccagcgcatcacggtattccttgatgcgcgaaatgcccatgttttcacagatcgcaacgcattggccggacttgaacaggtccgcatagagggaggaattcgtgtccaggaccaggtccggccagatgacgccgcgctggtagagttcggtcgcggccttaaggccggtcaggtagttttccgtcgccggaacccagacgtattccccgtcgatggcggcaaaggaggtctcctccgtgccgtagaccgggtcctgcgtctgccagatcccgaagcagtccgggaagtaccactggggcgcgaccgcgccaaaggtccttccctcgccgttcccgccggggtcctgctggatgcaggcctccaccattccccagaattcctcccaggtgtagatgtcgtcctctgcgcgcagccccagcgcttccgcccagtccgcgcggtagacgaacatcatcggcacgccgtacccgtactccgtcaggtcctgcttggcgaccgtggcgtagagctttccatccacgcgcatgaggtcgtcgccgatcatcgagtcaaacgaggccttcaggtcgggccaggggctcaggtcgtccgggtagggcttaaacgtcccgtcctgcacccactgaagccactccgtgtagaggttttcgttcaggtccatccacagcaggtcgggcacatcgccggacgcgacccagaggcgcgccttgtcgtgccgctccccgaactgcatagggatgaagttccactccatgttgaatttttcgcagatgtactcgtacagggcgtcgctgcccatcttgtccgcatccgtgatgttggtggagataaccacgtgcgtgtcgtacgcgcccgcttcaccggtcgcttccggagaggactcgtcggcgggcggcgacgcatccggcgccgcgcaccccagcagggagagaaggactgcggtcaacagggccagggcggtcagtcgttttttcatgattgtagcctcctttttttctcttttgtgaatcggcgggtcatcccttcaccgcgccgatggccagtccttggacaaagtatttttgcaaaaacggatagacgcacaggatggggaacatcgtgatcacgatcgaggccatcttgatgccgtcgttgaaggggatgattcccgcctccaacagatgggaggaggtgttggtgttccccgcggcctggatgatgccgcgcagaaccagctgcaagggctgcttgaaggcatccttgatgaacagcattccataccaccactcgttccagcgctcgaccccatagtacaggcagaaggtcacaaccatcggcatgcatatgggaagtatgatccggaacagaatcgtcaattcgctcgcgccgtccagccgggcggactcctccagctcctccgggatcgcggcaaagtacttgcgcatcaccgtcatgtaggtgatggaaaccccggtgggcagaaccatggagaggatgttgtccatcagccccaggtccttgatgagcaggtagaacgggatcagcccgcccgagaagtagagcgtaaagagaatcatgtagagaaagaagttgcgcagcggaaactttttgttgaacgcgtaggccaacagcagcgtcaggaccatgttgtagatgacgcccagcaccgtgatcagcgccgtcacgcccatgcccgtaaagagcacgcggttctcaaacacgacgtagtaggattcccaggtccactccttgggatagagcatgaacggttcgcgggcgtagatgtgctgcggggtgacggagatcaggatgcagttgtaaaagggatagaggatgatcagcgcaaaaagcgcagtgaacaggatgttgaagatgtcaaagaaggtggtcttttgaatcgggccgcttctcggccggcgggcatgcgatcgaatgcgcgtcatgcggtttcctcccttcagacaatgccctcctcgcccagcagccggcagatgccgttggccgacagcaggagaatgcagtttgtgacgcccttgaagagcccgaccgccgtgctcacgccaaagttgcctgcacgctggaaggtgattcggtagacataggtgtcgatgatgtcgcccacgtcgtagacggacgcattgtagaggttgatcacctggtcaaagcccacgtccatcatggagccgatgcgcaggatgagcgtgacaacgacgatcatcgagatgccgggccaggtgatgtaccgcattcggtgccagcggttggcgccgtcgatggtcgcggcctcgtacagggagggatcgatggccgtgatcgaggccaggtacaggatgcagttccatcccgattccttccacgcgaggaagaagaccagaatcgaccggaacagcgccttgtccgtcaggaactggtgcttttccccgccaagggcctcgatcaggctgttcaccgcgccgctcgaggagagcaggttcatcacgatgcccgagatgagcacccaggacaggaagtgcgggaacgtatagaccgtctgaacgaacttcttgtatcgcgccaatcggatctcattgagaaacagcgcgagaatcaccggaaacgggaagcagaagatcacctgatacaggctgatgagcaacgtgttgcgcacggcaaaccagaaatccgagttgagaaacagatattcgaaattttcaaacccgcaccaggggctgccggtgatcccaaggcttgcccggaacgtcttgaacgccaactggatgccgtagatgggaatgtagcgaaagatgaggaaaaacaggatgccgggcaggatgagcagatacatataccggctctcccacgcgcggcggaagacggacttccgccgcgcggcgcccaggcgtctttccgcgcgcacagtcatggaacacccctcctttgtgcgaatgcagcggaaccctccggatgggagccatcccccacgcgcgcccgaatggggcgctttatttttctgcagcggcttcggcatccggggagaggaagcactttcttccggtttccgcgctccggatgcaggcatacaccatctccagagagtgaatgttgttccggcagtccgtcatcatggtctgcccccggttgagcgccgagagcatatcgtccacgcagccggcgtggtcctcccgcccggcataggagagcgggatctcctcccgcacgccctcctcctcaaagtagccggcgctgggaacgggctgcgcccgcgagacccacacccgctccgcgccgtcccagcaggccgttccatccgtgcagtagacgcgccagaagccgtgggacgtggtgttttcgcacttggtcgcccaggagccgcggagggagaggacggagccgtcctcaaatgagaaggtgcacagcgcaatggcgggatggtcgtaccagctgttgggcggattgagctcctggcaataggcgctgaccgcccgcttctccccgaggaggaagcgcgcctggtcaaaggtgtggatcagcatgtccaccaggacgggatgctccatccggtttcggaagtcgggccggccgtcgcccgggcccatgaagtgcgcgccgaggaacatgtcgcacgtcacgagatacggcttgccgagataggtctttgccagctccgcgcgcagggtctggataccgcgcaggtagcggcggttctgcatcacgaagtagggccggccgctctcctgcgcgcaggcgaccatctcccgcgcccggtccagatcatcggccatcggcttctcccccagcacgcagcggccctcgcgcagggcgcgcgtgaccacggcgtggtggacaaagggcggcgtggcgtccagcaccaggttggccttgcagtcctccagggccgcatccgcgccgtcatagaccttcgcccccggggcgtaggccgcgcgcagcgcttccgcccgctcgacggccgggtcggcaaacgccgcaaggacgacatcctcccgccccttcagcgcatcgagccactttttcgtgatgccgttgcatccaatcacaaggacttcccacatcgttgcttcctcctttccctatcgtgcgaattccttctgccgctcctcccagtgttccagccgctccaggacctccatgtacatgcgcccgttgtggtagggcgtcttccagccgttgatgggatagcggttcttcggatgatccgcgggcagcgcggcgtcggagagccactcccggtagattccgccctcgcggtccacgacgtgcttgtcgatgtagtcccacacgcggtacatccagtccaggtacttctcctccccggtcagctcgtaggcgttcaggaatccgacgaccgcctcggcctgcacccaccagaccatgtcgcgcacgacgtttccctccacgttttcggcgtacatgccgccgctctccgggtccagcgcctgcgcgcaggcctcggcgatgcgcaccgcgatcgggatgcactggcgcaccgtcccggcgtctccatgcgcctgcgccgcctccacgagcagccacgcgccctcgatgtcgtgaccataggagaacagggaccgggtgacgccccaatcgtcggtcatgtagggcttgtagtgataggtctccgtgtccagcagcttcgaggacatgatctggatcagctccccgaccttggcgtggaggtccttgtcgtcccagacgcgcatcaggttggtataggattcgatcaagtgcaggtgcgtgttgagcgccttgctccccagcgccgggtcggggatgttgaagctctccggaatgcggacccagtcgcggcgataggtctcaaaatagccgccatggaccttgtccgcgcagtgctcctccagcagggcatacacggtcttggccaggcgcagccctcgctcgtctccgcaggcccgcatgagctccgccccgccatagattaggaaggactgcccgtagacatacttccgatcctgcgcaggcgatccatctgcgtgcacgccccagtagccgccgccccaaacggggtccaggaactgcgtctcgatcgaatccagggcgtgtctcgctacgcggagccaccgctcctgctggaggatgcggtacgccgctgcgtaggtccacagcatccgcgccgtgaagaccaaggagcgttctgcgtcggccacgggctgcaagtcccgatcgaccttgccgaagaagccgccgttggggtccgtggcctgggtggcaaagaaatcgagtacctcctccagtccgcgtttcgcccgcttggccaggctttctctttcgtcgtggttcaacatgtttgcgcctccctctgaagttttttctctgtgtgtaaacagcttaacgaaagcgcaacattcccgcaagcgtttgccgaacggatcgatgaattgaccatgaaacctctaagatctgtgcacattttcggtaaaaaaagagctcctgctctcttttcgtgataccgaaagagaacaggagcgaaaaaaaacgatgcacgcgctacgcacggggtttttcgcgcaaaaggggaagcaggaccgtgacgcaggtgccctcccccggcacgctgtccacccggagcccatagggttcccccatgagcagttgaatcttgcggttgatgttgatcaagcccacgcccatgccgctgctctgcacctcctcgtcctttgcttcttttcccctggctgccagcgtcttgcgcatggcctccaagcgctcggcgctgatcccggcgccgttgtcccgaatctccatggcaaaggcctcctccccttggagccttccgcacaccgagagctcgcccgccctggacaggctctccagcccatgaaaaatcgcgttctccaccaggggctgcagcaccatcttgaccgtccagcaatccaggatctcctccggcacgtcgaaccgcgtgcggaacttgtcgttcattcgcacgttcatgatctccacatagcgccggatgatgcccagctcgtcccggacgcgcacataggtatcccctttcacggagtagcggaagatcttggccatcttcaccgtgatggaggcaatctcgtcctggtcgttctccagcgcgatgccccgaatgcaggagagcgtgttgtaaagaaaatgggggttgatctggctttgcagggcggaaaattggagcttgcgctgcaggagttcggccgcatagagccggtcctggttctcgatgctctgccgcgtgctctcgcggatctgctccagcatgcggttgatctccacggcgatggattgcagctcattgctcgtggagatacgcaccggcgcggtcgcatcgggctgttccgcattccggagcagctgcgtccgcagctgcatgacgggcagggagatgtttcgatagctgaagagcaaaaaggccgtcgtccccagcagggcgacgagcaggaacgacaggatcagcagctgggagctgcgatcctccacaaacgcggcgcgcgggtccacgcgctgcaggagagtccagctcccctgctccaggggaaactgctggctctccagggacgaggaatccgccccgccccgcgcggagagcacgccgtcctcgccataggaaagcgaaaggtccacgccctccagcacagcggtgcgcaggacctcgagcacggcgctcgtccggcagagcaccaggcacagccctacctgtttggaaaagccctcgccgggaatcgcgctgttaaccggcaggaggtaggcgtaatactcggtccccgttccccccgccgggccgaagaagccggtgaagtgctcgccctccgcgccggagcgcgcatattcctccagcgcctttgccaggacctgcggcgcctgcgtgccgaacacataggtttcgcctgtgctggacaccaggcagacatcgacgatgttgctgttggtgttgatggcatagctgacgcttccggaatactgccggtgcagctcggcaaggcgcagcctgtccgtctcctcggtggtgaggatctcctgaacggtcgaggaatagcacaggctcgtcgcggagacgcgcacgttttccaggatggtttcgatgctccccttggcctgcatcgccgcggccagggcgtactgccgggtggagtccatcgacaggcggcgcacctgcgcgatggcggacagcccgatcaccagcagcagcaccagggaggagatttgaatcagcagcagctgcgtccgaatgctgcggaacatggcgcatccctcacttctgcttcatctgccgctccgcacggtatttccgcggcggaacgccgacctgcccggcaaagatgcgggcaaaatagcgcgagtcgtcgtatccgacggacgctgcgatctcggaaacgggcattgcagactttgccagcagctcctttgcgcgctcaatcctccggtcgcggacgtactgcgaaaaggtctgtcccgtgacgttcttgaagagctggctgcagtaattcgcattcagataaaactgcgccgcgatttgctccagactgagcggttcaaacgcgtgctgggtgacgaaggcaaggagctggttgaactgctggttgctgtgcacagtgggaacctcctcctgcgccggcgcgcgcgcccgccccgcggaaaggtgcgaggacagccgctccaggagctcttccgcatcctcttcgtcaaacggcttgagaacgtattcaaaaacgtccagccggatcgcattctttgcgtaggcaaattcggaatacccgctcaaaaccacgtacacggtctgcggaagagacgccttgagctcccggatgagctccaggccggacatttccggcatgcggatgtccacaaacaccacgtccggctgaagccttgggagcatttccagggcttgaatgggatcggtgagcgccgctacgagggaaaagccataggccttgaagggaaatgtgtgccgaatatcgctcagcgcgtatttttcatcgtcgatcagggcgactgtatgcacgaatccactcctcctttccttggggatgtccgtccattaaacaactccgcattgaggtttaacaaaatcataatacaatttgcgcgcccttgtcaaggcccgtttccgccattcctcgacaaattccgcgcgcttcaaggcgcgccttgccccaatcttgcaaaaaaacagctcccacacgcgcaagacccggcgcaaagcgcaaaaaagccgaaggggcctttccaaccccttcggctcgaagcaccaggacatcacccggcgaggaatcgctgcagctcgtcccttcttgcggcaaagtccgcaaggccgaggtcgtagagctcgcgctcggcggcctcggccatggacagggtgccgatacgcagcggctggctcggcgcaaagacgaaggcgcgcccctcccgctcgagggcaaagacgtcctgcaggtttgcgttgtagacggtgtggcgccggcgaatcgcctcgacgatgcgcggatagcgccggcaggcgagcgcatagaagggccgcatgccctgcggcttgcgcacatagtcgcggttcttggacaggaggaccacgatccggtcgcagccttgcgcaagcgcgcggcgtgcagggatcgcgtccgcgaggccgccgtcgtaatacggcgtgccctccagctccaccggccggcagatcgccggcagcgcgctggaggccatgatgaggcggtagtcgtcctggcgcatgtgctcccggccgaagtagaccgcctcgcccgtgcgcgcgttcgtcacgaccgcctcgtactgcgcggggttgcgctgcatggccgcaaagtcgagcgggtccttgcccgcggcccgcgtcagctccccgtagatgaactgcaggccgaacaaatcccccgtgcgcaggaaggaccgcaggccgaagtagcgcgggttgtggatgtgctccgtgaagaagcgcaggtttctcccccgctggcccgcgaggtagctcgccaggttccccgcgcccgccgagacgccgacgcagtagggaagggcgatcccctcgtccaaaaggcgtccaggatcgcggcgttgtaggcgcacttcatgccgccctccacgaccaggccgattttccccgcgttttccaccattgtctcttcccctttccgcgcttggcacattgccttcatgataccctcagagggcaaaaaagtcaacgcgcaagggcggcgcggtctccgcgcgcctggacgttctgccgggcggcgtcctgcctgtccctggcctcctccaggtccgcaaagtcccccaggtcggtcagccggacatccgaggcgtccaccccggcgccggggttctccgcctgctcccggagcgtgtcggggaacgccccgtccagctgcccgcggacgctctgcgcccggagcaggcagatctcttccagcgcgtcgaccgcccgctgatggtccgcaaaggagcagaacgccgtcggatcccgctggacatagggcgcgatctgcgcctccgcccgccggagggcggccgcaaagcgcccgctctcgaagtatcccgagatcagcctgtcaaagagcgcgcgataccgggcgaaatgcgcgtcgtgctgcatcacgttgtggtagagcgggcggttgcgcatgaccgcgccctccgccggggtgttgatcgggtagttgatcaggacgttggggtccctgaccgggttcgtcatccccagcgcgtaggtgccaaaggccaggttgtaatcccagggcaggatgcgcaggatcccctcctcctcgtagagaaagtagttgtgccccgtgtagcccaggtagctgtcccagttcatcacaaagacctgcacggtaaagtagcgcagcacctcctccacgtcgacggcggtctccaagtcttccccggtggacagggtcttcagcgcggcgatcacccgcgcttgatcggcttctgtggtcgggaacttggcgttttcgaagatgccgggatagctctccggccggtcgtcgatgtagcgcagcgcgacgtcggcgttttccgcgcgcagggagcggtaatccggcttgtacagctggccgtattccttcccgaagttccggcgggcaaaggcctcctccggctcctccaccgccaggaacaggccccagtcctccccgttcaccgtcacccaggcatagctgcagagcggcgtggggaccccctggaaccgcatcatgtcgtacgcgatgtaggtcttcaggtagctgttgtcctggaaggaagcgtccagggagagcttgtccagcccgtggtagtttccgccgtcctgaaactggtcgaactccagcttgaggctgtagcgggagagcccgtattcctccgtcagccgcagggagttgttgccctttgcccgaatccccacgttccggaacgtttctccgtcgatctccacggtgcaggccgcgtacgcttcctcctccgcgccctcgaggaacgcgccccagtcctcgatctggatgtccacggtgtgcacccggctgtcgtcgaacagccgggtggcgtattccgggttggcgctggccttggggagccccagctgctcaccgaacatcagcagcagcgcgagcagggcggccagggccgccgcgccgacgcagatccggtcgatgtgccgatgctgttccatcgccctagcccatgtagtcgccgttgtaggagaccagaacgacccgggacacgcccgccatcgcctccagctcgttgacaaaggcgctgctgtcctcccgcaggcggacctcgtagttgagctcgatgcggccctcgtctacgctcttgctcttgaggttcaggcgcttgacctgggactgcacaaacgcccgcgcccgctcctccgtctccccgttttcgcagtgcagcacgaggatgtagggggaatccaccgtcttctttttggcaaaggcgtagagcaccgcgccgatgccgatgctgccgaacaccgccagcgggatcagccccgccgccagcacaatgcccaccgcgatggcccagaacaggaacgcgatgtccatgggctccttgatggccgtgcggaagcggacgatggacagcgcgcccaccatgcccagggacagcacgacgttgctcaccaccgtcaggatcagcagcgccgtgatcatggccagggcgatcagcgtcacgccgaagctggccgagtacatcacgccgctatagcatttcttgtagatgaaaaagaggaacaaccccagcagaaaggccaggaccagcgcaatccccatgtccagcagggaaacgctggcgatgttctccagaaagtcggacttgaaaacatcccgaaacgtcatggcagcccctcctcttgacgaactcaatccaaccggcggcaaagggcgtacttggagcaggccgccgcccgcctcccgggcacctgcaccgccatgcggacgatctccggcaaaaacgcgtcgtatttgacctccagcaccgtgccgggacccgccgcgcgcatgcagaacacccccgggttcaaaaagtccacgctgccaaggccggtgcggatgtcccggtccagcgtgatgcgcacgttgccgggcgcatagagaaaggcctcgcggtcgtagcggacgatggtcttcggccgcagcccctgcccctggatcttgctgtacagctccaggagcagggcgtcccctgaatccagcaggaaccgcgcgtcgccgcggagcagccgctccgcctgctcccgcgtcaggcgggcgctgcgcttgccgcacaggccgttcaccttgtacttcttctccagccgcaggaaggagaggtccgacccgtagtagcgcaggcggaacttttcccgccggttgaccccgtcgagcttctcgcgcagggcgctgtcatacggggtgtcgaaatacaggctggtcacccggtaggcgccgtccggccccgcgttcgcgtcgcgggggaacagcttgccaagcctttgggaaagcaccagatcttcctgcgggttgatctggtgcttccactcgtgtcgcagggaaggggcctttcccggctcaatcgtcatagccggaatccccgtcgctgtagtcgctgccgccgtcgtcgtagttggaatcgccgtagttcgaattgccgtagttcgaattgccgtaatccgtcacgccgtcgctgttcgggccgtagtccgtgtcgtcatagtccgtcacgccgtcgctgttcgggccgtagtccgtgtcgtcgtagtccgtcacgccgtcgctgttcggaccgtagtccgtgtcgccgtagtccgtcacgccgtcgctgttcgggccgtagtccgtgtcgtcgtaatccgtcacgccgtcgctgttcgggccgtagtccgtgtcgtcgtagtcggtcacgccgtcgctgttcgggccgtagtccgtgtcgtcgtaatccgtcacgccatcgctgttcgggccgtaatccgtgtcgccgtagtccgtcacgccgtcgctgttcggaccgtagtccgtgtcgccgtaatcggtcacgccgtcgctgttcgggccgtagtccgtgtcgccgtagtcggtcacgccgtcgctgttcgggccgtagtccgtgtcgccgtagttcgccgcgccgtccgcgagctgggcgacgaggattctgtgctccgcccggacgaccttgcccgtcacggcgtggacgtcgtattcatactcgtttccgttggcggcaaattccagctcgaagatcggggtgccgtcgtcgtggtcgaagtccctgtcgtcgaacacggcctccgccgccgggacgttcgcctgggcgagcgcgatctcctgcgccttctccagggtgatgtagggcgacggctgcccgccctgcgcataggccgggtcgtagtccccgctgtcgatggtcacgatgccggaggaaaggtccagcccctggaccgcggcctgcgtgctggcgcacatctcctccaggaagtcgtcgtccgggagcacggagcccggctccagctgcaggacgatgttcttttcgttgccgtccacgccgtccacgaagaagccggcctggtggatctccacgatcaggtcctgcaggacctcgtcgcagtccttcccgatgtagtcggtgtagacctccacgatgcccttgccgtcctcgttgcggccggtcagggcgagcaccctgcccgcctcgtcgtactcgatctggatctccgggttgacgctcagggtgagggtgccggtgtcccgcagcgcagcgccctccggctccgcgcatccggtcagaaggactgtcagcgcgacagccagggaagagaccgctgcaaagagttttcttctcgttttcatgtgggttgctcctttcgatgcgtttggattggcctttgtcttgccttacatccatagagtacgggggcgggctgggaaaaccggggtgcgccggaaacttttttagaaaccctcaatcgtcgtcgtaatcgctgtccccgccgtcatcgtcgtcatagccgctgtcgccgccgtcgtcgttgtcgtcgtcatagccgctgtcgccgtagccgctgtcccccgcggggggcgcggcggtgggcgtggcggccggccgggtcggctcgggcgagggcgtcggcgagggggttgcggtgggaggtgtcgtgggcgttggcgtggcggtgcccgatgcggagggcctggccagcgcctcctgcgcgcggtcgtggtcgacgatctccagcgtgacgagaatccgcccgtccaggtgctccgtcacctccgtgcgcagctccgttccataggcctggaacagggcctcgtccggggcgtcgatcgagaaggagacccggccgccgtcggagaggaagcccatctcgatggcccggtcgatcagctcgtccgcgacggtcaccttgtcctttcccctgccgtcgtagccctccagcagcgcctcgccgtccgcattggtccccgcgagccgaacgaccgtcccctggcggttgaggtccatctgcacctccgggttgatggtcaggtagatgaaggaatagggctgcaaatagccctgatagaactgcgcgcccaggaaaagcagcaggcaggccgcggccgccgcgatcccgccgcggacccagcgcgccgggcgccgcctctccgtccgcatccacaccgggtcgcgcacggtctgcccgactttgtagtgcagattggccgccttgcggaagcgcccctcctcgtccaggaggatcgcatagccggggtggcactccatgaccaggtacttcatcgcgctgcccctcctttcatcacttgccgcaaatgcccgcggaggatctcatatccattggtggcgatcagcagcagggccaccaggtacttgcggtgccgctccagcgtcttgcgctccacgccggcggccgccagcggcccgagggggagcttcttcgtcttgaggaaggcctccagcagttccgggttctcctgcgcgtgccgcagcgccttccggcaggcctccagcgtgcgctgctgcttggggcagttgtccgccacgtcgtggaggctgacgccaaacgcctgcatctgccgggtcagctcctcgatttccatgcgggtcgcataccgggccaccgcctcctcgtgcgggtcgtcctccgcggccagggtctcgcccagggcggcgtcgtcctccccggccggcgcgtccagggagaggttgcggcggtgccgctgctccctgcggctgtagtcgatcagccggctgcggatcagcagggacgcgtagttcagaaacgcgccgcgggcgcgggaatacccgccgatcgcctcgtggaaggcgatcatggcgatgctcagctcgtcgtccagcccctccacgggcatgcggcgcagaaaccgccccgtctccgccttgatgaagggcatgtaggcgacgatcagctgatccgccgcctgtacgtcctcctttgccgcatagacctgctgaaggatcttgtgttcctctctcatgcagcagaatccctcctacatatagaaatacggtccctctctgcaaaaaccgggatcgatttgcccatttttctttgaaattgttcctttcccgctttcggcgcggcgcctcggctttttataacaaagggagttcaagaatttctctacgttttgtaaattccaggtaaatttcccagtcctccccaaacaagcgcggagccgaaggatctttcgtccttcggctccgcgccctgcggggtcagtggttgaagaaggggtcgccgccgcccgcggtggggtgccgggcgatctcctgcaggtcgtttgtgtcgcggaggttgagccggtagaggatgccctcgttcccctcgtaggcggagacgtaggcatacccgtcgtggatggcgaagaggctcatcaggccctcgatgcccccgggctcgcccacgagctcgacgctcgtctccccgctctcggacacggtgacgttcgagatggagagcgaccccgggcccccgtcaaagcgcatggcccggtacagcgtccaggccccctcgcccgcgggctccagggcggtcttgttgccgtcgtagccctggaggtcgtagccgcggaagatcaggcgcgtcagcggccccgcgggctcggcgagctccgaccattccccggactccaaatcgcaggagcggtagagcgtggaccagtccgcgtagttgacggtctgccaggcgaggacgccgtcctcgatgacaaagtacatgccgtcccagctcacgtcgcccaggaccgcgcggtcgctgccgtccagcttgcagctgcacaggcgcaggggcacgtccccggaggtcccgggctgcttttcgacgaagtagatgcggccgccgtaggcggcaaaggacgcggcgtagtagtcgttctccgcgtccacgggcaggtcgagctcgcggatgcccgcgccctcggggatgtagtgcatgttcacggtgcagagctcgccgctcaccacgcccagggggctggcgatggccacgcccgcctcctccccgatgtaggcggtctgcgcggggtcgaggacggcgcccggcgggcagcgcagggagatgctgcccgtgccctcgacgcgctctgaagtgaaggtcagcacggccgagagcgtcaggtccgcctcgtagggcaggcaggtgccgggcccgcacagcggcaggaccaggtccgcgtacgcgccgcccggcgtgccggagaaggtggcgcagacttcgcccgcgccgtttcgcacctcgcagacggcgtcctcgacgggcgagtcgtccgcccgggcgcgcacctcgccgctgatgcgcacgtatcccagcttggcataggcctcgatcaggtccgcgtcgtccgcgatctccgccaggcggtagtacttgtcgtaggcgttctccggcgtgcggccgtagttcacggagaggatggccatcttttccaggagggcgtccatctgctgttgctgcgcctcctgctccgccgcggagagcgtgagcgcgccggcggcgtggttgcgcgccaggtagcaggtcttcagatagatgtacgccgcgtcggtcagggccttgaacccctcctcgtccgccctgcgcgcggggtaatactccatcgtcgccagcaggaggcgctcgacgtcgctctgcagggggatggccagcatgctcatctggaagctgtgcgtcgcgtccacgccctgggcgatgccgggcaccaggtgcgaggagagctgcaggaccttgaacgccggcacggaggcggaaaggccgtccagcacccagctgccccagttcttggagacgtagtcgtagagcgagtattcgaccgcgttgctgctgtgcacccacgcggcgtgcgcctcgatctcgtccaggaccacggcgtcgctgtaggtgaggaactccttgttgccgacgatcgcgcccacgccgtagctgctcagctcgtccacggaggcgtaggtcgccgcggtgccgagcatccccagcaccgtgctcacgcccgtcaccgcgccgtccaggcccccgctcaggcggccgatggcctccttctgctcggtcagggcgtcgatcttgtccagcgcctcgctgaaccagcgcgggtcgttggccgcgaccagcgggtcgctggccacgcgggcctcgaacaccgcgtccatcaggtccaggtcgaccgcggcgttgccgccgatgtccgcctcgaccgccagcacgttgagcacgtccgagaactcggagaccgtctcctgctggaggaagtgcgcctcgtccggcagcacgcagagcagctccatcgtcagctcgtccgcaagctggcgcacaaggcgctcatacgccgcgtctgagaagccgaagctcgcctgcagcagcgccgcccaggccgtggggtccccgtccaggagcttggccgccagctgcgccagcgcgctgtccgccgcgagcagcggcaggttcgcatccacataggccgccttgcaggacgcgctgttgttgtagaggtaggccagcacgtcgatcacgccctcgctcgggtcgtaaacggtcaggaagcgctccccctcgatctgctcctcgtgcaggccgaggtcgaagaggatgcacaggtcccgcagggggacgtagaacttgccgcccatctccagcggcgcggcggtgagctgcatctccacgtccacataggtctccaggaagtccccggcgaagaactgcccctcccgccggccgaccgtcaggtacaggttccgctcaaaggcggagatgcgcatcgtgttccccgacttgtcgagcgaaaggcccaggaccgagcggatctcgtcctcggaaaggtagaggtgcgcctcgtagaccagcgcgggcacataggccttctccagggtccgaaggccctgctcggtcgtgccggtctcgtactgcatgggcagcagggcgtaatagccgtcctcggccgggtcgtagccgcgcacgtcctccccaaaggggatgtaggggccggcggcctcgtcttccccctgcgccagggccgtgccgccgggcaggagcaggcacagcgcgagcgccagtgcgagccattttctcttccatccgcgcatgttcacgcttcctccctccccgtttcctgcgccgcgggcagcgccccggccacgatgccgggcaggccgccgtagaggccgtcgatgagcgcataggagttgcgcaggcggtaccccgattccagcgcctcgatgggcgcctgcgcggtgacggtgcgctccgggtagccgccctgcgcgaggaccgcgcgcagctcctcccggagcgcctcgggcgaggcggcgccgtccagctgcggcaggatctgcgccatgtccggcccggtgatgacaaaggtcaccgccgcgcccgcctccacgcggtccggcagcgagaaggcgacctccgtctgcggcagcaggacggagagcaggtcctcctccgcctccggagccggctcgtccagcagggcggcgtagggctccatggcttcgcgccgctcctcctccgtgcgggcgaggtcgtccgcctccgcgcgcgccgcttccgcccgcggcgcgccgaagcggagcccctcctccagcgcgctgccgtcgccggcgcgccactgcgccgtccactgccgcagggccagatacagctccgccttgggcggcaggccgcggaaatagatccacgcgccggcgcccgccgccgcgaccaggacgacggccagcacgacgatccacgcgcggctgcgggaccgccgccggcttcgccgcttccgccgcctcttccggttgaccgtttcgcttgacatgctgactcctcccctttgtttcgttttggctgaaaagacgggcctacagcgcgcgcctgtgcgtcaggaagtagttgccatggcccggcacgacgatgtccgccttctccatcagcaggtcgatggagcgagcagaggcggcaaagtccgcgctgttgtaatatcccctgcggtccttgaagaagtcccgcgtcattacgctgtccccggcgacggcgaccatcccgtcctcgctcgcaaagagcagcccggcaaggcccggggtgtgccccggcagcgggagcacctggattcccgtcacgatctccgccccggcggcaaagatccgcttcgcgtgctgcggcagggcccggcggatctccccggcgtcgcccggcgccgcgagccacacggcccggggcaggtccgccatgcccacgtagtggtccccgtgccggtgcgtcacgtagacgtagtcgaccgcctcgggccgcaggccgcagcgctcgtccagcacctgcgcgagcgccgcctcggagaccgcggggtccaccaggatgcgcgcgccctgcggggtctcgatcagcgtcgaggtgcacagcgcgcggcggtaggacttcgcgtcctcctcgccccagtagcggttccggctgaagcaccccagcgtcagaattgtaaagcggttcatcgcctttcccccttccccttgcgcggcttacgaatagcgctcgtggagcgcggcgatgtcgatccgcccgctcaggtcgttgcaggtggccacgttcttctccacgatctccgcgtcgcgcatcccgagcagggagacgtccaccaggggattggagagcacgaactggatcagcgcggcgttgtagtcgaaggtgttctccggattgaccaggcgaatccacttctggaagattccggaggtcgcggtgcgcatgttgacgatgccgagcttctgctcttccgcgtcgtagaggctgccgcagcggaagtacgggtcgtagggatgctggaagaggaagttgtattcgatctgcatcacgtcgaactccccgcaggcgatcagctcgtgcatgacctcgttctgacactcgatgctaaagcccaggtacctcaccaggccctcgtcccggagctttttgagctcctgcaaaatgccgccctcgcgcaagatctcccgcccgacctccggccccaggtaggagccgtgcagctggaggaggtcgatgcggtcccgccgcaggttcctgaggctgcgctccagggaggcgcgcaccttcttgggatcggtcgggaaggcctttgtcgccaggaagatctcctcctccgggatgccggcgaggccctcgccgaagatctcctcgctcgcgccgtcgccatagccggccgccgtgtcgaagtagttgatgcccagctcgtaggcgcggcgtatggcggccacgacgccctcgcggtccgcctgcttctgcggatcaaacgcgccggtgtagttcttcaggcccgccgtcgccccgccgaacccgatccggctcaccttgcgcccggtcttccccaagatggaatagatcattgtctgtgccccctcgcgctttctttgttgccggtcttggttttacccaaacaaatgcagacaaaacgcccgtcccacgcgaattcgatcgctttgggcgtgccttttgcggatttgttcttccattataggatttctccgggcattcatcaagccccaaagcccggcgaaaaaaactttcttcccccgggcgcaaagggtttgcctttttcgcgcggatgtggtatcctaatgaggtaattgcatacttcctcgatgaagccctatgaaccgctgcggtggaacttggggtcaagagagctctggagaatctcgctggtgagtgccgaaggtgcaaggcccgtttgggctgaatctctcaggcaaaaggacagagcagaccgggtttccggtcccccgcgcgggggctggggacgttcctgtcagttgtccggaccgtggggcctctccccgggccggtttttttcgcgctttttcgggcggaagtggagaaagagagttgacggcaatggcgtccctgcaatctgcgctgctggaagtggtcagcagcatcaacaactacctgtccagctacatcctggtcatcctcctcatcgccgtggggctgtggtacaccatccgcacgcattttgtgcaggtgcgctgctttggcgaggggatgcgccgggtcttcggcagcctgacgctgcgcggcaagcgccacaagagcggcatgagctccttccaggcgctggccacggccatcgccgcgcaggtgggcacgggcaacatcgtcggcgcctccggcgcgatcctgatcggcggcccgggcgcgatcttctggatgtgggtgatcgccttcttcggcatggcgacgatctacgccgaggcgacgctggcggtcaagacccgccgccgggacgcggacggcaccatccacggcggcccggtctactacatcacgaccgccttcccggggcggttcggcaagttcctggccgggttcttcgcggtggcgatcatcctggcgctgggcttcatgggctgcatggtgcagtccaactccatcggctcgacgttctcgacggcctttggcatcccgagctggatcgtgggcgttgtgctggtgatcgtgtgcgccgtcatcttcctgggcggcatccagcgccttgccgcggtcacggaaaagctcgtgccggtcatggcgctggtcttcctggtgggcgcgctggcggtgctcgcggtgcggattcgctacctgccggagaccttcggcctgatcttccgctacgccttccagccgcaggccatcgtgggcggcagcctgggctacgccctgaagcaggccatcacccagggcgcaaagcgcggcctcttctccaacgaggcgggcatgggctccacgccccacgcgcacgcccaggccaacgtcaccgatccccacgaccagggcgtcgtggccatgatcggcgtgttcattgacacgttcgtggtcctgacgctcaacgcgctggtgatcctctccacgctctacgtctcggacgggccgctggcccagggctacaccggcgcaatcaccgagacgctcaacagcgcaaacctggcgcaggcggcgttcggctccgtgatgggcgaaacgctcggggcggcctttgtggcggtctgcctgttcttcttcgcgttctccacggtgctgggctggaacctcttcggcaagatcaacgtgatctacctctttgggaagaagtccgtgaaggtctattccgtcctggcgctggcgttcctgttcttggggacgctggtatccaacgacctggtctgggagctgaccgacatgttcaacaacctgatggtgctccccaacgccatcgcgctcttcgccctgaccgggacggtgctctccatcgtccacgcgccccgcgaccggcgcctcccccggcgcacggcgcacaagtgaaaaaaacggcggaccgccctgcgcagggcggtccgcttttttctgcgccggtcagcgccgccggcgcgggcggcacctccaggcgatcgag

SEQ ID NO: 2846 - DNA, 32759 bp, Unknown
  16S sequences of unknown bacteria
agcgtttttgaaaactttttttcgaattttttatttttctttcgaatttccgttcctcttcgcttccagaggcctctctcgaggacagcttgtttatattatcatatccttactacttttgtcaactatttttatcccttttttttacttttttcgactctttttttcaccctcccccttcgcttgacttcttcctgtttctatgctatcattattatatagaaaaacgctgttaaattgagcgcgaaaatattcgacaatgctctgcgcttgcatattttcgcttctataataacatagctgacgttatgtttgaataaggctcggaaatgctgataactacttcgtgcttccgcatttccgcacgggaggttcccttgaaaactctgcgaattatctttacgctgatcgcggccgtatttgcggcgctcgtcattccgctcggcgcgcttctttcctgggcgtgggcggggctttgcggcctcggcgcctttctctttttcgggctgatgctcctttgcaagcaaaagcaggaggaaaacgacaaacaggcgcggcacgccgatctttccgagcttaattttcaaaatacgcagccgccgcaggacaaagacgggaaagaggagcgctaaaaatataaaaaagtttcttttttaacaaatttttcaccgcagaatttaatttgtatgttgacaatcttatcaaaagagcttataataatagtatcaaaattctatggaggctttatatggacgcatacagaaaatggatcgattccctcccgcttctggtaaaaatcattttcgctttacctatactcgacggaatccttttcggaatctaccgcatctgcaaggggaaccttcccaatatcgttctcgggattatctggatttttgtcggcgcgacgattttctggattctcgacattattttcctgctttggaaaggaaaagtattagagctttaacctcattataacgaaacggcgacctcatgcatgtgaagcatgaggtcgtcgttttttaccgaaataataatattattatatgtcgcatacgcgcgcacgcgggaggatcaggggaaaatttcagtcccgccgctcgaagctttcgatcatatccagcatctcctcgaagcgccacaaatcctccgccgaataataatcgatataaatccgtccctttttatcgttgccgatgagcgacaccttagtacggaacaccgaacgcatccgttcgacaaacgccttgagttccgcgcttttggccgcggccgccgcggctttttccgactgcaacacctcgggcggcgtgagaaacgccttgacggcgcgctccgtttcgcgcaccgagtagccgcggcggattgcctcctctgcgaaagcatactgtttttccgcgggtacgggaacaagcgcgcgggcatggcccgccgaaagcctgccgctctccaccagccccaccacttcgggcgaaagggtaagcaggcggagggtattggcgacggcgggacgggatttcccgatagtccgcgaaatatcgtcctgcgtccagccgaattccgaaatcagccgcttcatcatatatgccgcttccatagcccccagcgaatcgcgcttcagattttcggtgagtgcgaatatctccgcgtcccgctccgaaaaacgatagacgcgcgcggggacttcggctattcccgcccttttggccgccagcaggtcgcctgcgcccgccagcaatcggaagcgtccatccgcgcccgcattgaccacaaggggcggaacgccgttgatgagcagataggccgcccgctttttcagcgccgtctcgtccgcggccgagggctcggcgccgccttcgatatcatcgacggaaatggttttcaattctccttcctgcgcggggatataaatttttttcgcgtgtttcataagccgtttcccgataaacaaagagccgagagatttctcggctcaacctgtttcaacgccccgaagagctcaattatttcccgaaagcttgggggtcagatggtcgggcgtaggatttccgaaattttcaaaagggttctccctgtgtttatcctcttccctgtccataaacgcaatgacctccgcataggacgcgccgttcatgagcatggacacttcctcggtatagatcgtttctttttccacaagcacgcgcgacatattgtcgagaatggaacggttttccgtcagaagcttcacggcgcgctcgtgcgcggaggcgaccaggcgcctgatttcgtcgtcgatttccgccgcagtcttttcggaatacccgtcgcgggcgccgccgccgtattcgtattccatgcccataaatacgggctgatcggaatcgtaggccaccaggccgagcttatcgctcataccccactgtttcaccatgcggcgggcgatatcggagacgtgctgcaagtcggcgctggcgcccgtcgtcacgtccttgatcaccaattcctccgccactcggccgcccagggacatgcagatgttatccacgagcttgttgtaggacacgtcgttgtcgtccgtttcgggacgggtcatggtatagcccgccgcgttgccgcgggggataatggacacctcgtgcacgggatcgcagtttttgcaaaggcaggccagcaccgcatgccccgcttcgtggtaggcagtgcagcgcttgtcggcctcggtgacgacgcggctctttttctgcgggcccatcaatactttattgatgccatcgtacaattcgagattgccgataagcttctttccgtttctcgcggccaaaatagccgcctcgttaagcaggtttgcgagatccgcgcccgagaagcccgccgtaatccgcgcgaccgtcttgaaattgacgtcgggcgcgatgggcttgtttcgcgcgtgtaccttcaatatctgctcccgtcccttgacgtcgggaaggttgacgtgtatctgacggtcgaaccgtcccggacgcagcagcgcggggtcgagaatgtccgcacggttggttgccgccatgacgataactccttcgttggtctcgaagccgtccatctggacgaggatctggttgagggtctgttcgcgttcgtcgtgaccgccgccgagccccgcgcctctgcgccgccccaccgcgtcgatttcatcgacgaagataatacagggctggttctttttggcgaggtcgaacaggtcgcgcacgcgcgccgcgccgacgccgacgtacatttccacgaaatcggaacccgaaacggagaagaagggaacgcccgcttctcccgcaaccgcctttgcaaacagcgttttgcccgtgcccggagggccgaccaaaagaacgccgcggggaatccgcgcgccgaggtcggaaaacttcttgggggtcttcaaaaattcgacgacctcctgaagctcttccttttcctcctccgcgcccgccacgtccgcgaaacgcaccttgaggttgttctgcacgtgtgccttggttttgcccacgttcatcaccttgccgccgcccgaagcctggcgcaggatcagccagaaaacgaccgccacgagcacgacgccaagcaccgtgataacggtggaccacatgctgcccgcattgggattggcgtagtcgatggcgacgccgtcggccagccactttgcaacgatcgcgtcgttggaggcgtaaaagttccagctgaagcaataatagtagtttttggtgccgttggcgtcgcggaaaagcccttccagcttatagctgctgatgcttacttcattgatttcccccgcctccaccttggcgataaactcgcttattttaatctgagtatatctcggggaaataaattccataaataacagcccgatgacggccaccaatacgacggcgatgaccacccagacgattgtcttggttttcttgttcaatgctttgactccttgaaaattatgatactttccgcgcggcgggcgcgaagaactccttacgaaaacgccttcgggacaaacgccccgcaccttacggctattttacattttaccacacggccgcttttttttcaagcgtttgcagtataaatttctaaacatttagcaaacattcacaattttaacacgattgttttccgctttccgcgcgccctttcgcacgcgggattttttccgcttccgcccgataaaagccgcctatattatcttgaactttcgtcaaaaaattatgcggcgcgccctcgggcttttcgactttcttccctctttcccgacaaggtgcgcactttttccgaaaaagaagaaagaatttacttaaaaacgcttgacaaaacaatactatgcggtgtatagtatatcgtgtaaggaggcatacggcatggacatgcagctgaaaagaggtttcctcgacgtgctggtgttgagtacgctcctgaagaaaaactcctacggataccagatcatcaaagacctggcgcccgtgacggaaatttcggaatccacactctatcccattttgaagcggctggaagcgagtaattttctgacggtgtatgcggcggagcacaacggcaggctgagaaaatactacacgatcaccgagcggggaaagcggcggatagacgattttttgctggagtggcaggacgtaatacgcatttgtgatttcattagcagagaaaggagaagaaccccatgaacaaacgcgaatttttgaaggcgctggaaaaacgcctgaaaaatcttccgaaaaaggaaatccagaaatcgctggccttttattcggagatcatcgacgaccgaatggaggagggagactcggaggccgaagcggtaaaaaatctcggcacgcccgacgaggtagcgcgggagatcctttccgacgcctccttttccgccattgtccgcggcagcgcggagcgtatcaggacgaaaagcggcggcaatacgctgttcgtcgtgctggcagtcatcggctttcccatttggtttcccctgctcgtgacggcggccgtgctcctcttttcgggtgcgatcgtgctcgccgcgctgtggatagtcctcttcgccgtactcgccgcgcttttattctcgtcgttggtgggcgtcgtcggggcctccgtccacttctttacgggagagacggccgccgcggtagtgcttttggggttgtccgtcacggtgttcgccgcaaccatgctcctcgcaccgctcgcaaaaagagcgctccgcttcctgtggacgacggcgggcaaatggctgaagggcatcaaaaaaatgtttgtcaatagacgggaggaacgggaatgaaaggcaaaacaaccagaaacatatttctatttttattggccgtaggcatacttatctgtatcgcggggcttgcaatggccaacttcgaccccgcccgcctgcaaaccggcggccccttctccctccaaagcttttcgacgacggagaaggtaacctccctctctatcgacgtaaacgaagcggaagtacggctcgtccgcgcggaggaggacgtttcggaattcagcgtgtcctacgaggaaaacgccgtcgtgaagtttgttcccgaatacaaggagggcgtcttttccctcacctcggtaagggtcaaatggtaccgccgtatcttcaccttcggtttcaaaacgcccctggtcacggtgcggcttcccgaggagagctacgaacatttttccgtcaagacccgaaacggggccctttcgtccgagagcgagctttcggcaaagagcgcgtacctctctacctccaacggaaaaatcagcgtacgaaatctgacgcttacgggcaacctcacggcggaaagcagcaacggcgccatgctgttgagcaatatttccgcttcgtccgttacggcaaaaacgagcaacggaaaatttgaaaccgaccagcttaccgcggccgatatctacttaaaaacctccaacggcaagatcgacgcgcagaccttgctcgccgccaattcgattgtgctcaagacgagcaacggcgcgattaacgccacggtcgtagggacggcggaggatttcaggatcgacgcaagcacctccaacggcagcaacaacctcgccgataccgccgcgggcggcaaagcccttaccgtccgcacgagcaacggcaatatttccgtattcttcctcggctgatgaaaacgcggcggattttttgaaaaaatacggttgacatgaaattatgagagtaaaaattccccgcctgaacttaagttatccacggcgaatgtggataaaaaagggttgtccacattaaaattttttattttgtggataacttttccgacaaatacacatactaatgcgtttttgtctcttttcaggctcttttatccccaatttccaagcaaattgtggataacttatccacagggttataaaaaagagtgtggaaaagtatctgtttggggagaactaagccaattttttggggataagtcagattttttcgaccgaaatccccctgtttccccctttgaagcgaccatatgtttcggtaaaaagggggttatccacaatcatccccatatgaatatttgtatcgggcacgtcccgcgggcaaaaaaataagggggaaatctccccctgacggaactctttattttcaaggcaaccttgcaaaaatacatactttgcgataatcgagcgatcacatcgcgcggcgtctccttaaacgatattgcggcgtcggcttctgccgtgcatttcccaaagcaaagaggagaggccgtcggagataatctccgccatcgaatagacgagattcagccgagtggtattgagcaggccgtagcttaaaagggatttttccgcgacgatccccatcacggaaaggtcgccgatgctgcccagctttttattggctcccgctccgggaaagaggggcgcgtcgtttaccttgatgaggccgatatccccttcgctgcccacggccgcgtcaacggcgatcacttttctgccgcggtgcgtctcgcgcagaaaggtgcgcatatatttgatttccttggccgtaacgggcgcggaaagggttccgtataaaaaacagtttagtccctgcgtcttatatttcagcatcgagccgacgatcggccccaggctgtccccgatcgccaggtcgctgccgatacacagcacgacggggagctcaagctcctcctcgggagacttctccgccgggcgtttggttcctccgccgcgggcggcttcgggcgccgagcgcaaaaatttttctacggccatcgccgttccgtcggcggcaagcttattgaaaaggttaaaacaatattccatggaaagggctccttcgaaaacaaaatacgcgtacaatcgaaaggattattgccctttttatccctcttatacataccgcgggccaaaaatcggacgcccgcctccaaagacttgaattctgtgaaaatatatgttaaaataataaagcgttgcgggggataaaagacctcgcatacgtcaaaaaacaatcgggaggacaaaacaaatggcaaatttgttagcttcttttcaagcgggatacatcgcggacctcgtctgcgccgccatattaatcatctgcgctttcgcgggcctcaaaaaaggcttcgtcaaaagctttttcggcctcgtctccacgctcgcggccctgatcctggccttcgccttagcttccaccgttttaggctggatcgactccgcgttcggcatgaccgaatttttcagcggaaaattcgaaacctctttccttaaaatcaagggctttgacacggacatctccgccacgggcataaacgccgcgctcgggagcgtaaatctgcccggctttatcaaagacgtcctcgccaaaaagctgggcgaggtaaacaacttagcgcccggtacgaccctcgccaatcaggcggcgcccgtagtggcgcagtttgtaggccttttgatttcggggctcgtcatattcgtcgtcgtaaagcttctgctgctcatcgtggaaaagatacttacctctatcgtccgttcctggtcggtggcggcggccctcaacgggcttctgggcttcgccatcggcgcgctgaaagccgtgctgtttatctgtctgattctggccgttctttcgctgatccctgccgaaccgatcaccaccttcttcgataagacgctggtgctcaaatacctttacaacgataacccgctgaccaagcttttgggtatgtttatcaaattctgaacgttttctctttcttggagcccctttttcgaggggctccttttttatcgggtcaaaaaaattgacacgcgggataaaaaatgttataatacgggctacggaaggttttcggagaacacttccgaataaaaaaaccgaggtttaactgaatatgaaaggattttttactgctaagcggctttgccgcgcggggatcatcgcggccctctacgtcgctcttacttatgcgttcggcgcgctgtcctatcagggctttgtgcagatacgtcctgccgaagcgctctgtatcctgcccctcttctttcccgaggcggtgcccgcgctctatatcgggtgtatgctggcaaacgtagcctcccagttttggatttacgatgtatttatcggctctttggcgaccctcttcgccgccgtggggacctggcttatcggaaaatttttcagaaataacgcttcgaaaatcgcgctcggcgggctctttcccgtgctgttaaacgcctttgtcattcccgtcgttatcgtgtttttatgcggcgatctgtcctacggaacgcggacggccacctattgggcgctggtcggctccctggccgcgacggaagcgatctgggtatatgccctgggcgttcccctctatttttttgtcaaacacatgcgcgaaaaaaatatcgccgccttttccgatttgggaaacagacggcaaaaagaaacaaaataacggttgaaaacacaatcccccgaaaggccgctccgagcccttcgggggatttttccttacaaactctctgattttttcctatgggcgcggacgtaggaaacgggcacgtccatacgcgcggcgatttcctcctccgtcatacccgcagcggcaaaacgcgcgcacaccgcgttcatgttttcgcctacctccacgatatgcccgtcgggatcgaaaaagcgcacgacgcgctggccccagcgatgttcgaatacggaatgcacgtattttacacggtccgtcgatttcagcctttccgcgaaagcgtcaaagtcgtcctcctcaaaatagagctcagcgtcctgtccgccgtaagatacggcttcggagcggataaatcccttccagctttcctccgtctgcaagcatacgccgcccgtcaaagtgacgttcgcgccgaaatcgagaacgacgcgaaggttgagaatttccttataaaaggcttttgaggcagccatgtctttgacgacgagcaggggatttttgaatttcatggttcaccttaaataaaatcgaaaaagtttctctcgtcggccgccttcgcgtcgcccatcgagcctaccttcagacagaaatcgacgtccgtcagctttttccgcttctgtccctcttccatggaaaaaatatgcttgccgttggtatagacaaattccttttttccgttttcctccacgagacagaaatccgccacgcccgaagccagctccttttccgcctcgccgccccgagcgagcttcaccagcttccacgaggagggaatgaagccgtaatcctcctgctttttattccttttcaactctttatccacattgagaagattattgttgataaacacctttttcgcgtcgcgcttgccgtttttcgccgcgcccccgcccgaatccaccgcgccgcccgaaacgagcgactttcccgaaaagcacatgacaaacgtggaaataaagcccgcgattgcctgtacgatcctcacgggaatgagcagaacctccaccagcggattgccgcccgacctttccctgttcggtttcttgatgcaatatacgtttccgtcggcgtccgaaaggggttttatgtaggaatatttgggatcggaagcgatcgcctccacgtccaaagtagagaggttaagccgatagatctccgagggcatgtattcaatgaagttgttgtttccgtccctgcccaccccgtaggagttaaagaggacggcgtttccgctgcggtcgaacgaaggattttcgtcgaggctgtccccgtccgtgatacacttgtaatcgccgctgcctttgggaaagagcgcgatgcgcgaggtgacggaatccacctgcacggcggccagcatctccccgtcggagttataggagacggacataaattccacgtcgttggcggagacgatatgcgcttccgtcctgatttcgtcgtccaaaagcttggaatagattcccgacgaatcgttgacggaaaaggcataaacaatgcggttttcgtcctcggtaagcgctacgccgtggatcgcggcggtgaccgaggtttcgccccggccgccgaacagatatccctcctccatcagctccgccgcgtgcccctgcgttttccattccttggtttttgcgcttctcaccgccgtctcgcggtagtgtacgatataattgctttcgaacttctgcacagcgccgtctttatagacgccgagctgttctccgtcgctgaatacgaatttcatgccttcgctccgtttttttctttattatataacaaacggagcgcaaaagcaaacgttttaacgctccgcgccgtcatttatgcgcaacctccgccctgtcccttcaaaaatgagggtcgtcggggagataatatcccggctcgcagatcacggccagctcgctcatgaacccctttcggcatgcgacgacgagctttcccgcaagaaacgcttccaccagcttatccagctgttttttgctgtaaatatagtcggttgtcgcctgatgttcgatctgtgcccctaatttcccgttgtctatatagtacaatttcaaagcgtgaagccgaacttcatctccttcccaggacggcggcgggctgaattccatttccgccgcgtagggcttaatgaggaaaaattccgacgctttttcggtatatgggacttttttacgtacaaaaatcaattttgcgcacaggagcacgaagcccgcggccgcaaaagcagcgcccaaaaatttcacaaaaggaaaaatcaggccggaaagcacaatcaatcccaccccgatacaggcccacccgaagagattgcttacccttacatttttcgaatttccttttccgcattgcatctgtttcaaagcggcgttgaaagcgaaattcttttctatgtactcccgctgattgacgattttatcaagctcaaagggcggaggcgggtcgggcagataaatttttccttgttcttcccaatccgaggctgcgggcagggccgtctccccgtctccttcgtccgaaggcttttcttttttttccgttttttcttccgaaaaaacactttcttcggaaattgtcgtttctttttcggaaaagggaaaaaccgtttcgttcaaagcttccgtctctccgtccgcttcttcctttgaaaagtcgaaagctctttcttcctctttcggaagcgccttttcccgagcgttttcttcccctgttttatcgccgcctcgggaaagctccccctccaagtcgaaatccgtttcaaaccacgccgtgccgtccgctctcttttcgtaccaggcgggttcggccttcgcatcttttttttccttatcttcttcaaaattctctttcattttctctttctttccgtcggcgaatacgaggcggaaaagctaccgccgttccgccccgcgccgtatttttcttgccggaaatgcattatttgttttcttttttgtcctttacggaagcttccgctccgttttcctttgcttccgccgcggcgtcctccgccttctgcggcgccacgatcttgggcagggacagccccgccatgttatacacttcctcgagaggcggcaggctcttgagcatacccgaaaggaaatttgccgtagaggtctttccgtccttgttttcgccgttgtcccaaacggtaaccttgtcgatcttgagccccgaaattgcctttacctgttcggaaacgatattctccagcttttcggtaatcatcagccgaacggcctcgtccgcagagcctgcggcctttacgatatcggcaagaccttccgcctgacgggacagcttttcctgaataccgcgggcttccgcttccatcttggcaaaaatggcgtccgcctcgcctctggccttgcggcgcatctgttcggcctgcgcttccgcgtcgatttccattttcttcttttcgatttccgcggcgacgatgatatccgcttcgcgggtggccttttccctttcggcacgcgcgacttcggcttccctctgcgcggcataggattcctcgagggccttcgcctcctgaatcttttctgcggaaacggcgatcttcagcgactcggcttccttttcgcgcagaattgctttagattgcgcgatttccgctttcgatttattttcgcccgtaattgcggcggattcggcttccgcgacggaaattctttcctgcatcttcgcgttcgcctgaccgacggagccctttctgtcctcctcggcgacggacactttcgcgtcgttgatcgccttcgcggcggcttccttacccaatgcggtgatatagcccgattcgtcggagatatccgtcacgttgacgttgatcagcttgaggcctatctttttcagctcgccctccacgttgcgggaaacggcgtcgagaaatttgtcgcggtcggagttgatttcctcgatatccatcgtcgcaataaccagacgaagctgaccgaaaataatatctttcgcaagctcagaaatattctgaagcgtaagccccaaaagacgttccgccgcgttctgcatgatcgcgggatcggtagagataccgacggtaaaaatagagggtacgtcgatacggatattctgcttggacagcgcgcttttgagatcgacgctgatcgaaagcggggtgaggtcgagaaaggtatatttttgcaggaagggcaccacgagggtgacgccgccgtgcatacatttggcgcttctgtacgtgccgtctttgtttttgcctatcttaccgtggacgaccagcactttatccgacggacaggttttgattcgggtcatgatgaccagaagcagcataaatacgatgagcaccgcgacgatggcgacgactacgcctacgcccgttgcggcaagcaatgcgtgattaaacattttttctttttctccttaaatttttatatcggtcaaacgcagagcgcgttttccttaacaactgttttaaccttctctcacaaatcttttttgtcgtccgtttggattttttcttccttttctttttcctctgcggcgacggtcgaaattctcttcactaccatgtaatcggcgccgatttccgtgatgaccaccctctcgtccacggggatacgctcggtttcgtccgtaacggcgtcaagctcggtataagcgccctgcgcggtgagcacaatcttgcccctgcccgtgcgggaaggcgcaatggatacatacacgccggcctcttttccgatcagtttttctttgtcgaggttgccgttgcactgtaattttgcaatgcccttcaaggccagcgcaactaaaatcatggatcccaaccccgagaccagcgacaacacgatggcaagggcgatgtttttggaattgatctgaaggatcaaaagcccgacccagccgccgatggcaaaaaaggcggtcaaccccttgatcgtaaacagggaaatgccgagatccccgtccgccgaatcaaacgccccgtctccgccgaaatcgccgtcagcgtcggcgtccgctccgccgccgaaggaacaaatcatcataataatctgaatgacgagcagcaccgtgcctataacggcgatgtaaaaataaattttttccggcgtcgtcaaagaattgtaccaattcatataaaaatctccttttcgagcttttttgcttgcaagccgaccgaaccaaaagctttttcgctcttctaccgagcggacgaacgttgcggggcggagcggaattttccttccgcgccgtggacgagccgtgcatttttaccgaaaaagacccatacatcgtatgtttccacacagtgcatgagtctcattttttaaaagccatccgaacggatttgcccttccgttagaagtcggatttcgttacgtatgatcccgaaaggaaccgtgcgcaaattactccctcaacttgcagtatcgtcagtctgtcaagcttgttgttcagtttagatatattatatcacaaatttcggaaaagtcaagggttttttgtgaaatttttccgaaaatcgtatcaaaggaaaaaaggacgggttaggtcccgtcctttttcgtccgtttttattctttatcctgattgtccttgctgttgcccagatacgtcccgaagaaatcggacgagggctttttataggaagaggtacggggcttgtcgtagggcttgcgttcgccgttgagatcggttccgccctcgccgcgttccgaatccctgttgtaaggctttctatacccctctccgtcgcggttatacggcttcctgtatccgtcgtcgcgtccgtaatccttgttatagggcttcttatagccctctccgtcgcgattatagggcttcccgtatctttccccgtcgcggctcacatccttgttgtagggctttttatagcctccctcgcggttgtacggttttttgtagccttcgccgtcgcggctcacatccttgtcgtaaggttttctgtatccgccgttatagccgcggccgccgtatcctctctgcgggcgttcctctctcgcgggggacgcggggcggtcgggatagcgcacgttggacggcacgatcacgatatagcggtacggctccttgccctcgctctgcgtggtcacgtcctccctgcccgaaagagcggcgtgaatgatccgcctctcgtacgggttcatgggctccaatttgagcttcttttcgaaacggatcgccttttccgccagcttgttggcaagattttgcagcgtgagttcgcggttttcgcggtaattttcgcaatcgaccacaactcttttgtattcgtcgcggcccgtattggccacggctcccgcgatcgtctgaatggcgtccagcatcgcgccgcgcttgccgatcaccgcgttggtattggccgcggtaacattgatttctatcttttcctcttccctgcgaagctccgtgctggccgtaattttgagaatgtcaaacagcccttccaaaaactcgacggctctttctccgtcggtgcggcctttcgcgtcgcagtggaccgccgtctgcctttcttcgggttccttttcctcttccgcctcggccgacgcttcggcttcttcgtctccgcctttgggggcgatttccacgcgcgcttttacgtatccgaataatttcttcttcccctcctccaaaacccggatgtccgcttcctcttccttcagcccgagctctctcaagccgtcccggacggcctcttccaccgtctttcccgtaaattcctgatactcccgtttcattttttactcctttttattgcaggcgtcactttttattcttttttcccgcttttttgtctttatccttttcgggaacgtaaacccgtcccggaaaacgcttgttgtactgctcctgaagcgccttttcttcctttttgttcatgacgatctccacgaccttgttgatgaccagcgtcatgatcagggacaggatattgctggtgaccatataaatggagaaggccgcgctgtacataaacgcgaagatcgcaaacataaccgtcatgatgatgagcatcatcttctgattcatcatgccctgcccgtccaccgaggaatactgcgtctgttccttctgcgaacgcatggagacaaactgctgaagcagaatagtgccgatcgaaagcacgatcaggatataatagccgttgaactgcgatttttccgcggagagcttggccgtaacgacgtcgtagcttccctgattataggcgtcggtatgtccgctgatgttggcaaatttcactttttctccatcgacggagaattttccgttgcttacggagcttttgaaatcgttataattgagcacgggatgcttaaaggtcgcgtccgtcgcccaaatattttttacccaaagaaatttcatacgcttaaccacttcggtgtcatacgtatgcttcacgttgtcctgcgcggcggaaacgagaacctcgcggcaggcgttttccatttttataggcgtctccgtatccgcggaagcggacacgagcgcatcgacccgttccttccaggtcgtcgcggacccgtcggcgttttcaagcttttcggagcttgcgtaaagcctttcggcatctacgtaataggtcttttccgtgtcttttatatatcggtaatcgttttcggcgtaattttcattgtagatcagcgtataatagatacacttcgttttcccgctttgagaatccgcggtttccctgacgagaatatgcctcgtctgcgtaacggttccgtcctcgttctctttcgtaatgatataattatcgtcgatattttccgccttcagctccgcgcagtaggggttgaggtattcgttgtacgagttggccatcagattgtagttctgcatattggcgtactgtgaaaaggcgttgaaggcgttgatggcgacgatgaacacgaccagcgaaataatcgcgggaaggcaggacgaaaacatggaaatgccgttttccttatacatttccatcagtttctgattatacatcgccttgtcgcccgcatactgcttctgcagcttctccatcttatccttattttctttcatcttgatgttctgctttctcatcgtcaccctttgatagatatcgaaagggaggacgacaagcctcaaaatgatagaaaatacgatgatgccgatgccgacgacgcctatgccctcgatgaggacgcggattaagtgtccgagccagttgagggaaatatcgtacgtctttcccagaaagggaatgacgggatcgcttgccaataaattaagaaagttcattattctatttcaattaaccttttttgatgaaactttgaaaaaattcagagcacccagcgccttttgaaataattttccggcgcgggatcgtagccccctttggaaaagggattgcatctcaatatccgccacgcgcccaagagtatcccgaaaagagcgccgtggttgttgatgcactccagcgtgtactgcgagcaggtaggacgatagaggcaggtatgcttcgacagatgtttctgataaaagaggatcagccgcatgcaaagcattttgagatagggcctgaaaaccctttttctcaaatatttcgcgttttcccttgcgagcgcgaaaaaacgcacgcttacagtttttccttttttatcatacatttcaaatgttttttaaaggtggaaagctcgtattcgtccctgactttgggaacgagcacgattgtccacgtccccttcatctccttgagttccgcgcggaaggcttcccgaagcagccgcttgatccgattgcgctgcacgctcttgccgtgcctttttcccaccgagatgcccatgcgcgtctgcggagagggcatacagatcatcgtgagggaaggggaaaacgcccgcctgcctttcgaaaaaagcttttgaaagtccgcttgttttttaactctcaaatattccatgcgtttctcccgcttccgtttcccgccgtctccctgccttaaaaagcgcggataataacgaataagccgcatttacaaaactgtactgcggcctttcccgtccgggcgcttgtcccttagtaggtaagcttctttctgcccttgtctcttcttctcttcagcacctttcttcccgccgtggaagccattctctttctgaagccgtgaaccttgtttctcgttctctttttgggctgatacgttcttttcatgtcgtttgtctcctgttttttgatttgtttttattttttaccggcgccgcgcgtctcgcggtccttaaaagccggggttttgcttcgtcgaaaagaaagctcttttctttcagaaaaagcctcttttatcattatagcgcaaatttaattctcccgtcaagcgattatgcggtggttctgacgggcaaaatcaaataagagctttcccggctgtccttattttccaaagtaaagggcgcgatgggcgtattgaaggaaagttttaccgtatcttcgtcgagcgccttcagcgcgtcgagcataaattttccgttcatggcgatcttaagctccttgcccgacatctcgcccttgacgcactccgacacgttgccgatctccgaattggcggtgatgaggatatttccgcccttgacctcgaaaatgatcagattgtttttatccccgcggatgagcacggacgcgcgctccacgctctcgatcagctcggcgcgcgaaacgcagaaccgcgtggaaaactcagacgggaaaatattgctcttgttgacgaattcgcccgtatagaggcgggaggtgagcaccgtatcgtcaacgctgacaaacagcatgttttttgcgacgtaaattttaagcgtttcgtctccgccttcgagcatcctcgaaatttcggtgagggtgcgcgcggggcacacgatcttgacgttgccgtttccgcccgccgcttcgcactgcgaaaccgccatgcggtagccgtcgagcgcggtcgcgtgcagctttccgccctccgtctccagcagacagccctttaatataggcctgctttcgtcggtggcgcaacagaataccgttttggagatgagggctttgagggccgcctccttcacttcgaaatactcttcccccgcttcccccttgatcgagggaaattccgacgcgggaagcgcctgcataaaggattcggaatcctcgtaacggatttcgagccccttgtcccccgtggagatcaccacgttcatgcccgacaccttgccgatgaaatcggagaaaaatctgccgttgacgcaaatttcgccctcttcgaggacgtccgcctttattttcttttcgatggagatttcgccgtcgtaggcgagcagcgtcaccacgtcgttctgcgctccgattttgatacattcgagcacgggagtcgtcgtcttggtggaacacgctttgcttaccgtcaccgccgcgtccgaaaggacgagcccgtcgcatataaatttcatagttttccgctccttttttgccgccgccgttttgcggcggggatatctttcaactcggaatcattttaccatatatattgctttttggcaagcaaaaacctttttcccttataaattttttccaaaaaatttctcggccgcgcggcctccttattctcccgtaaaaatttcataaagaggctccgctttcccgttccacgttgattattttgttaaaaaaggtattattagtattagtaatagggacggtggaattgtggataacttttgattttcgacaaaaaacgaccctttttcagcgttaatggatgtccattaacgcgtttatacggaaaaaaattgtggacaagttcgcctgtttttgtggataaaattgtgaatcaaatgtgaataagtggacaacccgatgttgatcgtccgtaacgtatttataaaaataataaaagcataaataaaaatactgttgaaaaaagttatccacaaaagttgttcacattgtggataaggttgtcctcaatctgtggacaaggtgcggcggaaaaacagggattcttttatgcagaaaatttaatcgcggcggaaagacgatttttttatttccgacagaacgcttgaattttttttctcggtatgctataatggaaatatgatggatattcaaaggattttagaagaaaatcaacgggcgatcgagggtgaaaaaagggcggaatttgagcgttttcgctcacttttgctcaattataacgaaaaatacaacctcacggccattacggaaaagaaggacgtgttctataagcattttctcgacagtagcgcggggagcggcgttttcaaaaggggagcgtccgtggcggagatcggttcgggcgcggggtttccctctgtcgtcctgaagcttttgagggaggatttatcctttacgttgttggaaagcgtggggaaaaagtgtgaatttctgcgcgcggttgtggataacctcggtttgaaaggaatgaatattttgaatattcgtgcagaggacgcggcaagggaggaaagatacagggaaaagttcgattattccgtggcgcgcgccgtggccagaatgaacaccctgagcgaatattgtctccccttcgtgaaggtcggcggcgccttcgtcgcctataagagcggcgacgtctcggagatagacgaggcggaaagcgcgtataaggagctcggcgggaaaaaaagagaggtggctctgtattccctgcccgaagggtacggggacaggagcctggcgatcatcgaaaagactaagcccacgcccgcgaaatatccccgcggcaacgggaaagagagaaagtctcccctttgacgggggcagggctgagacggcggaaagggggggagagatggaacagctgcgcatagagacgacggaaaaaattaattcctgcgcctttacgggacatcggcgcctcggggaggatttcgaccccgaacggctgaaaaaagaaatcgaaagctgcgtttctaggggagtcagcctcttttactgcggcatggcggcgggttttgatctgtatgcggccgaatgcgttgtagaactgaaaagaaagcttccctttctccgtctggcggcgtgtatcccgtgcgacgggcaggaaaaatatttttcctttgaggataaaaagagatacgtaaaaatcctcgccgcgtgcgacgaaaagattcttttggccgagagatatttcagaggctgtatgcagcggcggaacgcttatatggcggaacgggcggacgctttgatcgcctattgccgaaaggaaaaagggggcgccgctcatacgcttaactgttttttgaaaaaaggaaaacccgtttttaacgtgtaaagagccgaagcttaggctcttttttcacactttttttccgccgttcataagataacaaagaaaataagcggcgtttttagccgaacggacagcgggagacgggtatggcggaatattttaagtgcgacgggttcgatcgggacggatacccttgcagcagcgagcgggtgaagctgatcgaagggccgaagggacctcgggggccgcgcggatcggcgggaaaaaattatacgaccgcccacctttccgcggtgaatacgggcggaacgattttggaagtatccgcgcacggcacggccgtgccgttgaaccgcttcctcgtgagcagaggatttacgcccgacgaaagttttacttcctttatcgtagagaaagcgggaacgtattttatgacgtacgacgtccgtacggtgcaagcaacttccttgaaatcgcggattgtgaaaaacggcgttccccttccggaaaccgtccgcgcctgttcgggaggaaattcttgttttttcgcctcctcgatctgcatactgaacgcgggcgacgtccttgcgcttcagctttactcgctcgatatcgccgtctccctgcaaagggaatcgggcgcctctctcgtcgtcgttcggctcgcataaaaaagtctccgtcttttttaaggacggagacttttgtcggtaaatatttttcctctttagcgggggcatttactgcatggaaatagaaacgggcggggcagggacgagatcattcggaaacttcggttgaagaatcctcttcctcctgttgctgtccctttctgaaacgaatgtcctcggcgggaaaatccttaaagataaggccgccgttgtggtcgtctatctttacctttaccgtcatcttcagcatattgacggagacgaccgttcccttgccttcgggcgtgcccacctccgagcccgttttgggcatctttttataggcgtcggcgtagtattcgctctcataacttaaacagcacatcagccgcccgcaaaggccgctgatcttgcccggattcagggacaggccctgcgttttggccattttgatgctcacctttttgaattcgggcatattgcccgcacagcaacagacccgtccgcagggagcgattccgccgagatatttcgtttcgtcccgcgtgcccacctgcctgagctcgatacggatatgaaagacggaggcaaggtctttcacaagctctctgaaatccaccctgcctgcggaagtgaaataaaagacgatctttgtgccgtcgaaggtgtattcgcagtcgatcagcttcatctccagcccgtgcttggctattttttccttgcagacctgcatggcctgcggcttcttcgcctcgcacgccgcataaaattccttgtcgcgctgggtggcgatacgaatgatcggcttcagcggctgcaccacttccttgtcctccacttcgcgttcgggatacgctacccaggcgaactccagcccccgcgccgtctcgacgacgacgggcatattcctttcataaacctcgccctgtcggggcgaaaagtaatacagctttccgccgtttttgaatttgattaccactacttttgtcataactattcctttatctccgtccgacgggcacacgtcccgcgggagacgatctttggttttgtgaaaaaggcgtcagcggtcgttctgctcgagaattttagccatgcagatttcgagacactgcggaaaaacgccgttgaagcggatttgcttttccgcctccgaaagcgcctcctgcgccgaaagcagagcgtttaggcgataataatcgctgatcgcgcgcagccgttccgtttccgatttcaacatcagatacttttcggcgcggttttttcccgtttttcccgaatcgcttacgccgtttattttcgaggttttgagaataagcgcgtcgcggaaaatcagccgaagcagagagagcagctcctttttatattttgtttcgcctacccttttgaccagggcgggcaggcggaaaggatctgtctccgccagctcgaaggcgtcggcggtaagagccttataataccctccctccaaaatgttttgggcctcgcccacgcagccgcccgaagccgccgcataaagagccgcgtcggatgcggaaacggaatacattctttcgagacaagccttcacttcctttacggaaaaggcggggatttccagcttttccgcgcgcgagagcaccgtgggcagaacgggaaacgtcaccgtggcgccgaggagaaagcatacgcccgcgggcggctcctcgagaagcttcaaaagcttgttctgcgcctgaacggtagcttcggcaaaatcgccgacgacaaacagcttcctgttcccctcgacgggtttgagggcgctttcctcggttattttttccgcgtcctccacggaaaattttttcccttccgcgggaaaaaagagacagtcggaaaaggtctccgcgtcaatgagttcgaaaatccgttccgaagcgaaaggatttctttcctcgttaaagaaaattttggcaaattccttgagcgccgtcttgaggttgcgcgcgtcgtcgaaaatgagcagataggcgtgattgagcctgttttcttccttttccgctttcaaaagcgcataagagcgggttgactgcaataatcggcgcattttccttatcctcgctttccgtttttcttcgatctgtttttgtgtgttttttggctttttcggtataaaacccgaactttttcagccgcacttcacctttttcggtattattataacataactgaagttatgtttgaataaggcgcggaaatgcctgtaaatacttcgtgcttacgcatttccgcttttattataacacaaaacctgaaaaatcgcaagcggagaaagaagaaaaatcgaaaagcggagagagcagcggatttcaaaggcagccgcgtcggcgcagagccgcgagaatatcgttgaaaataccttcgggagtgtttctgccgtcgatcgtcacaatccgcgaaggatccgcttccgccagctttttataggccgcatagacctttttatgaaactccatgcccgcctgttcgaggcggtcgttttcgtccgcgccgtgtttgcggcgaaaggcttcctcgggcgtcaggtcgataaataccgtcgcgtcgggcagatattccttcagcgcatacgcgttgacgccccgcacaaacgcttcgtccagcccgcgcgcgcccgcctgataggcgagagacgaatcgacgtagcggtcgcagatcaccagcttgccctcgcaaagcgcgggctccacgcggtcgtgcaaatgctgaacccgcgccgccgcgtacaaaagagcctcgcattcgtccgtcatctccgcatttttaccgtcgagcagaatggcgcggatggcctcggaaatttttccgcctcccggctcgcgcgtaaagacgtggggcacttcatgctttgcgagatactcgcttaaaaggcgaagctgcgtgctttttccgcagccgtcgcagccctcgaacgtgataaattttcctctctgttgattgttcataaaatcactcttttagttatttttatacgttttataaacgctgattttaccgcccgacaggccgaagacgttgtccgcttcggacaaaagcccgattgtctttttatcgattgtatctcccgcaaacaacagaggggtgcagggaggaaacagcccgcacggtttggcgcaagtgagtccctcggatttttccagcggtatccattccgtttcggaagcctccgcgtctttttgaaaaggcgatttttcggccgccggcgggcttgaaagagtatgttcctcgttagcctgcatggctgaagaaattttttcttcgtccgacgcgattgaaaaatcagtttcttcgctagtctgcatggttaaagaaactttttcttcgtctgacacgattgagatgtcggcttcttctacggtattttcgcttggaaggtcgccgaaaaaggaaaagcaggcgcgaagttcttttttcagccgcttgaaatccgcacttttcgtcgcgggagagagatagaacatcacgacgttaccgtcgcaaaattccgcataaataccccttttttctaaatatttttgcacgacgaaggcccgatcgccgaatacggcgcaaagctttgtccaatctccgccgaagcggattttgtcggggtaagctcttacgaagccgagtacggcgttttccaaagccgtgtttcgcgggtatttgaccgcgtattccaccgaggccataatcgggtaggaggggctggtggtgcggaagatatccgctgcctccgcgagatcttctgccaaagcgggcgtttttgcggaaactacggctccctgcgtgagggcgggaaggcttttatgtacgccgtccacccaaaggtcggcgtacgtccccgcatagatttcccgatcaaaatgcaggtgcccgccgtgcgccccgtctatcagcaaaagagcgcccgtttcgtcgcaaagcgcgcggaaaaaggggagatcggcaaggttgccgtagtaatcgggcgaggtgatcaggagggcgtccgcacccttgatttttttgctcgtctcagccctggtaggctgtaacgggattttttccgccgtgggaatgtctaaagatacaatttccatacccagcaatttacagccgttatatacgcttttgtgggcgttttcggccacggcgatccgccgtgcgccgctcgctttcagcatggacaaaacgcccgccgtgcttccgtccgtcaggataaagcttgcggcggaaccgagtatctcggaaatgtccttttccgcttctttgataacgcccttcggacaggaaaggttgtccgaataggacagttccgtgatgtcccaggcccccgctttatggccgggcgtatgaaaggaaaggtgtcgtcctttggaatatttatgcaacatcgagtagatcttgcaattgtcgagaacccgcttgtcgggcgaaaaatttttcatggcaaaatcgctttttttataaagacgaagggaggataaatccgaaaaacgggagaacaagtctcccgtttttgtcgtaaacgcaagtttttattccgccgcaaggctcgtgcggataagataattgacgaagcacagaccctcccagcggctgtaggcgtacttgtcgttgtggaagtccaggagaacgatattgatgtcctccgcagtgggaaccgtcttttcctcgtcgttttcgtccttgaccgtcttataataatatacgtcgtttttcagatttttcatgcgttcgtcggggcagaggttgatgctgtatttccccgtgagcgtcagggtctcccccgtggaggaattttggagatacagggtcgtttctgtcaattcgacatagccgtcttcgaggtagccgttgaaatcgaccaatgccttgcggtaattttcgatgcgggtaagctcgtccttcaagcccttctgtatctgtgtttcgtttttgaaacgtttgtccttaaaccgtttgatccgcgcgcggaaatcctgctctatcttggccgtgtccgcgacgcccgccttgtagtcgccgttgtaatagttgtcgagatagacctccatctcctcgagatacttgtccatttccgcggcgatgctgtaataactgtataaaaattgctgaagataggtggggtggtacgcttcgccgttaggatcggcgtaggaaacatcctcgttttcgacgttcgccgcaaacagcgcgtcgccctcttccgtcgcggtgcgcgtctgcaagagcgtttcgctgtaattttttcccgtcgtgatatccgtcgtgctgatttccaaaatttcgtaagagaaaacgtccttgccctttaacgaggaataggaattgaaacggtcggtgacggaggttcccgtataattaaatatcgtaaaattctgcgcgggggtcacgcgggtggcggtcatggtaaagataaggctccagaccaatatcgcggccaccgccaacagaataattttgatccaatcgtaagagaggaggatattcagacgttttttggtgattttcgcatccataaagcttccttttccgaaaaaagagtttttccctatcctattttacacagcctttgtgtggagaacatgtccgttgcgtgtaagcggagaggattattttttcggcttcatcgtcgggaagagaatgacgtcgcggatcgtcgagctgtcggtgaggagcatgacgaaacgatccagccccatgccgaggccgcccgtgggcggcaggccgtactcgagggcgttgatgaagtcctcgtccacctgcgcctcattgtttcccgccgcgcgtttggcttccacctgcttgagcatacgctgtttctgatcgatcgggtcgttgagctccgaaaaggcgtttccgtattcgtgcccgcagataaaatattcgaaacgttcggtaaaggcggggtcggccgccttgcgcttggcgagcggtgaattttctacgggataatcgtaaatgacggtcggctgaaccagcttgtcctccacgaaagcgtcgaaaaagtcgatcagtacgtgtcccttggcggaggcttcgccgtgcgcaagctccacgcccttttccttcgccgccgctcgcgcctgcgcgtccgtctgccagtcggcatacctcacgcccgcgtatttttccacggcctcggccatggtcatgcgtttccattcgcccatgtggatctgcgtgccctgatacgagatgtcgagcgtgccgcacaccttcagagtcaccgtcttatacaggtcctcgatgagatccatcatatcgaaataatcgctgtacgcctgatacatttcgatcgtggtaaattcggggttgtgaaaggcgtccatgccctcgttgcggaagattctgcccacctcatataccttgtccatgccgccgacgatcaggcgcttgagataaagctccgtttcgatgcgcatatacatgtcgatgtccagcgcgttgtggtgggtcttgaacgggcgggcgtccgcgccgatttccagcgtcagaaggacgggggtatccacttcgagataacccctgccgtcgagatacgcccggatttccttcaaaattctcgagcgcgcgacaaacgtatccttcacctcgcggttcatgatgagatcgagatggcggagacggtatttgaggtcctgattctgaagcccgttatatttttcgggcaggggaaggagcgccttggagagcatgaccagctcgctgacgtgcaccgtgatttcgcccgtctgcgtcttgaatacaaagcccttgaagcccacgatgtcgccgatatcgtaatcctttttataggaaagataattttcctctccgacgtcctgtctggtgacgtaaatctgaatagacccgctcctgtcggcgatatgcgaaaaagacgccttgcccataatgcggcgggacatcattctgcccgccagggagacggtttttccctcgtatgcctcgaaattgtttttcagcgtttcggaatccgcatctaccgcgtatttcacctgttcgtaagggtttttgccctccgactgaagctttgccagcttttcgcggcggattttcgcctgttcgataagttcttcttcgcccgtttccgccgcagggggcacggcgacctttttttcttccataaacgtatttcctctgatgattgatttggggaaaaggcccgtgtgtcagctgatttcgacgattttcagcttatacgcgccgtcgggtgcgttgatgagcacttcctcgcccaccttgtgcttgaggagcgccgcgcccacgggggactcgttggaaattttgtttttcatcgcgtctgactcggtggtgcccgtcagctcgtacgtttcgtactcctccagctccgcgtcatagacctttaccgtggagccgatgtgcacgaaggacgtgtcgtcgttttcctcgatgattctggcgtttttgatcttataatccagctcgacgatttcgccctcgttggccgactgctcgttgcgcgccgcgtcgtattccgcgttttccgaaagatcgccgtggcttcttgcctccgcgatccgctcgatgatctcctgccgtttggtggtctgcaaaaacttcagcctctccacggcctcgtcgtatcccttttgtgtcataaaaaattgatcagccataaaaaatacctccctttacggtgcctgcgcccgctccgttccgccccttttttacacgacaaaaaccgttctcggcgggaacgttaaaaatacaaccgtgacctcgccctctcgggaagccacggcatcttgtattctgtataaaattattatactgtatttccgagggtttgtcaatgaaaaatgccgccgtaaacgcataaaaaacaaaagatttgcggcgaaaattatcggaatttgctcataaattccgaaatgcggccgcacgcttcggtgagcgccgtcatgcccgtggcgtaggaaatacgcacgttgtcccgtccgaacgtcccgaacgcgctcccgggcaccaccgccactttttgttcctttaacaacagattggcgaactcctctcccgaaagggaggtgtttttcaccgacgggaaagcgtaaaacgcgccccttggagaaaagcaggaaagccccgcgccgcgcaggaaatcgacgacgaacctgcggcgtcggtcataggaatcgcgcatttccccgacggccgcgaaatcgtcggaaaaaccgtccttcagggcctcgacggccgcgtattgggcggtgatcggggcgcagaggatagaatactgatgaattttgaaaatcgcctcgtcgattgcggggggcgcgcagacgtagcccagccgccaccccgtcatggcaaacgccttggagaagccgccgacgtacgccgtgcgttccttcatgcggggcagggacgcgaaggatacgtgcttctgcccgtaggtgagctcggcataaatctcgtcggaaatcaccagcaggtcgtgtttttcggcaaacgaggctattttttccagggccgcgcggtcggcgattccgcccgtgggattgttgggataggtgaggatgagaattttggatttttccgtaacggccgcttccagatcctccgccgtgggcacgaagccgttttcctcgcggcatttcaccgcgacgggcgtgccgtccgccatcagcgcgcagggcgcataggacacgtaggcggggtcgggaataagtatctcgtccccccgttcgacgcaggcgcgcagcagcaaatctatgccctcgctggcgcccacggtcagcaggatatgcgcgggatcgaaggagagggaaaagcgggtttcgaggtagcgggcgatcagctccagcagggcgggcatgccgcggttggcggtgtattgggtgtagccgcgctgcagggaggcgatggcggcggagcggaccgaccagggggtaacgaagtcgggctcgccgacgccgaggaaaatcgcgccctccgtttcgcgcacgatgtcgaaaaatttacgtatcccgctcggctgaagcaggcgggccttttcgttgacgaaatcgcgcataggcgtcacggctgaacggacaggcggttatccgtgtccgcgcgctcggtcaaagcgccttcgattttatattttttgaggataaaatgcgtcgccgtgctcaataccccctcgaacgtggaaatgcgttccgagacgaaacgggcgacttttttgagggatgcgcactcgacaaacaccgcgagatcgtagccgccgctcatgagatacaccccttttacttccgcgtgcgccgcgatctgcttggccatccaatcgaagccctcgccctttttgggcgtcaccttcacttcgatcagcgcctccaccgccgtttcgtccagcaattcgccgttggagatgacggtgtatttgacgatcgcgccgcgctcctccagcgagcggataagcgctttgacggcggacggctgttcgccgagcatggaagcgatcgcctccgcgccgagacgcgcgtccgaggacaaaagttcgagaacgtttttttcgagagtgttcataaaatatctcccttgcttgattttataaatttattcgttttccgagccggaaagcggcaggctccggggcgtttgcggcgtttcccgcagaaaaatttcctttttcaaaacccccgcgaggcagacgatggccgccagcacgaccagccccatatagagcttgttgtcgaagtcgctgtggaagggattttgcgcgatcgcgcgcagggaagcgtacatggtcgccacgccgatgtagctctttttcggatagctgaacacaaacaaaaccgcaaagatatccgacaggagaaaataccgttcgtgcatatagggcaggacgaagggcacgaacagggcaaaaaagtaggccgtggaaataaggtttttttcgttgacggaaaactttttccgatggaaaaaaatcatcgcaatgcccgtggcgcccagtccgaacagggtaaacgcctttcccagcatgcggaggtgtccctcgttcacctggcccgcctccgtgtaatagatcgtcttgacgatgcagtagagattgggcgcggcgtagtacaggttttcgtattcgcccatctgcgtcagatagggccgcaggtaggcggcgtaaggcgccatgccgcagattacggcgggaagccccacgaggagataggagacgagtatcaggggtacgctccgccacttgagctttcccttacacaacaaaaggacgaggacgggcgcaaagaaaatcgcctgaagcttcaccgcaaacgcgacgccgaacagcgccgccgcggcatagctgttgtccttcatggcgtaatagacgctcatgacgacgaagcagatataaatcatgtcgcactgtccccattccgcgccgtccagaaagacgttgggcagaaacagcacgacggcgtacgcgcatacggacagccgtttttgggaggtcatgcgatagacgatgagcgcgacataggcggccgtgacaaaatcgaacaggcaggagaacagcttgatgcccgtcagcggagaaacggggagataggtcagcgtcgccagaaaaaagaggtaaaagggggtataatcggagccgagctcgctccccaacgcccgatatcccccccccattttcagtttatcgtaccagggcttgagaaaattggtgtagtcgtttgactgaaatccgaagagaaacgcgcgcagggcgatcgccagccccgtgaggagaagggcgaaaatcagccattcccaaggcgcgatgtattttctgtaaaagcttcccgcggcgccgtaagcgcggtcgggcaggcctttcgggaaagaacgttttttcatagacatctcctcggagaaata

SEQ ID NO: 2847 - DNA, 21169 bp, Unknown
  16S sequences of unknown bacteria
agcggggaggggcagccgttttaaggagcgaaaattgatctgcaatttcgtagagataaaatgaacattttgcctatccggggtgactaaaactcacgtacaactaaataagagcaaaaatggaacgcataaagaagaaaaacctatgcgttttttgtcgctaaaatcggcaaggagaaagagaaaagaaaaaacggacttagaagagaggggatattttgaataagcggtcgaacaaggcagccgcctcatggaagagaagcttggggaattatatccctatgaaaaagaattcccgcgggacgagaataaagcattggaatatttgcctttttcggcataggcagagaatcataggagggagggtgctatcgaggaggtgaaaaaatcctttctaataagcaacaaaaggaggctaacgagattctaataatcaactgtttgtgcgagtctttttgaaaaacagagaaacttttttcgctatgctaaatttatacgaaaataattgaaacgacagaacttctttttcgtgcgagagcgatcctccccgaaatgcgtaaataggatctaaaaggagggggaagctgagatcgcgagttttttgaatgtccttttccgatattggagagttccttataggattcaaccataggatcatttttcttgcatagatatccggaactttaacaaaacggatttttgatgcgttgtttatctgggggtatcatataaatgacctttatgtctgttaaagaataaaaattaattcctccgtttacggactttgtatgcagaggagttttatagacagacgacttattgttttgagtttttaatatttttaataaagtctttgggggattgtcctatatattttttgaaagatcttgaaaaataaagaggatctgaaaaaccgcataaatacgcaatatcttttacgcttgaaatgttgttgtccgccaaagtacaggcgttttgaattctgatagacatgatgtatttgccgatagatatatttgcggcttttttaaatacttccgccatatagtttttgttataaccgaaatgatcggaaatcttttccagcgacaattcgcagtcctgatagttgagatttatatactttttgatttgcgcggcgatacccatgccggcgtctttctcttcttcggtttctccgcgctcggaaataattgaaaaaatatataatagagcgctttccgaaagcatttttgcgttattgtttctgattctttgaatatagagaaggagaaagtctgtcaagtctttaaaatcataaacgacacagttataacggtcgattttcagagcttccatgattctgtttgctctgagtccgatataaccgatataaacatatttcaaatttttgtcggaaataagcgtgtaaggagtagagggaaacgtgaaaaaaatatctcccgctttgagattatattgttttcccgcaaggcgcagttcgcattttccgcttataatgacatgaactttatacattatgtcgagtttattttggggcagggattgaggcgccgtttcgtaaacaaaatgtatcgtattgatgacctcgtctgtttgcggatttggaataaatttgcaaatattgaagctgtccataagtttccctcaatgaatttatattataaaaactaattttgtccataaaaagccatgttttttcctgtacttttttggatttctgccttatactaataaaaaatagaaggagaattttattatgataaaagtaggagtattgggagcatacagaggcacaagtatgataaattactgcgtcgcgtcgaaaaataaagcgcaagtcgtcgccatttgcgacaaaagcgccgaagttttggaaaggcagaaagctgcgcacagcgcggaaaatatcgcatactacgacaacttcgacgattttatcgctcacgacatggacgctgtcgttctggcgaattacgcgacggaacacgcgccgtttgccgttaagtgtctgaaacgcggtcttcatgtgttcagcgaggtccttccttgtcagacgatgaaagaagccgtggagcttatcgaagcggtggaggaaagcggaaaagtatacgcttatggcgaaaattattgttatatgccgacgataatggaaatgaagcgcctttataaacagggcaaaatcggtgaaatcgaatatggggaaggggaatatatccacaactgcgaatctatttgggcgtcgattacttacggagagcgcgaccattggcgcaatactatgtacgcgacgttttactgcacccattccatcggtccgctcattcatatatgcggacttaaacccgtttcggtcgtaggatttgagagttcgatgacggaacggaagctgaggaacggagctaaatcggggcttttcgggatagaaatgattacgctggaaaacggcgcgattttaaagagcatacacggcgatttgtataaggattccgtttggtacaccgtctacggatccaaaggccgaatggagccgggcagagccgattcgggcaagtccgaaacgctttacgtaaatgccgatcattatgacggcgaatatccgtccgagagcagaaccgcgtcgtatgaaccggcggagaaaaacgggatagttgaatatttcgggcacggcggatcggattattatattatggataactttatcgataagctcagcggcaaaaaagacgcggatattatcgacgtatatgaggcgatggatatgtttttgccggggatatttgcgtatcgttcggtgcttcaaggcggcatatcggtgcaaattccggatttgcgcgacaagtccgttcgcgataagttcagaaacgacacggcctgcaccgatccgaagattgccaaagaacggcttttgcctgtttattccaaaggaacgccggatattcccgatgaaatttacgaaatcgtaaaaaataaatgggagaaggagagaacggacgggcagtacgtaaaagcggtcatgaagcaaggggatgttaaacggtgaacggctgatgtattatgttcttgtcatcggcgccgccgtatcgttcggactgcaattcttttttaataagctttatcagcgagaaaacggttcgagtctgcgtacggctgtgattttcgcgctcggaacgtcactcgtttgcgccgcggcgatgctgtgtatccaaaaatttcgggtggaattcacgccgtattcgtttttcctttccgtcctatctgcgataatccttgtcttatatacgttttgcagtatcaaagcgatggaaaaaataaatttgtcgctttataccatgttcggaatgctcggggggatgatattgccttttctcgtcggcattttcggctacggagaggagcttacggcaaaaaaaataatttccgccgttctggtattattttctctcgctctcggcacaaattataaggcgggacataaagcaattttttatggaatagccgttttttttctgaatggaatgatcggcgtactttccaccgtacatcaggccgaagcacaatttaacgtatcgagcgcatcgtttatgtttttaaaaagcgtttctacggctgcgctctgtctttgtatgttaatctttctgaaaagaccgaaacaaagccatgaacgaaaaccgtcgtttataaaaatttccgtttctatttcgggatacggcatcatgaacggactcggcaattttctggtgttggttgcgctcgatttcattgacgcttctctgcaatatacgctgcttacgggaggaacgattctcgtttcggcggctatttcttttttgatgaaagaaaagtttacgcccaaaacgatagtttcggtggtcgtcgccttcgggtccgcggcggttatgatattttgaaaaactatattatgatattataatattcgcggcagattttttgatagcgataaaaggtgctcagcgaattgaagccgcaatcgagaacaatgtcgataaaaggacggttttccagccgtgtccggtctattactttctgtacgcgtatgatcccgatataagtgttgagagaacaattgatatattgattgaacagttttgaaaagtgatatttgttataattaaaatgtttcgaaatagtttctaatgtcagcggcgaatcatagttctgttctatataagtgagaatatcgattattttttgatttctatttgtgaaagaactttgatgcgttccataacgtttcatgagtttccctaaaatgacgttaatgtaacctttgatgagtaaatcgtcgtccatagcggtagacacgagcagttcgtcgaataaagttttgatacttttattgaattccgtatcgccaagcatttccggaatccgcttcgttttggtcttttgtcggtaatccgctaaaaattcctgttgaatgacgagattgatcgtcgtgcagctgggaagcggggagttactgtgcaattgataactgtcggcgaaggcgatctggtcgggaaaaagggtataatttttcccgttggaagaaaaagatacctttcccgctattacatagataagttcaatactcgtgtgaaaatgcgctatgctgaccgaatcgttgcattgaatgatatagggtttgctggctaaatctctgatcgcttcgtattccatgacaacattttatcatagttcatcgaaaaaagcaattattgagaataaaatcgtaaaaataaaaaaaataacccgtaaaacaccaatatttgcgagcaagttgaacaatatatgagttgaacgattcgatggatagtggtattatatagatacaaaaaatttatttgaaaggactaaaaagatggttttcgatttattgaaaggaacttttccgataggcggttgggtcggtccctccgccgaaggcggaggttcgccctcgtttttggaagataagtattttgaactccttaaagacagcggaatcaatttgatgtacggaaataccgaacataacggttcttcggacgtgatgcggggattggctctttgcgataaatacggaatttcctatctcgtcaacgacagccgatttcgcagggaagacttttcggaagaagaagggcttgcggcgttgacgaaatatgaaaaacatccctcctttgtcgggattgccgttcacgacgagccgttctttaaagatatggagtcgcttaggcttgcgcgcgaacgccataaaagagtattcgaaaagacgtgttttcacacgaatctgtttccgatttactgcgattcggcgggaatcacgacgcgcgaaacgcacgaaaattcgagctacgaggaatatgtccgctatatcgaaacctatatagactgcgcaaagcccgaccatttgagttatgatttttatccgttcaaaggcggagaaaacgaggtcgatcccgtttactttgaaagcatggaatttatccgcgcttatgccgaaaagctaaaagtgccgtattggtgttttattcaggtgacgtcctggcataaaggcgttatccgaaatacgaccgagaaagaaattcgctggcaggtattcacttctctcgcttacggagccaagggcattaattattttactttctgcacgccgacggattgctacgcggctttattcgacgaagcgatgttagaccggaaaggagttccgaccccgagttattattatgtgcaaaatgtcaacaaacgccttgtcaaaatcggaaaagaacttttatatgccgaacatagggggatgattccgccggcaaaagaggcggcgccgcttaaaagtccgatcgcccgtactcactatgaagcgcttaaaagaacggaaggggatacctgtctgacgggaattttcgaaaaagacggaagtccgctgtatcttgcttgcaatacggatttttcaaaatccgtcgattataaaatgcagtttgaaaaaaccgtacaactgcaaaatgtcgaaacgggagaaatctacgagggcaacgctgtgagcctccgcattccgcccgcagacggcgtattgctgaaaataaaacataaggagattgaaaatgatggttaaaaagaaacgaattggcctgacgcttctcggctctgcccttgcgatatgtttcggggcggggctgacgctgtcgccgtcgggcgcaacggctgaatcggcgttttccggaccgagctatgagggatatacccggcgtattaccgaacagagcaccgcgatccaggcatggaagccgaattatcccgagatagaagctccggactatactttctccgcggcaggctcttctcttaaactgcccgacgacgtaaccaccggggttgcggaagtaaatcttatcggcgcggagctcggtgcaacgattttgcagtttaccgcttcgttggaagcgaaagacaagtggaattttgtggtattccgcggagatgcctactataacagttttaccgctcttatgttccgtgcggacggcgtcatgacgatgatgtcgcgcgcgtacgatgcggataaagcggcggaaacgcccggaaatccttatatttggtattcctatgcggatttgcccgaggcgccgaatgccatattcccggaaccggtagagaaaaattgcgaaatcgcgctgggcataaccgagctgaaagccggaaacacggtagatatgaccgtaatctccacgaaagaaagcgtcgaagtgtatataggagatggagaaacgcctgtgtacgaatctccgctgaccgttccgctcccgtccgccgcggggatttttgcctataacgcgccgaattattgcaacgcggtaaaacttaccaatctgcgttgtttcgacagcctcgattatatgaactggaacaatgccgttaccggggaaagcctcgtatattccgcctacggcggcggaggagccgaaagcacgttcggcgagagcggcgcgacattgagtgcgggcagcagcgtcggcaacaccgccgtattcaccatgcccgacgttgaaaacagaacgaccgtccatacgtattcgtttgcgctcaataattccgatactacttattggagcgatatgctgataagagccaacgacgatatgagcgaatatctcgtgctgcgcgttcgccgtttgggccagcacgtagggctttacggccgtatagacggaaagaattatacttacagcacggaacccttttcgggtacctataaagacgattttacgggagaatacaaggataacgattatgtcatgtgtttccctctgggagccggaggcggcgattttgccaaaggcacacagctcaatttcatgatagtgaccgataacgacagctgtacggtttacaataacggcagcgtattttattcggtggatttcaacgcttccaagggctataatcccaatacctgggatttgtcggacgagatcgccaaattaaagcccgccgcgggaactttcggcggcgatgcttcggatttattcgcgattaacacttacagcgacgcgactaccgtattttcaaagatcaattgctattattccggcgaaaagggaacggatacgcaaaaagatactttcctgagcggtattttgtataaaggcagtcttcttacgggatttactccgggatcttttgaaagcgatatgatcgtttcggggcaagaatcgtttgaccgcgactctttgacttttgaaaaaggctccggcgtaaccgacgtgaaaatcgagtggcataccgatgaaaaattcggttatgaacaggcgattttaaccgtaaaatcggcaatcgcgacccgcacgtatacgcttacttttgaaacttacgacgagccccttccgttcgaacgcgaggattgggacgagctgaatcaaaagaatcaaggcggggagaaaaagcctgacggcgatgcggaaacgggctgcggttccttcgtcggcgtcaagacggcggctcttttcctggcgctgctggcgtctgtttcgatatgtttgagaaaaaaaggagagaaaagatgagaaaattcaaaacgacttttacggcgttagcgctggggtgtgtgttcgccctttccgggtgcaacggcaatccggggaatcattccgcttccggaaagcccgatcccgacttttccgaaacggtcgaaacgacagacttatatgattatacgggaaagacggagaaagaatttcaattcaaaacctttgtcggcgtgccgagcaatatgcgcatatacaatgccctcgaaacgagtttttatatcaaaacgttgaccgacgcggaattggacacgtattataaagaactttccgaggcgggtttcaccgtggcagacggaccctatttcccggaggatcaggcgcattacagaaaagtgctcgatcttgcgcagaaatacggcatgaaacagatggtgggcgaactcgtcgtcaacggaatttctctttcggcaatgctgcgcggagagatcatcgactcgacgacgggaaaaccggccgagtacaccgacgaacagataaaagcgcatctcgaagcctgtctgggcgaatttaaggatcatcccgccttttatggattttcgtattgggacgaaccgaacgcgacgaaatacgataccatcgcgcggatacagaaattgtttcaggaagtttttcccggaaaaatcctgtacgtgaatcttttgcccattactgtggacctgtccttactcggttatacgaaccctgccgacagaatcaaatatactaccgattttatcgagaaaatcgacgttccttatatttcctacgaccgctatcctttatataaagacgcaagctcggggaaaagggaaattcaggaggatttcctgtacaatatgcaggtttaccgtcaggctgccgatattgacgggagagagctttggacgtatctgcaatcgaccggacatctgggcgcgggaacggaatatgtcgaaccaaaaagtatcgccgatttccgctggcaggtaaattcattcctctcgtttggcggcagcggaatttcttggtttacgacgtttgctcctccgcccgtagacggcgtgggaactcagttcaacgtcggtccctacgacagaaaaggcagaaaaacggatatttattataagatcaaagccgtacaggaagaagtccatgcgtttgaagacgtctatttcaattttgactggaaaaacgtcatgacggtactcggcaaggaaaacgaggtcggttactgcgagggatttacctatctcgacgagggattcgccatcgatacgcacgagagaattgcagagtattcctgtcagcaggatacgctgatcggctgttttgaggataaagacggctacgacgggtttatgatcactaattatgcgaatcccgcggacaataagacggatagagtcagtcttacgttcaatgacgcgaaagcggtcgctgtatatcgacttgcggaaaagcgggtgcttcttttgaacgaggacggaactttcaacattacgttgcagccgggcgaaggaattttcgtcgttccgctgaaataagccgagttttttggaggataaaatgaaaatagtaaagaaattgattatttctgctcttgtattggtttttgcaaccggcgttttcgccggttgtaaaggcacggaaaggtccgtggacgagagaaacgtgtgggtggacggaaacaaagtatataaagactcgtacgcagggaaagagattataaaaatcgactttttcgatacgggatacggcaaggattggatttatgaaatcgccaaagattttgtatatgaaaacgatcagtatgcactgattctgaatgcggattcctcgctggtttcctctatgcccacaaaacttgaaacgggaaaaaatctgtccgatctctacttcacgcctcatttcgattgggaaaaatatatagggcaggacgccatacttcccctcgacgacgtgtttgcggcaaagcccgacggagaggagggcaagaccatagaggctaaaatggagaagtcctatatcgaaagcaatcgtttcgagcacggcggcgcaacgcattactatgtgatgccctggacgaaacttatcacgggcatcgcctataacagcgagttgtttaagcgctatgatatacaagtccctaagactatggaggagttcgatcaggtctgcgaaacgatcatcgaaaagtctaccgccgaaggcaagcgcattgccccgtttgtggcgtcgggacgcgcgctcggatattttgattttatgtgcatgaatttgtggattcaaagaagcgggctcgaagcggtaaaagagtttttcgctttcggagacgtagaggtgttcaatcccgcgaaagaaccgtataagggatatgtttccgcgtggaaggattttgcaaaatatttcggatccgacggattttccaagtattgtttaagcggttcgatggcgaaggaagtatacgacgcgcagcgcgatcttatcaacggcgaagccgctatgatgatcaatgccgactggctggaaagggaaatgatcaaccttgtcgacgaaacgggactggaaatgaaactgatgcaattcccgtttgtcagcgacgccaaaaaagacaaaaacggagaatatatttccgtcaattacggagcggacgcaaactttgtctttataccgaaaaaagcggcaaactccgaaggggctaaggattttctcatttttatgcacaaagaaagttcgctgcaaacgttcacgaaagttacgggagcatttcgtccttttgagtacgatgtggagtctttgcgttctaagctgtcggctttttcgaattccgtactcgatataaacctttcttgcagcgaaacttatgtggattatcccaccggaccccgccgtttcaaggctacgaaatttgttaccggacacccgaatctggtcattatcaacgggacgtcgcccgaagattttgcggcgcaggaatatgcggaggccaaagtgcgctgggataaagattgggcgatataagaggacaaaggtatgaaaactgctaaaataaaattgacaaagcgaaataaaagtatcgcaaataaaggtatcctattttgcattatagcgctggcattccctgttgcgcactttctttttatgttttttttacaaaacggcggaacttttgtcttgtcatttcaggagttttctataaagtcggggaactttgaatttatcgggtggaaaaattttactaccatttttcgtattttgggcagcgaatacagcgaatttccccttgcgcttcgaaactcgtttatctttttcttattaaataatttctttatcctgcccatctcgatatgctgtgcgatcgtctgttataaacggattcccctcagcaacgtatttcgcgtcattctgtttttaccgacggtaatttccccggtcgtgcttgcgatggtttacagatttgcctgggacagcaccgtgggatttataccggaacttttggaacaactccatctgacgaacctgattcctgtcttgggctttttggcggataaacagacggcgatgccgttgctgttgttctattgcgtgtggatagggctaggcggttcgattattttgttgacgggggctatcgctaagatacccgatcacttgattgaactcgacaggctttacgggttgagttttatcaaagaggtatggtatgtaatccttccgctgatcggacctaccgtttcgatcttatttttacaggggctgggcgtcatactcggattctatatgccggtattgcttattacgggcggagccgccgatacgacgacgtatgcgttctttacgattcagcttacaaacggagggcagtccaattacggctttacggcggcgctcagcttagtgagtacgcttatcatgtccccgatcattttgatctgtcggtatttcatcgataaatttttccccgcttacgagtattgaggtgcggattatgagagagaaaagaataaaacgatcgaggagcgaaagaatactcgtatacgtattggtagtgcttctttcggttcattctctgacattgctgtatccgtttttatggatgcttatcaattcgtttaagacggcaaacggttttgtaaaagatatttggggactgccttcttcctggcagtttcagaattggatcgacgcatttcaactcaccattccaaacgtaaacgtcaactttgcgggaatgtatctgaatacgctgtttttcgtcgtcgtgaatgtttcgctgaatatgtttttcaatgcaatttcggcttacgtagtcgcaaagtatcaatttaaggtgatgaaagtcatctattccatcgcgcttatcttctttgtggtgccgatgttcggctcgatagccacgctctataaattcctcgtcgacgttcagttgtacgacacctataccggcatcgtgcttatttcgttgcaatttttcaacgccacgtttttgtttctgtatgcctttttcaaaaatctttcctgggcgtatgccgaggccgcgtttatcgacggagccggacatttcagggtgtttataagcattatgatgcccatgtctatccccgtgctcggcgctctcgggattatgggcgttataggaacgtggaacgaatttttcaacgtttatatgtacgcgccttcaaaagccacgatcggcgtggggctgcacatcctctcgctgaatatccgaggggaatatccaaaactgtttgcggcgatgtttattgcgcttgttccgatcgtcgcgatattctgtattttccaaaagacgatcatggaaaacgtgtctttcggcggcattaaaggataaattttaattatgaaacgtttttcttcgctttacgctttttattcctggaacggcaatatagaaagagaagaactcgaagagcagatgcgcggctttgccgcgcaaggctttacgggcctttttattcatgcgcgcgcagggcttgaaatcccttatttcggacggacttggttcgaaagattcggctttgccgtgtcgctcgccaaagagctgaatatggagataggtatttatgacgaaaacggctggcccagcggctttggcaacggggccgtcaacggtcttggggaaaaatattggcagaaaagattggctttgaaaaaaaactttcacccttcttcccataaaaagttactgacggcttataaaaaagacggggcaagatacgttcgctgtgcggaaagagaaggagagctctttgccgttatagaggaaattccccaatatgtcgacttgctttcgccgtttgtaacggaagcgtttttagaatctacgcacgaagtttaccgtaaacactttggcggagaattcgagaaaaccatcaaatatctgtttacggacgaaccgcagcttgccgctccgtatgcgtataccgagggaatcgaagagatctttttcggcgaatacgggtacgatatgctcgaagaattgtggcgtttcgcgtttgaaacgcgggagttcagcaaatttcactttgattaccgctcgctcgtttcgaaactttttcatcggaattatactcaaaaagtcgccgaatggtgtaagaaaaacaacctgtgcatgacgggacactttgcctgcgaggaaaataccgtcacgcttaacctaaacggcggaccgatgaacggatatgaaaatatgcaagtccccgggattgacgcaatcgggcgccgacgtccgccggatacgttgtttgaacaggcggtgggcgctaaaaatattttcgaaaaaagcgatgtgttgtctgaaactttcggatgttccggatggggaaccacattcgacgattttcggttttattggtcgaatcaggcggttcggggcgtgtctttgccgtgtcttcatctttcggctttttctatgcgggggatacgcaaacgggattatcctgcctttttcagctatcaggaaccttggtggcaggattttaagccgattgcggaatatatgaaattttcggccggattcgtccgcggtgaaagattctcggatattttggtggtcgattccgaattttcctcgtatgggctttcgcccgaatgttttttggataccgtgctggcaaaaggatacgccgagctgatttcgtcgctcaccaaatgtcaggtcgcattcgatatcatcggcggcgggcttttcgagaagtatgcgtccgttgaaaatgataaaatcatcgtccgccataggacgtataagggactgattctgtcttcaagcctgttttttacacaaaaaacgctcgccgttattcactcggcgataagcatgggaattcccgttgcactcgtaaacgatttccgttcgatagcgccggacggcacggatcggattttttccgacgtcgcgtcggtctgcgattatctttggaaaatagaatataaacgtaaagtagcggcttatcggaaagacggtaggatagacggcgatatcgtcgtccgtaagtttgagcgcggttacgcattttttaataccgatcgaaatgccgaaaaaaccgtaaggatttacgcggcaaacgaaagggctttgaaagtaaaatacgcggagaataagaaagacgggcatatcgttttaaacgacggttatgccgacgtatgtttgtacccggggcaattgttattggccgaaagcgctgccgtaaaccgaagagaggacttttgcgaaaaaagatttcttctcgaacctttggagatcgtcaggagggacccgaatgcgcttaccctggataaagcgtgctattctcttgacggaaaagaattttccgcgtcgttgccggtgatggaaatcgaagaaactgcagccaaaaacaaatatacgcggatattggtccgctatgaattcaatgcggagtttataccgtccgatttatgtatcgcggcggaacgaggggcaaaaaagattgaggtcaacgggaagccttgtgatttttcgtctgcctggtacgtcgataaatcaatcgggatcattccgattgccggctgcgcaaaaaagggcgtcaatacggtcgaacttttctttgaaggacaagaggataatatccgtacgcccgaggcgttggacgaggaaaacgaaattgcgagaaatttattttcttacgggttggaaatagagaatatttatgttctgggttcgttttccgtaaagggcgataaatttgcaacggataaaaacgttctttatatcgagaacgattcctttgttttaatcgaagaaaacaagatcgagaaaaaggcgttgaccgatcagggactttggttttatcgcgggcggatagccgtcaggataaaaattcccgagttgaaagaaggagaaaaaggatttatttctctttcgggcggcggtcattgttcggcgagtttggagatagattctaaaaaagcaaaagatatttttttatatgaaaaaacggacgtcagcgagtacggaggacgatatgcggatttgattttgactgtttctaacagaaacctgctgggaccccatcatcattgtgcgggggagccttcggtcgtcggcggcaatacgtttcgcggcgtgagaggctttgaggacgaatggatcgagagtcgttataaaacttctacggccattaaaaaatatggttttgtgcccaatgaacttcccgaaatctatttttatgtcgtaaacggtaaaggaaaaaatgaatagaagagaaagagtcaatgattatataaagaaccattggaaaaatacggtcagaacggaaacttcgaaagacgacgaaattcccttgccctatcctaagacggtaccgtgcgagaaccaaaggtttacatactttttttactgggatacgtatttcgcgaatctcggattgttatacgatatgccaaagcaggctctgaataatttgcgaaatatgaagtgtttggtcgatcgcttcggatttattcccaatgcgaacttacattgtatgttgaatcgttcccaacctccgttgttttgcagcgcagtttatgattattatcgaatgtatccgtccgcagatacggtttgcgaattttttggaagtatgcggcgcgaatatgagttctggatgaaatcgagaaataccgattgcgggttgaatcaatattcttcttccgcgacgaaagaggaaatcgaacgctttgtcgatgaggtggcgcttagaggcatacttaaaaagaacgattgcgatgcgtatgaaaaatcaaagaatttatttgccgaagccgaaagcggatgggatttttcgccgcgttttgacgggagggcacttgattttgttcaagtggatctgaattccattctgtatagaaatgaaattattatctccgaatttgctaaaattctcaatgacagtgagttatcggaaagttttgcccgaaaagcggatagacgaaaaaatgcaatgtatcgttatatgaaagactgcgacggcatattgcgcgactacgattttataaacaaaaaacagtcggggataatcagcgtggcaagtcttctgccgttttgggcgggaatcatcgacgatcgggaagtgtgtgaaaagattttgagcgttttggaatgcgaaaaggggattgccgcctgcgaaaagtcggaagggagtatgtttcaatgggattatccgaatatgtggccgccgctcgtctatttttccgtgaaggcgttgcaaaattccgcctcggacgacagcgccaggcgtatagcggataaatacatgaatacggtcgcggaaaattttgatgccggcggctgtctttatgaaaagtattcgtctgtgacaggcaaatattcgaatcaagaatatgaatcgccgaaaatgctcgggtggacggccggagtatttcgtaatctgtatgaatgcttttatcacggatattatttaagaagaaatatatggaacttttattgaaaaatgatgtgccggtcgaagatcaggtcgaaaatcccatacgctttatcggcgaaaaggggtataagatactcgtcgtcggaaactctattacgcttcattcccccaagccggagataggctggacgggcgatttcggcatggcggcaagctgcgaaaaagcggattttgttcataggctgtatacgctatgttctgagcgcgggaaaacccggatgtgtattttgcaggcttcggtttttgaaaaatattattatcgggactttatatttgacgaataccgcgccgcaaaagattttgccgcagactgtgtcattatgcgtatttcggaaaacgtcgcgcctgttcctaagcgttcggagatatttttgaagcgttataagcagtttgccggatatttaagcggagaaaacgcaaaacttatttttacaacggggttttggaaaaacgaattcgcagatcctatcgtcaagcgagcggctttggattgtaaagctgagcttgtcgagctgggagatttgggcgaggacagcgctatgcgtgcggacggactttttgagcataaaggcgtcgctatgcatcccggcgacaggggaatggcggcgattgcaaaacgtattttctcggttatatagatgttttgcaataaggctccaagaagtccgtcgcgataaaattttttatcagagtgtgagtatatggaaatgagtatggataaaaaaatccctcccttttttttgggaatagaaggattcgaggcgggacatagcgccgcggaaagccttacaaacagtgcgcagacggctcgttgtattttagagggcgataggtggaaacatgaagcaagcggactttgcgtttcccttttgccctcgggcgaaaggctcgttttaaagaacgaaggaaaggaagaaagaataatcgcgcatttctcgcggcgggtttctttgaaaataactccctcttcccctcgggatacgatcattcattattttaccagctgttggcagagtgagtttcaatatcatgctctcacattggaggacgcggaactttttcccgcctcggtacatcccatcgttaaaagtttttcgatgatctcaaaaggttcgtatacgacgtgtacctatattccctttgtggcaattgaaaacaagcgaagcggaaagacgctctttctttccctggaacctactgcaaattggaaaatagaggtgggtattcaaggtgattttgcatatatttctgccggtgagatagacggccgtcatttagatacggtaaaaatacttgccgcgggggaaagttatctttcgcccaaagtgctttttggtacaatcgagggcggacttaatgaggcgataaaaattttgacgataaaaaagcgcggggaaaaatgcggcgcagcgtatcccgtcgtgttcaatgattatatgaactgcctttgggcgcaaccttgttcggaaaaaacatatcctttaattgaggcggccgcggaggcaggcgccgaggtgttttgtatcgacgagggatgggaatacgagaaagaagaggatagaacaaacagattaggagattggaggtattcaaaaacactctttggaaaagacggcttttttaaggtgatagaaacaataaagtttaaaggaatgattcccggactttggctggaaatggaagtggccggcgaaaattcggaagtctataaaaagagcgacgattggtttttgacccgaaacggagtgcgcgtaggcggcggggctcgggtatttctcgattttcgtaatccgtatgttcgcgaatatatgttggaaaaagtcaggttctattacaatgcggggatccgttttatcaaaaacgattataacgattgcatcgggaacagcggtttcgacggggtggaatatacccgggcggtgagagaattttatacggagcttaggagagaatttcctgatttgatgcttgaaaactgcgcttcgggaggaatgcgcgccgattatgatatgcttcgcatttttgatatccaaagcacttccgatcaggaaattgccgcaaattatccgtcgatcgcgcagggcgctttggcgcatattccatctgaaaaagcgggaatgtgggcgtatccgtatccgcatttgtatgacgattttcaccgcggaaaagagtttgctcccgatcaatacgatgaggaaagtatcgtttacaccatgctcgtggggatgagcggcgtcttatatctttccggcagaatagataagggagcatcttccggaaaagccctgataaaagagggcgtgacggtgtataaaaagatacggaagtttacggctgaggcttatcctagttttccaaacggtttcgtgcggattcccgaaaaacagaaagccgtggttattttatttagaaaagagaagagcaatacaggtttgctgtttgtttggcggcaagaggggaatgctgaaattattattcccgtcgcggcaaagagcgctgttttgctctatcctaagtcggcaaaagaaagggcaatatgcggcagttctataaagttgaattttggcagaccttacatgggaaggcttttcgaaatagaattttgataagagtggtcaaaccgtttggaaaactgttctgcacaggtataaagcaaaaaaacgccaaaatgatgaaatcaataaaaaatgggatacttagagtatcccgtttttttgtaagccaaaaatagcgcataagataatggcggaagggaaatttagtggaaaaaaatctgccgataaacgtatatttttttgtgctataataaaatcgtaagaacaggaatcataaaaacgtttatattcggttcgccgtgttaaaaatcagaaagaagcttttaagaaaagaggaacaagcgagtggaaagcaacgcataagcgagagggataggataagaggaatgaaagtgagtacacaaaagtcggtgcaaatatattgtccgaattgcggaaacaggatagagggaaatagaggagagaacggagtcctgcgtcgaacgtgtaagaagtgcggggcagcggttgtgagtaaacagaaaaagaaaaatgagatagaagtaaagataataaaacaataaaatcatcgttgtaagtccacacggcggtcatgctgaaacagtgcattagtaaatccggtcgtccatagacggcaataagagttcgtaaaacgtctaaaaggcgtcagagcaagacctgaataagcgtcttggcgaacagtccgcctccaagaaccggggcgctgtttgtcaagacgctttttttgaaaaaaaatttaaaaaagttttttgtttcgggcacaacctgcacgaaaaggagtggaaaatagattctgaaagaacagaaacgagaaggatgcaatctcgtcctataaacgaataaaaaagggaggtgaacccgatgcgctaaaaaacaaaaagagttatatagaacagatcggcatacaggctttataaacaacgataaaaaataaaaaaaaaggaatcaaagaaaatgggaagtatcaaattaaaaaatataaacgaagaagtaatacaagagcagtcggaagaaataaaggcggttcaagaacaagcaatgatgacggaagaaactctcaaaagggagaaaacctgggaagatccggcggttttgagcgaagacgaagaacacatcaacgaacactcgcggcattatctgctcaataacaacacggcgaaaagcatattcagcgcgatgcctgtcaattattacgacgaagaagaaaaggaatggaaagagatagacaattccctggaagagaaagaggacgggtatgaagcgaagtgcggcaaattcacaaccaaggtttccaaagcggaaaagggaaagaaagtagagatcaacgggagagatttgtctttatcgtgggagtatcttggcaagcaaaaggcagagggcgaaaaaacgttcttaaatgcggcaggtatgtcgatggagatagagggagcgaaagcagggacttcctccgtgctccaagtggaaaagagcgtaaagggagctgtaaacagtaagataagccgagcggtatacgaaaatgtagaggaaaatatacggaaacaaaggggtcagaggtaatattacaatacgcgcgtaattataataataacggtcgggtggacag

SEQ ID NO: 2848 - DNA, 9767 bp, Unknown
  16S sequences of unknown bacteria
aatggaggaataatcaaatggctcgtatttctggtgtagacttaccaagagaaaaacgtgttgagattggtctgacttatatctacggaatcggtagaacaagttccaatcgtatcctggctgctgctggggtaaacccggatacccgtgtcagagatctgacagatgaggatgttaagaaaatcagtgctgttatcgatgaaacccagactgtagagggtgatctgagaagacagatcgcaatggacatcaagagacttcaggagatcggatgctacagaggcgttcgtcatagaaagagccttccggttcgtggtcagaaaactaagaccaatgcaagaaccagaaagggtccgaagaagactgttgctaacaagaagaaataagtaaccagataatcaatagaaagtaaaagaaagtaggttagtttagaaatggctaaagttaccaaaaaagtgacaaaaaagcgtgttaagaaaaacgttgaacgtggacaggcacatatccagtcatcttttaacaatacgatcgttaccctgactgatgcagaaggaaacgctctgagctgggcaagtgctggtggtcttggatttagaggttcaaggaaatctactccgtatgctgctcagatggcagcagagactgcaaccaaagcagccctcattcatggacttaagactgtagatgtattcgtaaaaggaccgggatcaggacgtgaagctgcaatccgtgccctgcaggcatgcggtcttgaagttatcagtattaccgatgttacaccggtaccgcataacggatgccggccgccaaaacgtagaagagtttaatcaggagggtatgagagatggcagtaaacagaacacctgtgcttaaaagatgccggtctttaggtctggacccggtatatttaggaattgataaaaaatccaacagaaattctcggagagctaacaagaagatttccgagtacggccttcagctgagagagaaacagaaagcaaaattcatctacggcgtgctggagaagccgttccgtaattactacaaaaaagctgatcgtatgaaaggtatgactggtgcaaaccttatgatcatgcttgagaccagactggacaacgtgatcttccgtcttggatttgcacgtacccgtcaggaagctagacagatcgttgaccacaaacatgtactggttaacggaaaacaggtaaacatcccgtcttatcttgtaaaagccggagataccgtagagatcaaagaaagctgcaagagctctgatcgttacaaagcaatccttgagtccactgctggaagacttgttccggaatggcttgagtccgatcaggagaacctgaaaggtgttgtgaaagagcttccgaccagagagatgatcgacgtaccggtaaacgagatgcttatcgtcgagctctattctaaataattaggaaccggaaatgatatcacccaacacagaacaggaggggctttttagtggtagtatttaataaacccaagattgaaattgcagagatttcagaagataaaaaatacggcaaattcgtagtggaaccattggaaagaggctatggcacaacgcttggcaattcccttagaagaattatgctttcctctttaccgggagctgctgtaagtcaggtaaagattgatggtgtacttcacgaattcagctccatcccgggtgtaaaagaagatgtgacggaaatcatcatgaatatcaagagtctcgcaatcaagaacaacagcgattctgaagaagcgaaagttgcttacattgattttgagggcgagggtgttgtaaccgcagctgatattcagtgcgatccggatatcgagattctcaatccggaagtggtgattgcacatctgaacggtggcgcagacagcaagctttacatggaactgaccattaccaaaggtcgcggatatgtaagctccgataagaacaagaatgaagagctgccgatcggtgtgattgcagtagattctatctatactccggtagagcgtgtgaatctgaaagttgagaatacccgtgtgggtcagattaccgattacgataaactgactctggacgtatacaccaacggaaccctggctccggacgaggctgtcagcttggcagcgaaagttctgagcgagcatttgagtctgttcattgatttatcagagaatgccaaatctgcagagatcatggtagagactgagagcgatgagaaggagaaggttcttgagatgaatattgacgaactggagttatccgttcgttcttataactgtctgaagagagctggaatcaataccgttgaggagctgtgcaaccggacatctgatgacatgatgaaggttcgtaaccttggtcgtaagtccctggaggaagtccttgcaaaactcaaagagcttggtctggaactgaaccagagcgaggaataagaactataaactgcctgcgccgataagtccaaagatgcacggcgcaggtagatatctgtaagttgacagccagacccctggacaataagtccgatgatgcgtgtacaggggcgcaacgaaaatggaggaaatgaaaaatggcaaaatatagaaaactcagcagaacttctgcacagagaaaagcactgatcagaggacaggtaactgcacttctggcaaatggcaagatcgttactaccgaagctaaggctaaagagatccgtaaagttgctgaaggcctgatcgctcttggtgtaaaagagaaagataacttcgagaccgttaaagttaccgctaaagttgctcgtaaagacaaagacggtaagagagtaaaagaagtaaaagacggcaagaaagttaccgtatatgatgaagtagagaaagagatcaaaaaagatcttccgtccagacttcatgcaagaagagaaatgatgaaagttctctacacagtaaaaactgtagaagagggcaagaagaaagcaaaagaagtagacatggttgctaagatctttgatgagatcgcaccgaaatatgctacccgtaacggtggatatacccgtatcgtaaagatcggacagagaaaaggtgacggagcaatggaagtacttcttgagctggtataagttcatccaagtatttgaggtcccgcagaagcaattctgcgggatttttgtttgcgtgccttgcggcgcacgattctagcgttctataactctgacgggagtatttttatattcttctgtcagagcaaatcgttctctgagtccatctgtaatatagacttcttctgtatcagtaacaaacacagcttcaaaatcatcactttgcatccacagctcagcagatttttcaagacccataataaaaagtgaagtagaaaatccgtcacagatcataccatcatctccaataatggtaacagagagcagatgactgtctgctggtcgaccggtggcaggatccataatgtgccagtaccgctttccctcctgctcaaaataacgctcatagcctccggaagtcaccacggactgatcactgacagatacaaccatcataggtttggtagtgacaggattcttgatagcgacttgccagggagagccatctggtttatttccaatggtctgtacattgcctccaagatttagaaatgcggaagtaataccttcttttttcagaagatcagccaccttttgaccggcataacctttggcaacactacccagatcaatctccattccagcaggaagtacaacatctccagaggaagaattgtattgaatccgggtataatctacaagagataaaagattagagatagtgttgtcgtctggtatttgatatcttccggtagtaaaaccccaacttcgcacaataggatagatagagatatcaagtgcaccgtctgtgcgctggcacatattcaatgctttcgtcattaaatcattggcataaccggtaactgtaccataaccgttctgattgataagtgctatttcactggtactcttcgtcacagagagagtatcttccagtgtattgatgagcttttccgcatcatctaaaagagcagcatccccatagattgtaaagtccataaaagtgtccatggcatagaaggtcttttcctgcatatcagtagattttgcacatcccgtaagggttgcgcatatggaaagtgacaataggatagcaatgtattttttcataaaaggacctttctgataaaaaaattcaagtgagttatttagagtgttattctggttgacaattaaatcacaatctgatatgttttgatcggttggttataataaactaacatatattgaaaatgaatatcaaatacttcgaaatattcaataaaatatatttgttagatataactcactgtaggattataccacggtgaataccgactttcaacaataaaacagggaggtacatatgaaaaagattcataaaaaagtgatggcactgttgttggctgcgttgatgattacatctgtgatggatacccatgtacaggcggaatcctcgacggaagcaaataacataagcgtcgtgaatgatggaacaggagatgcagaagaagtctctgatgttgagaaaaaagacatggaagagaataaagatgagacggagaagaaagaagaatccgatgttgaagaagcagatacggaagcagtaaaagaggaagtggaaggatcggcagatgatgaagaaaagaaagatgtagatacctacaagtcaaaaaatgaggttgtggaacaggctgctaagaaagcaccgacagaggtgaaatcttgcacagtatcaggattcatgccggaattattaaatcttgaatttagtgatacagactggatgaatgcaattacaggtgtaactgtaaataatagtgcatatagaaaaggaagtcttagttggacgtatgatactgacttatgggaagttggaagtgcaacaggtgcctatggaagctatactgctttgaaaatgtgcaatccgtcttcctatccggcgactataaggatttcagcaaccaattacgaagatattgaaattaaggtagaaaaagatacatcaaaatatccttatgtttacactgcaaccattgaatccaatggttcaggagagaatccagatacgccgtccgcagagtcctatgctatcacagtaggagcatctgaaaatggtacagtgactgctgacaaagagactgcaaaggctggggagacagttacacttagtgtagtagcagataaaggttatgagctgggtactctgacagtttcaggaacaaacagtgaagttgttgagacaactaagacaacagatggtacatatacctttaccatgccaggtgaggcagtgacagtaactgcgacatttaaggaatatgttccgggacagattaccgtttccaatgtgactctgagtcacgatttttttggtaacacatggtattttacttttgacatagatggatatgcaaaaaatattacagcttttaaagtaaacaagaccgcttggacgaaaaataccttagtgccttctcttggaggtcagtattatcctaatactaatgaaaacagaattgaagtagctgcgaagagttattctacagcacctggggctgaggtgttgaagaccggtgacagcattatcatttctgcaacaggatattcggatcttgcactgaagtttattattgatacaaatggaaatgcgtctctggtcgcagatgatggaaagggtgacccctatgaacttcatgtaaaaattgatggctcttttgaagcggcaattgttggacaaaaagactacgacggtgtatccggcgctagctcaggtggcaccagctctaataagaacagtgctgtgacagtttatggtgcgttggttgagaaaggatcagaggtacaggacagtgcctggaaacctctgaatcatcaatcaaatatcagcttaaatgggaagaaatgcaaagtaaatattgtaccggatacagaaagcggaacaccagcggataaagtcagcggtatgaaaggtgtttatctgactttgagcagtgatctgacattagatggaacgccagaagatgcaggaaaatatctgatttctatttcggttgaagatgatcaaggtcgtacagctgtcagcaatgcattaccatttgtaatctatactggagaggaaactctggcggatcagatcaaaattgagaatctgaagcaatattcaaatgacctttatgcctgggatattatggagccatgggcaatcaagaattttggcagtaatgtggcagggaaagaaaacagtgttcgtgtgccgaaagatctggaagtatggtttggttcccatcagagtgggacctatggatatctgggatatgatatcacatgggatcaggtaaaagcgggaaatattccgcagactctgtatattccagatggctgctcactgacgctgaccaatatggagatcttaagcagtgtgcggatcgttgttgaatccggtggaaagctgactctttcggattctgttgtgcagggaatcattgatgtgcagggcggtggtacattctccatgaactatgatgcatttaatggagtgtttactagaggagcttcagtgtgcgggcaggtgcgtctggctgatggagcaattcttgaaaatgcagctatttattcgcataccaattatctggctaacggagaaaagaccgatcgctccaatgatgatccagtcgtgcagacaacaggaaatgtgactgtcaaaggtcaggtctatattaaaggagacgaggcaggaggcactggaaaaggtcagactgcacttggagtgaagaatggaacgataacattggcagataatgcagttctggctacctacggcggtggtggaaaagttctgttggacgcagaaggtggaaatgcattgaagcttgaaaatggaacagttacaggaaatggtcagttgatcgctattggaggagatgtattgtggggaaaaggcggaacagcagtagcaggctcaggtgctatcaccactaagtcagcattattgcagggtgcaacttcccgtgagacaaagaaagcagaacctggaaaggcagcagatacaagtgtatgggtcaatagtccgaaccgttatgtaaaggacggtacctgcattgatggggcagctaatgatccgttagcagatctttattggacagccggaggtgttgaagcaacaccgaaagcagagacacttacgaaatacacagagctgacaaatatgtctaataatgaaaagccagagattgataagaacccgggcaatggaagctcagcaggtgtgagcagcagctctggcagtcataagcataaacacagcagttccgataacagtgctgctacaacgagcgtacaggctgcggtaaccagctttgcagaagcagtgagcggtactgccacagcaacaaatacaaagacgactacaaccttagcaaacttacaggcaattgcggcagctgagaatgcgaagaatgcagaagcagcttctggcatagatgaggaaactgaggatgcagggtctgtaatagtcagtgagaatgctgcatcctatgatacagacagcgaaacagaggttgttgtagaagataacgaatctgatgctcagggacagaagaagagtggcatacctgtagttccgattgtgggactgctggcagtggcaggaggactgctgatcttctttgcaggacgtaaaaaacagaaataaaacaagaaacagaatatatcacagaaaggaaactgtcgttttcatgagtaaaatcagaaagcggcagttttcattttgagtaaaaggatgtataatataaataatttgatgcgataaactggaaaagcacgaagagaaaaggaggatcgatgtatggcaacgatttggactgataagaagagaagtttattttttggcttacctttgagtttcacgaaatacatctgtacagatgaaaaatttattgtagaagcaggaatgttgtctaccagagaggatgagatccgtctgtaccgaatcatggatctgacattggaaagatcgttcatgcagcgtatctttggtcttgggaccatcaaatgtgacaccatggataaatccatgccaaagcttgagattaaaaatataaagaaatccagagatgtaaaagagatgatctctgaagcagttgaaaaagagcgtgtgaagaagagagtatcttcccgtgaaaatatgatgtcatatgggatggattgcgattgtgattctgattgcgattctgattgcgatcatgaggaggacctggatcagtgataaatgaggcaatgtatggattgggaagcaaaagctctgtgatcagagaattgttttcctatggtttggaacggaaaaaagtagtaggagcggacaaggtctatgacttcagtcttggaaatccaagtattcctgcaccgcatcaggtaaaagatgccattgcaaagctgttggaagagccggcagaagtgttgcacggatattccccggcatcaggtgatccaggagtaaaagagacactggcacagtcagtaaaccgtcggtttggcacacattttacaggtgcaaatttttacatgaccgttggagcagcagcttccctgagcatctgtatcaatgcggtgacggaccctggcgatgaatttatcacctttgctccatttttcccagagtacactgtatgggtagaaaatgcaaaggcaaaattgctgatcaatccggctgatacggagagctttcagattgattttgatgcatttgagaatctgttgagtccaaagaccaagggaatcattatcaattctcccaataatccaagtggcgttgtctattctgcagagacgatccagaagctggcagatgtgcttcgcagaaaagaaaaagaatatggacataccatttatctgatcgctgacgagccatatcgggaaatcgtgtatgagggagtggaagtgccctatgtgccgaactattatgagaatacctttgtctgctattcctatagtaaatctctgtctctgccgggagagcgtatcggttacattatcgtgcccgatgagatggaagattccaaacgtgtgatggcagcagtcaatggtgcaggccgtgcactgggatttgtgtgtgcaccggtgctgttccagcgtgtggcagccatgtgtgctgatgtgccaagtgatattgcgacctatgcaaggaacagagatcttctttacaacggactgatagagctcggatatgggtgtgtacgcccccagggagccttttatctgtttgtgaaatcaccagaaccagatgccaatgcattttctgagagagcgaaaaagcatgatgtgctggtagttccaagcgacagctttggctgcccgggatatgtgagaatctcctactgcgtggcagagaagaccatcgtggattccatgccggcattcaaagcaattatggaagaagtaaaggcggagcagaaataaccagtaaagaagccacccatcaatttttattggggtggcttcctgttattatattttcgaatttctaaaacttcacttgcgtttccaagcaacacgtgatactatcaattctgtaatcaataaatcataaaatctatcttaaatcaagagaaagattccaacgaaagtaagcgaaaaaaagtatttttgttaatgaaaagtagtggatagtattcgcttatagtgtagctacataaagaaagg

SEQ ID NO: 2849 - DNA, 32759 bp, Unknown
  16S sequences of unknown bacteria
cctgcgcgccctacaggcgcgcaggccggggtgcaggggcactgcccctgctaggatttttgggtgaagctggtgtggcagcggctgcaggtgacggtcacaacgcccttgccgcggggcagacggagccacgccttgcagctggggcagcggaagtacttgtattgcttgcggttcttgaagcggttcttcgcctgacgaagctgagtcttgctgcgggagcaggccgactcgaagcggcggttttccgcctgacgcttcgtcaggttgcggctgaacatgcggtaaatgcacaggacgtagcaggcgaatccggccagattcagcagcgagcccagcagcatccagaacgtgccggaagccgtgccgatcagcgtgcccagaatgtaaagaatcaggccagtccataacaacgtcaggcccagacggtccgcaccgttgcggccggacatgaagttccgaagagattgcttgattttctcccaaaatgacattgctttttcctcccgaaattcgcgttagcagccgtaataaaacccgcggctgccgcagcagcagttgcagaaaatattgatggcgcagcaggtgagaataggattggacagacaataggaaccaaagtttccgcccgtccattggcggctgtagctttcgccgcctgcgttcagctgcgccagaagttcccggaacgcgggttcgtccggggccatctggacggccttccgggcgtgatccagcgccgccacccggttgcccaggcccaaattggccttggcgctccaatagtaccacgctgccttgcggttctgcacggcccgcagcagcgaaatcgcgtccgaataccggccgctcaataccgcactggaagcgtttttcagctccgggtcgttctccgtgtagctgctggtctgataattccgctgctgaccgccgccgaagaaatcgccgaagtcaaagccgccgaaatcaaaccctccgccataattgcccgactggcgctggccgccgtagccgccatatcctccgccggactggccgtagccgccatagctgcccgaaccataactgccgccggaggaaccataccctccgccggaaccgtacccgccggtcgagccgtaactgccgctctgatagctgcccttgtgcttgataaggatggagtaagcctcgttgacctccttcatcttggcctccgcctcggcggaaccgccgttcaggtcaggatgatattttttggccagccgccggtaggccgccttgatctcgtcgtcggtggcgcccggcttcagctccagtacctcataggggtctctcatgccccgccctcctgtctgccctgccgctttacggcgggcttgtccttttcccgcttctgctgcttgagctggtatcggccccagcagccgccgtagaggatgttgcgaagaatgtccacatcccggatcagcggcagaagctcaaattcccgggtgcattcccccatcaccagcatcaggctttgccggatcagttcctcgaaatcctcctgtttggaaagctcccggagcggattgtaccgcccgtggtgaaggtcgccttccagatcgtcgtatgcgtccatcaggtaaataaaccgtcccagcgactggccgattttttccagactgtccgcccattcgtcctcccgccagcgatagagagtgcccagcatttcgccggtcaggttggccagccggtccggctccggcgcgccggatctttcgatctgatgaatctcatccagacagtgcctgagtacggcgcttttttcaggatagcgcttttcgatctgctcgaagctcttttgcagaagccccgcctccgcccggccggagagccggtgttcgtcctgccagtcgtccatgcatttgtggtagctcagcagaagattcacgtccgcagcgtaatccgccagcggattttccacaaactcatgttctttcatgggatgaggcaggcagcgctcctgcccgcattgttcctccggctcgtagagagaagaaagcagcatgtacaggaacaccgcgtcgtagctcagggtcatccggccggccgcgccgtagcgccggcccagattgcggcacaggccgcagtagtaggcccggtagcgtttccggcgttcctcgggcatttccgccgaagcggtcacatagccgaacatcagtgtttctcctcgtgagagtcgctgaaatccgcgtccaccgcgccgtctgtgtcgtcggcggcgctgttgtccgtatagcgtcccactgcctgcagggcattggtcagctccgccatgcggcgtttgagctcgctgtcgtccgtgccctgcatggcctgctccacctgcctgcgcaggccctcgatgcgttccttgtcctcccggctcagcctgcgctgggcgtttttggattcgtaaagcagctgctccgcctggttgcgaacctcggcgctctccttccggcgggcgtcctcggcggcgtagcgttccgcgtcccgcatggcctgttcgatctccgcgtcggacatgtgggtggactgggtcagggtgatctcctgatgcttgcccgtgcccaagtccttggcggacacgtttacgataccgttggcgtcgatggagaacgtgacctcgatctgcgggatgccccgcagcgcccgtcggatgccggtcaggcggaagcggcccagcgtcttgttgcagctggcgatctcccgctcgccctgcagcacgtggatgtccacagaggtctggaaattggcggcggtggtaaacacctgactgcgctgcaccggcagggtggtgttgcggtcgatgatccgggagaacacgtcccccacggtctcaatgcccagcgaaaggggcgttacatccagaagcagcagacccttgacctgaccggccagcacgcccgcctgcaggcacgcgcccatggccacgcattcgtccgggttgatgtccttgctgggctccttgccggtcagccgcttgactgccgcctgtacggctgggatgcgggtagagccgcccaccagcagtacccggctcaaatcgcgcgcctgaaggcccgcgtcccgcagcgcctgctccactgggccgacggtagcttccaccagatgggcggtcagctcgttgaacttggcccgggtcaggtcgatctccagatgctttgccccgtccggcccggaggtcaggaacggcaggctgacggtggtggtcatggccgcgctcaactcgatcttagccttttccgccgcctcccgaatgcggctcatggcggtctggtcgtgggtcaggtcgatatgctcccggcggcggaactcctccaccagatagttggacacgcacgcgtcgaagtcatcgccgcccagccggttgttgcccgccgtagccagcacctcgatgacctcgttgttgatgtccagaatggacacgtcgaaggtgccgccgcccagatcgtacaccatgatgcgctgggaaccgcccttgtccacgccgtaggccagcgccgcggcggtaggctcattgatgatgcgcagcacgttcagtccggcgatgcggcccgcgtccttggtggcctgccgctgaccgtcgctgaaataggcgggcacggtgatgaccgcgtccgtgacggtctcgcccagataggcctctgcgtcctgcttgagcttctgcaggatcatggcggaaatttcctggggcgtatatttcttgccgtcgatgtttacccggttatccgtacccatctcccgcttgatggaaaaaatggtgcgggatccgttggtcacggcctgccgcttggccgccgcgcctacgatacgctcgccgtttttggtaaaggctaccacggacggggtcgtccgtccgccctctgcgttggggatgaccacggcttcgccgttttccatcgtcgcaacgcaggagtttgtggtgccaaggtcaataccgatcagtctgctcataggagaaaagactcctttcctaaggttctttcttatcataacctatattttcggaaaaagcgtagcgtaaaaatgaagaaaccgtaaacaatacgccttgggagggaaaaaacgtgaatttgtacctgttgtccctgctgatctacagtctgatgatcctgcccgtcagcgttcattttcgggttcggctgggccggcgctcgggctaccgggtggaatttcgggcggcggggctgcccctgcgccgcaccgccccgctgggagacccggacggcgaaacgcccgtttcccggaaaaaagggctacggaaactgctttccacagacgcggcgcttcttcgtaccctgacggacaaagcggtgctgcggcattttgcccggatgctccatttgcggaaatgcgcggtcttcctgcgtttttccatggaggacgcggcactgaacgccctgtgcttctgcgccctgcgcaccctgacggagactctgcggctgaccggcgcgcttcccgaggtcttccgctgtcatttacaggcggatttctcccgaagcggcacggaagcgctggtggagggtatagtcggcctgcggctgggcagtctaattccaacgatggccctgatgggttcggtctacctgcgcagccgcaggcagtacgcgtccggcgaacggccgggagccgcggtctgacccattcccacactcattttcaaggaggaacaacgatgcagcagcaacatcccatcgacaatatgatgcagaccaccatggagagcatccgcggcatggtggacgtaaacacggtggtaggcgcgccggtcatggatcagaagggcaccaccatcattcccatctccaaggtcagcttcggctttgtggcgggcggcggcgaatacgccgtagaggacggcaagcaaaagcccgtgcccacggacatcttcccctttgcgggcggcacaggcgcaggcgtatcggtgcagccggtgggctttctggtggtgacggacaagcaggtgaaaatgctgcccgcccagaccaccggcgccatggaacgcatggtggagcttctgccccagctgatcgaggaattaaacgccaaggacgaaaagaagaaaaacaaaatcttcggaaagaccgacgatgagcttctggacggcgagctgcaatgaaagatcgtcttttccaacggttccgccgattgtttctgttcgtctgctgcgcggcgctgaccctcctcaacggccacgcccgcgcccaggaggaaaagctcatcgagacctccgccaaggcggcggtgctgatcgaaaaaaacaccgggcgggtgctctaccgctgcaacgaagaaaccgccctgcccatggcctccaccaccaaggtcatgacagccctgctggcgttggaagaagggaatctggacgatgtggtgacggtcagccgaaacgccttcggtgtgccgggcaccagcatctacctttccgaaggggaaaagatcaccctgcgcgacctgctctacgggctgatgctggccagcggcaacgacgcggcggtggccatcgccgagcacatcggcggcagcgtggacgctttctgctgtcggatgacggaacgggcagcggagcttgggtgccagaacaccgtgtttctcagccccaacggtctgcccacccccggccaccataccacggcctacgatctggcgctgatcgcccgggaggccatgaaccaccccgaatttcgggagatcgtctccacccgccgggcttccatcccgtgggaaggccgaagctattcccgcatcctcaacaacaaaaaccgcctgctggccgattatgacggagccaccggcatcaagaccggctacaccaaggcggcgggccgctgtctggtcttcggagccaagcgggacgggctggagctgatcggcgtggtgctgaactgccccgactggtttcaggaggcggagcggatcctggacatgggctttgcggaatacgagtacttcacggcttttgccgccggggaaagcgtgcgcgtcctgccggtgcaggacggcgttcgggagaccgtctccattgtgacccagcgtgggctgggcgcgccggtgcggaaggggcttgtgcctacgctggaatacaccctgccggacgaactgcccgccgggttccagctgggggacgaaatcggcgaagtccgcctgatgctggacggccgcacgctggcttcctccccgctgatcgtggcggaaggcgtcccggagcgggattatgcctatgaagtggaacggtttttggagttgtggcccctaagcagcgccacggagcaacgttcattcgctgaaactccataagggcccgtcccggacttctctttatccgggacggggttccctgtttgtccattctttgtgaccacaggcttcgggcttttgctgccgtttgtcccttgaaatggctttgccggagaaggagcacagcttaaggttttagtacctctatcctgcccggcaaaaggcaatactttctgcgcgttcactatttttagaaaggaacccgccccggacttttcatcgtccggggcgggttttacaagccgctttttaataccgaatgagataatagatcacatacacccagctcagcaggccatgaaagatggcccagcccacggaatgccagttcacatagctgatgaccatggccagcgcgctgccgaaggtaatgccgcctttgacggttttggtgatggtttctctgcgcattttctttttccccgtttccttcgttcgttagtggttcgctattgcgcccagcgggatggccagaaagaccagccagcccggatgccacaggttgaagaaaaatcccagcaccagatagatcagcgtgaccagaatggggttgctcagctgttccagccggtttttggggtgcatatagtgcagcggaatggtcagaaagatcagccaacccggatgccaaagatggaaaaccgcgcccagtaccagataaagcgccgtaatttcaatgggaaaaagtgcgtcctgcttacggcgcttttcctcctgccgttttttctccacggcttcgtaatagctgccttcgggccccagcccgccgttatcgttttgcgtcatggtttcttctccctttcccgcgcctttggcgcttggtacggattcatcatagcactttttgtccacagagaaaagaagccgcgcgttcaaagtaactgaagcgccgcttgggaagaaatgagaaaatgctgagaaaagacgggccagccctttacaccgcccgccgggacgttgtatgataggattgaatcgaagtagaatttccggcttttccggaaagacaggagtgtgtgcctatgtcgttcttttccacccgcggcggtgcgtgcgtgaccgcctctcaggctattttgtgggggctggccaaggatggcggactatatgtgcccagcatgttcccccagctttccagcgaacgcatggcttccctgtgcggggccagctatcaggagcaggcggcgcggatccttcgggattatctggaggactataccattgccgagatcgagcagtcggtcaacgcagcctatgacgacaagcattttgacgaccccgccgtcacgccgctgcataccctgatgccggacgtgcacgtgctggagctgttccacggtcccacgctggcctttaaggatgtggcgctgaatctgctgccccacctgattcgtctggctgcgaagaagaacgatgaggaacgggagatcagcattctggtggctaccagcggcgataccggtaaggccgcgctggaaggcttcaaggacgtgcctggcaccagctgcacggtattttacccctacggcggcgtaagccgtatgcaggaactgcagatggccaccaccggcggcggcaatacccacgtcatcggcgtgaagggcaattttgacgacgcgcagaccggcgtgaagcgtctgttctccagcgcggaattccgggagaagatgaacgccatgggcaagctgcccagctcggccaattccatcaacttcggccgtcttgccccgcagatcgtctattatttcaacgcctatactcagctggtgcagaagcactccatccgcatgggccagtccgtgaatttcgtggtgcccaccggcaacttcggcgacattctggcgggctactacgccatgcgcatgggactgcccatcgcccgtctgctgtgcgccagcaaccgcaataacgtgctgaccgacttcttcgccgatggcacttattacacccatcgtgccttcttccagaccatgtcccccagcatggacattctgatctcctccaatctggaacggcttctgttcgaaagcaccggccgggatcccgcgctggtgcgggagtggatggccctgctttcctccgagggcggcagcttctccatcggcgcgcagcgtctgaaggagctgaaaaaaaccttctgggccggatacgcggacgatttcatgacggctgcggaaattcgccgtatcttcgagcgcttccattatctgatggatcctcacacggccgtcgccagctacgccctcaagcagtaccgggaggaaaccggcgatcatacccccgctgtcatcctgtccaccgccagcccttacaagttctccgaaagtgtgctggccagtctgcagggcgaggacgcggtgaaagggatggacgctttccagtgcgcccaaaagctggaagaactttccggcgtgcctgtaccccggcagattcgggagttggagactctgcccatccgtcacaagcgggtctgcgaggtttccggcatggaagacgctcttatggaggagtggaagtaaccgtcagcgtacaagccgctgcggcatagcccagattatccaggctgacctcccacgccgccccctccgggagcgaaaattccacgtaatttccctgcacaggacggcagacgatccagtagcccacctcgccggtcgggcggatcatcacctgccggtgctggtgcaggaaggccagatattccgcaaaattcagcccaaggcaggtcatggcggcggcatgggcttcccccacatatcggagccggactccgttccgggaagtcgagacggtcacaaagccataacgccaggccaactgcagtaaaagccgcccgcggggagtttcctccagcgggcggtttgcgtccggcggggcggaaatctcgaccgtatactcctgcagcagttcgccctgtccgggcttgtccgtctcctgcaggacccgttctgcggcttcctgcaaagaatgactggctgccagcacccgaaagtgattcagccgccattcccgctgctccagcggcgtcatggtaccccggctgaccttgaaaccatccgcgccgctgccccgcaaagccgcaaacagacgcgccagcgcccgaatggtttccttgccgctcttgatggtcagatcgttgaccggcaccatgccattgccgtatcgggcgatgctcatggtgttgggtgcaggcgttccatccgggaagacatggttttcgtccagatacagcagttttccccgcagcagctgttcctttggaaaaatttgccgggagcaggtgattccctccgggaggacataggaaacggcgctgctttggggacgcgctgccaggagggcttcttccgtctgctgcaactggctgtattcccgtggtttggagcgggacgctatgaccggcagcaaaagtgcgactgcccacgcgcccagcaacaggagcgcccaattccggcggttttgccgccaacgcggtttcggcttccagcactgagcgccccagcagtccgtcctccttcgagccgtacggacgtactgtctgcgccattcccgctccgtcatcagtccttcggacatatccatccctcccggtgatagcatgaccggcgaaatggaaaagcatacaaaaacaggaaatggcggatttctactccgcaaacacagaaagaagggatttttatgctgtcccccatgagacggcgggagcgcgccgtaaccgactggaatcacgtactggaaatcattcagagctgcgactgctgccgtatggcctttagtgagccggacgggccatacatcatgcccatgaattttgggattgaatcttcgcaggaaggccagatggtgctctattttcacggagcatcggcagggaaaaagggagaattgatgcagaaaaatccgtgcgtggggtttgagatggacacgggtcacgtgcttgtaccaggcgcacaggcgtgctcctgttcttttctctatcaaagtgtgatcgggaaagggaaaatagagattctctcaaatctggaagaaaaaaagcacgggttaaccgtgctgatgagacattacgcgccggggaaggaatgggattttccttcggccatgttggagagaacagcggtattccggctggatgtgacagaatggagctgcaaggagcacagcagatgaagcgttggtgggggcggattttatccttggagcgctggttgttcgcctgggaaaggtatttggggaattccccgatggttacgccctgacaggttataaggcaaccgaaaagatactgcttacaccgagcgcgggagttatgccgagatttttccccactgggggaatgatgcgccgactccggtgcgggagctgggcttgcagccctatggggcgctcaagcttttctttcgacggcccgaaggggtgcagggggcgagcggaaagccccgtgcaagcatcgggatgcgacaattttgccatgaaaatttcccttgtgggggcctgacgcgccgactccggcgcgggagtgggacttgccgtcccatggggcgctcacacttttctttcgatggcgaaagaaaagtgtgcaaaagaaagccagcggcacggcactacgggaaaaaggcttttattgcccattttgacggcggggctcgcaatgtcgcgcgcaatggagttagatagctatcacttacgctttgagcgcgctcgtgctcacctttttccgccgtcaaaatgggcgggcctttttccctgcgttgcctaacgccgctcggctcccccgccgctggcgtggggcatactcaaagggatgccagttgggatattgcattgcagcttgtgctttttcgcagcacagaaaaagagacttgattctttctattgattttttgcaacgaaaaaggccagcgggattttatatccacgctggcctttattgcgagccatgaggccccgtcgccgaatggcggtcttttctactcaactgtcaggaaactgcaccagacccgcgagccgcgaggcccgttgccgagcggcggtaaaaccccggccaagccgcatgtccctctatgcccctgcacggctccgccgcgcagaagtgggtgcagggctttagccctgccagaccggcgagccgcgaggcctgtcgccgagcggcggtaaaatcccggccaacctgcatgtccctctatgcccctgcacggctccgccgcgcagaagtgggtgcagggcttcagccctgcttgatggtaccgtcggggttgaagagcgggagtttttcgaggtaaaggatgtcggggcgatcctgtgcggcgccctcggccagaatggccattttgccgaccacgttgccgccggcctgcttgaccagcttttcgacggccttgagggactcgccggtggagatcacgtcgtccacgatcagaacgcgcttgccgcgcatgaagtccgcgtcgtcctgatcgatgcagagcatctgccggttttcggtggtgatgctggtgacctcggtggagaaaacgttcttcatgtagagcttggcggccttgcgggcgatcagatagcggttttcgccgtgctgacgggccatttcataaaccagcgggatgcccttggattcggcggtgatgaggatgtcgtgctccggggcgatcttcagcagctcccgggcgcaggccacggtcagctccacgtcgccgaagatgacgaaagcgccgatgtaaaggtcgtcattcacccggcacaggggcaggtcgcgcttgaggccagcaacgttcatcgtatagaacattttgggtttccactccttcaaaacaagtcaaatggcagggcgctgggcaccctgccattcattataacacactttggatcaaagtgcagcaagaatgtacatcaccacgaacagggcggacagaatgtacagcagcacgggcacttccttgaacttgccgcgggccatcttgatcagggtgtaggaaatgaagccgaagccgatgccgtcggagatggagtaggcgaagggcatcatggcgatggtcaggaagcagggcagcgccacttccacgtcgctccagtcgatcttggccacgttgccgatcatgaacatgccgacgatgatcagcgcgggggcggtagcggcggaggggatgataccggcgatgggggccagcacgcagcccagcaggaacaggatgcccacgaccacggaactcagaccggtgcgggcgccttcggagataccagtggaggactccacgaaggtggtcacggtggaggtgcccatcagagcgccggtgcaggtggccacagcgtcagcgatcagcgccttgtcgccgcggggcaggttgccgttttcgtccagcatcccggcgctgcctgcggtgccgatcagggtacccacagtgtcaaagcagtcgcacatggcgaaggtcacgatggcggtcagcaaaggcaggatgcccttggacagcaggcccacaaagctcagtttgaagaaggtgggggcgatggagatgccctcgaaggaaatgctcacgttggagagattggtcacgcccatggggatgccgatgacggtggtcaccagaatgccgatgaacagggcacccttgaccttccaggccatcaggatgccggtgatgatcagaccgatcagcgccagcagggcggggccggaggtaatgctgctcagatccagcaggttgttgccggcggtgacgatcccggcgttcagcagaccgatcaggcagatgaacaggccgataccggcgctgatggcggccttcaggggcgcggggatggagtcaatgatctgcttacgaatcggggagatggagatcgccaggaagatcaggccggagatgaacacgatcgccagaccctgctgccaggtgtagcccatgccgaagcagatggtgtaggtgaagaaggcgttcagacccatgccgggagcctgcgcaaaggggacgttcgccatgaaggcggtcaggaaacagccgatagcggcggaaacgcaggtggccagcatgacggcggtgtgatccatgcccgtctgggacaggaagttggggttgacgaagatgatgtaagccatcgcgaagaaggtcgtcaggccgccgatcacttccgtgcggacgttggtgttgtgctttttgagctgaaacagcttttccatggtgagggtctctccttttccgaatgttttttggagcaacgtaaaaattgtacgttttttatcacgcattgtcaatgcattttcgggggaaaacgaaaaatttcttcaaattgtaaaaattggctttcggagtgtttggaaaagaaagacaggatccgttgcaaagtattgtgtttcctgcgttctgtaaaatgcgccccttgggagcttaaaacaacgtgcgcggccgggaaagccgcgcacattagcggtttgtgaatttcaaaccttcacagcagccgaatcagcagcatatatccggcggtgcctacgaaaatactcaccagtgtattgcggctgagatgatagctgagcatgaccatcactaccgccgccagcttgggcagaccgatccccatccagtcggttcccacgtccttcagacagtagatcaccagcaccgccatgatagccgagggcagcatatcgcctagccggaccagtttatccggcatccggcgctgtttgccgaacaccagaaacggaaatgcacgaagccccagcgtgatcaccgccgaggtcaaaatcgaaacgaccgcagcagaaagactcattttgcccgcacctccccggttctcgtcacaaacagaatagccgatgtgatcagcagcgcaggcagcataaagcggtcaggccccagcacggtcaggcacaccagcgccattcccccacccagcagcgccgggaaatggtcggtggtcttttcccactgctgcatcagaatgaccacgaacagagccgtcatacagaagtcgatgccttccagattccaagggagaatctgccccagcgccgcgcccatcagcgtgcccaatatccaataggcatagctgagcactgccacgaggaacagcacattcttccgttcgggcaggtcgcggggcagactgcagtccaccgcgtaggtttcgtccgtcagcgtatggaccatcagcggcgctttctttcccatgctgcggaactcgtccacaaagctcagagcgtagaacgtctggcggctgttcatcagcagcgccgtcacggctacggtcatcagggaagctccgcccgccatcagggacaccagcacaaactggaacgcgcccgtatacaccgccacgctggacaaaagcgacaggtaccacggatagcccgcgtccgacatggtgatgccgaacgcgatagcaataaaaacatagctgagcaaaatcggcagcgattctctcagcgctattttccagacttccttcttcatcgccctgcaccctttcgtaatcccatcctcgttgacaggacagcaccaccttagcacagggccggggcggatagcaatgacagaagcgggctgtttttttccgaaaagcaaaaaggacggagcgcatcgtccgtcctcgtttatctcaaaagcgaagggtcaggaatcgacgcctccggccgaagtttttagagacagaagctttcatagcattttcctgcgaaccagtttccgcccctttaaggtcacttcgcagcctgccagaaaaacagccgtccacgtccttcgttcaggctcttttgcagactgggttcttcgccgcttaaaagcggccgtccatccgtttccccgttcagcagaacggtaacgggcagactttgctcgccggcggaaaacacgcagcggtattttccggccggaaagccctgcttttcctcgtccagcaaacggagcgaccactcgttttctccgtgggtcagttcgacccggcggctgtagggcctgcccagcagcgcccgggccccggaaacgtcgccagccgccagcttttgccggatagccgtggagctgacctcctgcccgtgcagggtgatgggcggcaccacgctgacctgaaagcccagtgccccgcccagagcctgcaaaagggcgggcgagccgcttcctcccgcgccgaagctgtgattatagccgcagacgatggccttgggatgcaggcggcgcaccagctcgcccacatagcattccggcggctgatcccgcatctgctcgtcaaagggcatagcaaagaaaacgtccgccccggcatgagagatcagagagatccgttcctccagcgtggtcagcagccggggggccctttcgggggcgatcagctccatagggtgacgggcaaaggtgcagaccaccagcggcgcgccccagcgcatatgcagcgtccgcgcccgttccagcagcacctgatggccgatatgcacgccgtcgaacatacccagcgccagcacgctggattcttcgctgtgtttaccgttcagaatgactttcatcttgatcccctcactcgcccagccaggtgcgaatcttccattcatggttctgccgacgggctacgcccatcagttcgcccgacagccacagacaggcgtcgccgccctccgggactttttctccgccctcaaaggcagaaaccggcagcatgccgccgttgcgcagaggcttttccagccgggcgggcgtttccagccacggcaaatgccgcatcaccgtctccggcggcagcagcagcgtttcgaggtcgtcgctttctttggcctgacggagccgttccagcgtgaccgccgtctgcagagtaaaggccccactttccgcccgcagcaaaaagcgcatatgggcgggacagttcagcgcttcgcccagatcgttgcacagagtgcgaacgtagaagcccttggagcagcgcaccttcagcagcgcgccgtggttctccgtcatgctctgcagttccagtgaatgtaccgtgacctcccgcttggggatctccgccgtccggcctttccgagccagctcgtacaggcgctgcccgtcctgcttaagcgcgctgtacatgggcggacgctgccacagctgccccgtaaaggagggaatcacttcccgcagggccgcctcgtccgggtaattttccccggatgcgatcacccgcccctgcgcgtcctgcgtgtcggtggccgcgccgaaagcgacctccgtcacatagaccttttccttctcctgcatgtagtcgaacagccgcgccgccttgccgatcatcagcggcagcaccccggaggcctccgggtcgagcgtgccgccgtgaccgaccttggctccattcagcagccagcgcacataaccgaccacctgcgaggaggtcatgcccggcggcttcaaaatattcagaaagccgcagaggggctttttcgcttcactcatgagttttctgctcctccaacgcctgatgcagcgccgtttcgacttccctcacggcctgtgcagcgggcatacgcagcgtacagcccgccgcctgcggatggccgccgccgccaaattgccgggcaacctgatccatccgatagggcggcagcgcccggaagctgaccttcgtcacgttttcttcctgctcgtgcagataataggccatgcaaacgccctgaatgtcgatggcataatccaccacaccttcggtttccgccgggttcaggccgttttgacgaaaatgttccagcgacgtgcacagcccggcgatggagccgccctccgttacccgcagagacggcagcgtcacgcccagcagacgaacgaaatcctcccgcttttcacggaacagaacgcggctgatctccgcaaggggcagtccggcttccatcagcccggccatcatttcgaaacattcgccgttcacactgtcgtatacaaaattccccgtgtcggtggaaagggccgtatacaggcaaatagccgcttcccgtgaaagagggacttccagagcacggtacaaccggtttatcagaatccctgtagcgggcgcgtctccctcgacccagttgatctggccgaagcgtggattggtgccgtggtggtcgatgacccagcggcggtcggcagcgttgtacagtgcttccgccttgcccaatcggtcaggactgctcacatccacggcgatggccgcggcgttttcgggcatgccccattcctccggacggtgcagcaccagccccggcagaaagcgcagccgggccgggacctcaccatctactaccatggatgtacgccagcccagtacgttcagcagcagttccagcgcccgggcgctgcccagcgtgtccccatccgggcctacgtggcagaacagcaccgcctcccccgcctgacgcagctgcccaagcagctcctccggcgggtcactcctcatcggattcctccccggcgtcttcttccgcctgtacctgcttcaaaacagacgcaatgtgaatgccgtattcaatgttgttgtccagctcgaaaagaatttccggcgcgtagcggataatcatctgctcgcccagctggtgacgcacaaacccggcagccttcttcagcgcggccatcatgggcttgcggttctcttcttccagaatgctgacgtaaattttagcatagcgcaggtcgcgggtcacgtccgcccgggtcacgctgtaggtgccctgaatgcgcgggtcggacaggtcttcccggataatgcgatccacctcccggcgaacctgctcgctgatgcggtcaatacgctgataactcaatgcctttcctcctttggcagcaaaggttctgtgagggaaggcccgtccttccccctattccaaaattggccgcgcagcgcgcggccaaaataagcaaacctgcaattcatgcttcacgcaaatcagaacgaacgtttctcaaagcgcagctttttcgccgctttggacagcgggatttatgatctctctacccaaacccgcgagccggagggccttccgcccgacggcggtaaaacccagccaactccgcacgcttctcccccctgcgcggcagtgccgcgcagtccggggtccaggggtactacccctggtcagcgctcgatttcttccatgatgaagcactcgatgatgtcgccctctttgatgtcgttgtagccgtcgaagctgatgccgcactcgtagcccgcagccacttccttcgcgtcgtccttgaagcgcttcaggctgttcagcttgccttcgtaaaccacaatgttgtcgcggagcagacgtacctgcgcgttgcgctgcatcttgccgtcctgcacatagcagcccgccacggtgcccgcgccggtgatgcggaaggtgttgcgcacctcggcatggcccagcaggacttccttgtattcgggagccagcagtcccttcatggccttctcgatatcctcgatggcctgatagatcacgcggtacagacggatatccacgccctcgcgctccgccgcttccttggcgttgttgtccgggcggatgttgaagccaatgatgatcgcgtcgaaggcggaggcaaggttcacgtcgtccttggtgaccgcgcctaccgcgctgtgcagcacacggacgcgcacctgatcgttgctgagcttctccagcgcctgcttgacggcctccacgctgccctgtacgtcggccttgacgatcaggttcagggtggtcatcttgctctggtcgatgcggctgaacagattgtccagcgacaccttggtggaggaagccacccgggcggccttcagcttgtcgcggcgttcctccaccacctgacggcccagacggtcatcttccacagccatcatttcgtcgcctgcgctgggcacatcggtgaagccggagatctccacaggcatggagggaccggcggacttcacgcgctcgcccttgtcgttgaccatggcgcggacgcgaccgctggccagaccggctaccacgttgtcgcccacatgcagcgtaccgttctgcagaaggacggtggccagcgggccgcgggccttatccagcttggcctcgataataacgcccttggccatgcggttggggttggcgcgcagctcgcgcacatccgcctccagcaggatcatttccagcaggttatccacgccctcgccggtgagggcgctgacgggcaccatgatggtatcgccgccccagtcctcgcagaccagaccgtagttggtcagatcctgcttgatgcggtcggggcttgcgcccggcttatccatcttgttgatggcgacgatgatcggcacttcagccgccttggcgtggttaatggcctcgatggtctggggcatcacgccgtcgtccgccgccaccaccagcacggcgatgtcggtgcacatggcgccgcgggcgcgcatggcggtgaaggcctcgtggccgggggtatcgaggaaggtaataacacggccgtcgatggtgacggtatacgcgccgatatgctgggtaatgccgcccgcttcgccggcagtcacgtgagaatgacggatgtagtccagcagcgaggtcttgccgtggtcgacgtggcccatgatggtgaccacggggggacgggtgaccagatcttcctcggcgtcctcgaagtcggtctccttcaggtcatcctcggcggtcttggccagattcagctccagcgtcacgccgaagtcgctgcagaccagactggcggtatcgtagtccagttcgctgttgatgttggccatcacgcccagcatcagcagcttcttgaggatctcaccggcgggcttgccgatacgctcggtcaggtccttgacggtgatggtctcggcggtcatgtaagccttttcaatcttgatgggagccatcagctgctgggcgctgggtttcttgacccgggcccggcggccgccgcgcaccacgtcgtcgtcgtagccgttgaactgatcccgggccagctgcttgcggtttttggccacgcgctccgggtcatgctgacggacatagttcttcttgttggggtcataattgctgacccgctccttctccatcacgggagccagatcaacggagggcttggagcgtcctccgcccatggaaggacggttgccgccagccggacggccgaagccgcctgcggggcgctgcgctccgccctgcggattggcaggacggccatagggaccctgcgaattggcaggacggccataggggccctgcgggttcgccgggcggccatacggaccctgcggattggcaggacggccatacgggccttgcgggttcgccgggcggccatagggaccctgcggattggcaggacggccatacgagccttgcggattcgccgggcggccatacggaccctgcggattggcaggacggccatacggaccctgcggattcgcgggacggccataggggccggcgggacgggggccgttgcccacaggacgcgcgccctgctggggaacgggacgagcctgctgctgcacgggccgcggagcctgctgggatgcgggagcagtcctctgcgctgcctggtgggcggcagcgggctgcgccggagcattatgctgctggggcgctgttttgacgctggcaggctgtgccggggcaggcacggcctgagcgggcttttcgggtttggccgcgttctccttcgccgtctggggggctgcggcgggagcgggcttcttttcttcctgaaccttttgtttctcttccagcttttgcacgggctgtttctcctcctgcttcacgggtgcgggagcaggctccttcttttcttcctttgccttgggggcttccgccggggcgggctttgcttccgccttcggcgcggggggcgtttcctttttgggctccggcgcttccgtcttggcgggagcggcgggcttggcgggagcttccgccttaacgggcgctttctccgtggcgggcttttcttccgccttcggcgcaggcgcggtctggacgggcttgggctcgtcatccgtgtcaggcatggtgaaggctttggcgtgctgactgatcagccgcgcctgctccgcctgcttttcttcggcacggcggcgctcctcctcccgggcaaactggttttcctgctttttcgccagctgcgccagagcatccgcgttcttgcgcatcccggagagcttgctcagcgtttcttccgcgcccttcaacagttccctcgttgcatccttgagctttactttggtcatgtaccccttgcacccccatgtattttacagtccgcggggactgtcaatgttcctgaaaataagtcaggagtttatcggccattcgcccggcagggacggagatcaccattcgtccgggcttgccgatcgcgtgccccagcgcgccggggctgatacggtaaagcggcacctgatgactggcacaggcgtcctccacccgcttgagcgtgttttcggacgcgcccgcgtccagcagcgccaaagcgcattcgccgccgcgaatggcggcaacgcaggcttcctgaccgctgaccacctgaccggcccgcatacacaggcccagaaaggacagtgccctttcctccgcagtttcgttcatgccttgctttcctccagcagacgattcatggtctctgtcaggctctgattgacctccggggtcaacttcacctccagctggcgatccagctggccctgtttcagcgcccgctttagacagtcggcgctgtagcagcagtacgcgccccggccgggctttttcccggtgggatccagactgacctctccctccggcgaacgcactacgcgcaaaagctctttcttgggcttcatctgccggcagcccacgcacatgcgcatcggaattttcttcggctttacgggcatccgaaggccctccttctttggaatgaaataggcggcttacagcgtgtcgtcgtcctcatcgtcgccgctcagttccagcggcaggtcgcgcagctccggcagaccggattcggccatggcttccggagtggcaggctcattgtacaacgcctgatagcccatggcaagattttcttccatcggctgatcgtcggcgggcaggtcgaacatttcggcggcctgactctggctcttgatatcgatgcgccagccggtgagcttggcagccaggcgggcgttctgtccttccttgccgatggcgaggctcagctgattatccggcaccaccacgcggcaggccttctccgtatcggagatgaacacgctgagcacgtgggcggggttcagggcgttggcgatgaactcggcgggatcggcggaccacttgatgatgtcgatcttctcgttcttcagttcttccaccactttttccacgcggttgccgcgggggccgacgcaggcgcccacggggtcgatggtgacctcggtggaatggacggccatcttggtgcggctgccagcttcccgggcgatggacttgatctgtaccacgcccgcggcgatctccggcacttccatctcgaacaggcgcttcaccagtccgggatgaatgcggctgacgcgaacctgcggcccgtggagcatttcacggccggtgcggttcacttccagcacatatactttaatgtggtcgtcgatgtgatattcctcgccgggcatatattcgctgggctccatgatgccctcggtgcggcccagctccacatacacgcccttgggctccacccgctgcacgatggcggtgaggatctcgttctccttgtcggagtattcctcatagatgcggccctgctccgcttcgcggatccgctgcatgatgacctgcttggcggtctgggcggcggtgcgcaggaagccgttcggggtcacgtcgatctcggcgatatcgcccatccgatagtcgcggcggatcttcagcgcttcctccagcgtgatctgattggcgggatcctccacatcgtcggtgatggtcttgcgggcgaacacgtgcacgtcgccggtattgcgatccatggtgacggacaggttgctgggcgcgtcctcgtcccgggagacgttctttttgtaggcggccttcatggcctcctcaatcgcgctgaagagaacctccggctcgatatccttttcggagcacagcgccttgactgcgtccacgatctcccggtgcccgttctgctgctgattctttttcgtaaccctcattgtcttttactcctgtttattgatattcttattcaaattccatctcggaaaaatcgccgtccagcacttctccgccatcgtcgggaaggtcgtcctcgtcaaagtcgatcacaggcttaacgatggccacggccttccgggggaaggaaagcagttcgccctccgcgggctgcagcacgacttcctcgtcggtaaagtccttcagaaggccctgatacagcttggagccattctgcgcggcaaacagccggacttccaccagcgcgtcccggtttttctcaaaatcccgccgggtcttgatggggcgatccatgcccgcgctggagacctccatgatgtcgtaatccacatcctccactagcggctgtagcgcccggtgatatttctcgcagtcgtccagcccgatgccgccctcccggtcgataaataccagcaggcatttgccccggctttccttctgcagggagacctccaccagctccacgccctgttcatcggctagccgctgagccagccgttccacgtcctgaacggcgctgcgggacgcggtcatttttttctttgccatccgtcattcatcctccggtagtgctctgtttagcggaaacgggaagaatgcaacaaaaaaagcggccgttatcgcttctgtccttttgcttttgcggcttgcaaacagcgacccgggaaacccacggccgcgatgctgtcacttgccttcaagcagaaaagaaaagcgatacccactcttttcgaaaacccttctttctgtaatccttcgtcgaaatggtaccagaaacctgccttcgaatgaaaggcagggtcagtataccacatcactgcaggaaatacaagggtttccggggctggtttttggcgtgaaaaggggaattttgtccgttcagccctgttttgacaaaaattcctccgctttgtccagaatcgtccgatagcctttgtgcaaaaggggcagcgcttcttcggcgctcatccagcgggcggcggcgatctcttcctcccgaagggacaattctccctccaaacggcccagcaccagcgtgacccgcttctgccccttacggtcctccatggcgtaggtgatctcctcccggaagccgtccagcagccgcgcccggcagccggtttcctcccacgcctcccgaagcaccgtttcccgctcgttctcccctctttcctgatggcccttggggaagctccatgtattcgactcccgttggagcagcagcagatattcgaagcctttttcgcctcgccgaaaggggatcacgccgcaggagtgatgatacagcggctctacctcgctgtggtagtatttttcctgaaaatacacctgctgggcgatctgcgcctgatcgaagatcctcccgtccggtgcggcgaccagcttgtcctcgttgtcgtcctgccggtgcacgatcccgatcacccgcccgtcaaaagtctgcacgggttccgaaacgcccagcacatatacgtccagttcctccccgtcgccgcccagcacgccgggaacatagccgtaattgatggggtaataaagccccgggtgcttgggatgctccgtcccgatgggacgatccatctccacatggactttctcccccagaaacgaccagaccagcgccttgcgcagggcataggcgatccattccgccttaccctcggtgtaggcgctgcggtcgttgggatagcgccgctgaagctcctgcttcaacgcttcgtattccgccgctttcttagggtagaaattcagataatcccgaaaattgatataattgcgccattccatgcttcccgcccgtaccacgtgtatgtggcaggttcgggtatccgcttccagatcgccgcagaccagcagaatctgtccctcgttatcgcaatgggccgcgtgataaaagccctgtgcctccaacgccgggaacagcggctccacatctgaaagctgtcggacagctaccgccagatcgacgatcggcttggcctgaatcgtcggaacggcggtgctgcccacgtgctgcatctccacagctgcatcccccaaaatcgcccggagccgtttcatggtctccgcggcataggtttcccagcccgtctcatggggcgcaaggagcaccgttccccgtttcagtcccagcatgatggatctccccctttgttctttcgcagtcaaacgtccgctattatagcatgaaaaaaggcgtccggcaaaaccgggcgcacaaaagacgttttaatactccaaccggggcttttgctccccggaaggagcctttccctgcaaattgcggtgcatccgttccagcaggctgtggagctgggcgatgtcctctaccgtaaaatcctgcagagccagcttttccgtttcctccatggcgcgggccgtgcgggccgcttccgcctgtcccgcatccgtcagatgcagggcttcgccctcgaaggtgaggtatccctcctgcaccagtcgttccacagccagtgctacggaggtctcgttgcgctgcagacgttccgacacttcttcctgcgtcagcccgtcctgtgtgcgcaaaagtcccatgatcggagcctgtcccaccggcggcttgttcttgccaagcatcgcgccgatttttcgatggcactcccgcatgacccgggaaaattcccataacatcggattccagacttccatcacactgcgctcccttcgccattccttcgcggtatggcttattatagggagaatgcccgcccaaggtcaatgcgccagggcaaggattttcggattgttcacaaacgctatcactccgccgctggttcctgtttacacacatctacccagcccattgcccccgctaccttctccaattcgggaatggtcaggcggacggcgctgtgatcgttgcctgcggcgggatagaccgtgtcgtatttccgaaggctttcgtccaggtaaacgtccacgccgtcccgaatgccgaaggggcacacgccgcccggcgcgtgcccaattcgggcctccacctcgtcaaaggggatcattttggccttgacgtgaaaggtttccttgtatttatgattgtcgatccgggccgttccctcggtcaggatcagcaccgccatgtcctcctgcaggaaggacatggtcttggcgatcctgccgggttccacgcccagcgcctccgcggcctgagccgccgtggccgtggaggcttccagttccatcacgcgatccagaaatcccttgcgttccaaatcagccaaagctttttccagcgacattgttttccctcttttgtttgcagcattgcgtcccaaaggacgaagccattatacggctcccgccctcttttcacaagaaaaagcgcgtgatttccgtcacaggggcgatggcgtcaattccacccacgagccggaacgaatttcttcttcgtccggcatatcctcgtccacaccgcaggaatacacgtacacccgcagtctttcagggatatgtccgctgccgtcgaaggggatctccaaccgacgggccgactcggcggacgagctttcccggggcagatattccgtgccggtttcgtcgtagaccgccgccatccacggctgctcctgccatgtctggccgtccagatagcgggttgtcagcgggaaagcgtccgtttccgcatcgatggtcagccgtagctcgatggcgctgacctgtgccgtcacagtgcaggctgcgccgttcagcgtgccttttcccgcgaaggaaacgatttccgcctcggccttcggcaccgtggctgtgacccgccccacgccgtcccgctgcacctcgctgcgccagtacgttttctgcccgtcgaaataatagtattccgtgcttctgcccaattctgcatagacggacagggtttcccggccagaaacgtcctccggcaggggggagaactccctgatctcgtaaagggttccgttttcctcctcgtcctcgccgtaatagggcggcagagaaattccgtcctccgtatagaaatggtcgtgtacccagatcgtgtcttttcggattccgaagggtcttccggcagccttcgccgcctgagcatccgccataatctgcttctcttcctccgtcatcgccgtctgcggcgtagcggggcgggccccttcctctggctttagaagggctttttcctcctccgcaggcgtccattccgagattcgccgggcgttttccaccgcaatggtcagcgtcaacgtctgcccgtcgtagtaggcgctgtccacccgtgcgctgaccgtgcccagcgcgtcatcccgcaccgtggcgggcgcttccgtcacgtcggcgacctgatccagcaccccgaggtagcgcggatcgtgccgggcaaaacgggcgaacagattggtgctcaccgccagcgcggccccagccagcgccaacagcagggcgaccgccaaaacgaggcttctccttttcggaatcggctttttttctctctgtgcaacggcggcgcggattccttcccgccgccggggcgaggcggacagcggagaaagccgtgcgtccagcgcctttcggatggtttcccgttcattcgccatgataccacgcctccaattcctttctgaggatcgtcttggcctgtttgagccggttcattacggcggaacggctgatcttgagcacgttcgccgtctcctgacccgtcaggccctgataccagcataacaggacagtctcccggtatttgggtttcagccccatcaccgcccgcgtcagggtatcgtcccactggctccattcctgtgccgggtcggccgtttcgcccaacgcatccagcgtcacatttctgtccacgtggcggaaccacgcgctccgtcgcaggtctctgcaggtgttgatggcaatccgcagcagccacgttttttcacccgcgtccccgcgaaaacgttccagcgcccggtacgccttccaaaacgtctcctgcaccgcgtcctcggccagcgccgcgtcgcccagataggcgaagcacatgcgcagcagactttcttcatattgctccatggcccgttccagccacgcttcttttgtttctctgtcgtccacgtttctccccccttcccttattagacgatgggaaagcgagaactgtcaaacacaaaaacagccgcccgtagaaaaaaggcagctgtaaaaaagcaaacgaaaaagccccgttttcacggagctttttcgtgaggtctcggtatcactcttgaagtgataaggtggaggtgccacccggattcggaccggggaataaaggttttgcagaccttcgccttaccgcttggctatggcaccgaagtgtggagcggtagacgggattcggacccgcgacatccaccttggcaaggtggcactctaccactgagctactaccgcacactatggtgccttggggcggaatcgaaccaccgacacgtagattttcagtctactgctctaccgactgagctaccaaggcacaatggcgaccaagaagggtctcgaaccctcgacctccagcgtgacaggctggcgctctaaccaactgagctacttggccatctgttttggtgggaacaacagggctcgaacctgtgaccctctgcttgtaaggcagatgctctcccagctgagctatgctcccccgcccttgtctccgtttctcgcggcgacgtgttatataataccttactcgccgtcatttgtcaacaactttttcaattttttcccggtgctttttcatctttgttcaagtctgcctgaaagctttgaaaatacaggattttaggccgtttctccgtgttatttacagcggcatcacgtaaatttggcagggatttttctctccccacagcgtcggaaaaatttccaactcctgaaatccaaggctctggtagaaccgattggtcgcgtcatattccacataatgccccatggcgacggtctttacctgcatcagtgtgttgccttgccgacgggcttcctcccgcgccgcctccgccagcgcggtgccgattccctgccggtgagcctcccggcgaacgcccatcaccgccagctccaccgtcttcgggccagtctgtttcaggcagaggaacccgaccgcgttttcgtctttttccgcggcaaagaaggtctgtccggcgctttcggcgatatactcctcccgggcctcgggaatcccgaaccattccggcagactttccagaatttcccggctgatacgccgcttttcctccgggctgtccacccgacggatagctgcagtgcttaccttcttttcctttcggcacaggcagaagggatggcccgccggatccagcagggtgacgaactgttccccgccgtactggacgggcgctttgactgctcccaactccaacgctttttccactgcttcgggcacagaatccacctgaaaatcaaagtgcatctgcttctgctggcagccgtccttctccggccacaccggcggcacatagtcttcctcctgacagaacaggaacacaacgccttcggcgctgcgcacggctgggcggccaaaaagcgtggtcgtttcccagttcagcagttgaccgtagaacctttgcagcgtctgttcgtcgccgcagtccaccatgacgttgcccagtctgacttcgtcagtcatttttctttcttccttttgcacaggtttcaccgtttttttcttgggttcgggcagttcgtcccgcatcgtgcgcagcagccccgccagccacgcccggtcatccatattttctacaaacagcatgggctttgcaccctcgtagggcagttggtacacgggttctcccacgtaagccgccgcggacggaaccggcttgaccagcagacggttgtcgtacacgccgcccgccagtctcccgtccacatacagcaagtactcccccatcatgggacggaaggtgatcccatccagatcggagagctgttccaaaacaaaatccagatattccttgctggaagccattttctccctctttgtcagatgtagtcggaaatatagggtgcttcatgcaggatcgccttgtccagccgaagcactgccgccgggtcggcttcaatgcggcccatgcggtacagcttcagggccgacttatagcccaccaacagcgtggtcagggtagcgatggacagtttgagccggcaatctggcgcttcgtccgtcagagtgcagcgtcccccgcggaactccgccgttaccgtcttgttgttccagtccagaaattcgtcctcgatctcaaaggcaaagcgcaccccgctttcattggggtcgcaggcatagttttccaaaaagcgctccacatccacgatccggcccatgatataggggcggatcacctcccgaatatcgccgtcgtccatctcaaaggcgatggggtcgctgaaataggaattgccccgcacttcgtcgatcatggaatcatgggcgcggatgtactcccacaggccttcgtaggcttcccgattcaggtagatcatttccttgacgtgcatcacgtcgtctttgatgaggtagaccatatagccggtgggttcgccctccacgttgtagtagacggccacgaaggtgtcgtcctcgtcccagcgccagtattcctcccacgccagactgtttcggtacaggcagccgtgagtggccgccgcgaaccgggtgtgcagctccatcagatcctgactttgccagcctacccggcgcacatagccgggagccttggccttggacgggatctgccgatccttgaccgtgtaggaaattttgttggagatgatctcatacccgaaccgccggtacagcggaatggaatagggaaacagcatggcgaaggactgtccccgcatccgcatatcttccaggctcagatgcatcagccgcttcataatgccgtggcccgtgtattccgggtaggtgcacacgctggtcacaaagccgatggaatacgttctgccgtaaatgttcatttccagcggatacacggcaatctgggagatcaggttatccccgtcgaagcagcccagcacgtcggcccgctccagtaccgggaacttggactgcttgatctcatcgtcccgccagcccgtttccgccaattcctgctccgtcacctgaaaggcatagcgaagcagctgattatattgttccagatcgtccgtggtcaaatggcgcatctgataattgggcctgatggcatttcccatgctttcgttctccttcgtccttgcgttcgagcctattatagaccggccgcaaagccagcgtcaatgcgttttttcatgcgtgggacagaagcggaaaatacagccgttcccgctggatgctttccagttcctcgccccgataaaacagccggtatttctccccgccgtcaaaaggggcggctttgaacagggacgcatcctccggcagtggagaaaaacccagacgaacggttcgtctgccgatatccagccgggaaaggatcatttcaagaggaattttctgttccgccgcaacacccgccaggatcagcgtatctttttccgcccccaacacgatgaagcagtccagattgtccgagtaccagacggtttccagatccgccgtataaaacatttgcaggccgtagcggtttttctgttccagcgacgagaaaaccgccccgtttcgaacggcgtgttcataccgttcccgcaaggcgagagcatcctttttgaccgggcggaagtgtcttccctcccgcttgatcacgccgggtttcagggtgtattcgtactgcataagttcccggaagcccagcttccggtaaaagtccagcgcgcccagatttccgaacagataaatgcccgtctcgatcccatcatatcgttccagtatccgttccatcaattgccagatcagtcccctgctgcggtacgctttgtcttccatgaccgttcccagttgaaaacaaagttgttcttcaccgttcttgttaaagaacatccaattgaccgacacattggccacgatccgtcctttttcctcaaacgaatatgggatgtactcctctgcacggaaaccgttttgcatccagttttcaaaatcaaagccaaaggtgcggcgggtcatggcattcaattcgtatcgaaaaactgtgttgtgcatatactttcggagcattttcatttttttcttcttcctttcgccatcacgcgtcgaggtaaaacagaatatccgctttcccttcctgcctggttccccggtatacctccgtatccagtccaccaatatgaaacccgtaacgcagatagaacaggcaagtgc

SEQ ID NO: 2850 - DNA, 3124 bp, Unknown
  16S sequences of unknown bacteria
aagagtctgctgcagcagtaccgcgaggggctgattctcggatcggcgtgtgaggcaggtgagctttaccgggcattgttacgcaatgcaccagagccggagatcgcaagactggtcaatttctatgattatctggagatccagccgatcggcaataatatgtttatgacgcgggaggactatgaggaccgcaagacggtcgaggatctgaaggatctgaaccggcagatcgtagtgctcggagaacgctacaaaaagccggttgtggcgacgtgtgacgtacattttctcgatccgaaggatgaggtgtaccgccgtattattatggccagtaaaggctttaaggatgcagatgatcaggcgccgctttacctgcgcacgaccgaggagatgctgcaggaattttcctacctgggtgaggagaaggcacatgaggtcgtaattacgaacaccgtgaagattgcaagcatgtgtgagaaaatttctccggtgcgtccggataaatgtccgcctgttatcgagcactccgaccagattctgcgtaatctttgttatgagaaggcgcacagcatttacggcgatcccctgccgacgatcgttgaggagcggctggagcgtgagctgaattccatcatttccaatggatttgcggtcatgtacatcattgcgcagaagctcgtgtggaagtccaatgcagacggctatctggtcggttcacgaggatcggtcggctcgtcgtttgttgcgacgatgtcgggtatcacggaggttaatccactgagcccgcattatatctgtccgaactgtcattacagtgattttgattctgaagaagtgaagaaatttgcgggaatggcgggctgcgatatgccggataaggtatgcccgaagtgcgggacaccgctgaaaaaggatgggtttgacatcccgtttgagaccttccttggatttaagggaaataaggagccggatatcgacctgaatttctccggtgattatcagagtaaggcacataaatataccgaagttatttttggcgcaggtcagacgttccgtgccgggacgatcggtacgctcgcggacaagacagccttcggttatgtaaaaaagtattatgaggagcgggaaatccgcaaacgaaactgtgagatcgaccggatcgtgcagggctgtgttggcgtgcgaaggacgaccggacagcatccgggaggcatcattgtccttccggtcggagaggagatttattcctttacaccggtacagcatccggcgaatgatatgacgacggacacgatcacgacgcatttcgattatcactcgatcgaccacaatttgctgaagctcgacattctcggacacgatgatccgacgatgattcgtatgctggaggatctgaccggaatcgatgcgaagaaaattccactggatgatccgtctgtcatgtccttatttgcaaagaccgatgcgcttggcattacgccggacgacatcggtggctgtttgcttgggtgccttggcatcccggagttcggcacggaattcgcgatccagatgcttctggatacgaagccgaagtatttttcggatctggtccggattgcagggctggcacacggtacggatgtatggcttggcaatgcgcagacgctgatcgaagagggaaaggcgacgatttccacggcaatctgtacccgtgacgatatcatgatctacctgatcggaaagggactcgacagtgagcagtcatttacaatcatggagagcgtccggaagggaaaaggactgaagccggaatgggaagaggagatgaaggcacacggggtaccggactggtacatctggtcatgtaaaaagatcaaatacatgttcccaaaggcacatgctgcggcctatgtcatgatggcctaccggattgcttattgcaaaattttttatccgcaggcatattatgcggcatttttcagcattcgtgcaccgggatttgactatgagctgatgtgtctcggacaggacaagctgctgtatcatatgaaggattacgagaaacggatggacaccctgagtaaaaaagaacaggacacgtaccgcgatatgaaggttgtgcgggagatgtatgcgcgtggctttgaatttttgccgatcgacatctatgagtccggtgcaaaccggttcaagatcaaggacgggaagctgttgccgtcgctttcaacgatatcaggtctgggggaaaaggctgccgaggcagtcgtcgatgcggtaaaggacggtccgttcctttcgaaagacgatttccgcaaccgtacaaaggtcagcaagacagtcgtggatctgttatccgacctgaagattctcgacgggcttccagagtcaaatcagctgtcgttgtttgattttgcagtgtaattaagaaaaggaaacagacaatttatgagcatactgagttgcttttatccggatgagtatctggattctacctatgtgattgacttcgatgccctgtatcgcgcagggtatcggggcgttatttttgacattgacaatacgcttgttccgcacggggcgcctgccgatgagcgggccagggcactgttttgccatctgaaggagattggcttcgactgctgcctgctctcgaacaaccaattgccacggatcgagctgttcaatcaggatatacacgtaaaatttatcgaaaacgcgcataaaccttccgtaaaaaattaccggaaagcgatgcagatgatgggcacaaatacgggaaatacgctgtttgtgggcgatcagctctttacggatgtgtatggtgcacgtcgtaccggtatccattccatccttgtgaagccgattcatccgaaggaggagatccagattgtgctgaagcggtatctggagcggatcgtgctgcatttttatgagaaggaacataagaaaatgtgatgacgaatcatcaatccccgtagcgaaagccgcggggtaattttttcttgtgtacagtagaatatgatagtataattaaaccagtttttgcataagtttaaaaattataaagggataatcgacaagtcagacgaaagtctgggacgcaaagctacagggcctgtaaaatggcagccagttgcataaa

SEQ ID NO: 2851 - DNA, 6429 bp, Unknown
  16S sequences of unknown bacteria
gtattccggccggtctttgtaaattacatcaaagtgccaaggggaaaacatatagtactggccgacggttacggtttcgatttcttccggggaaatgccgtaccggctcatatatttttcaaacctttgatttcctatttttttatcaatccgcagtcctgaggaaaaaacaaaaacaattgatactgcggcaagtaaaatatattttttaaatgttttcatagattattgccattcaagttttgtgtgacagtgtggacagtatggcgggataaactcccaagaatttacgatagatggaataatcgggtgtctgaaatatttgtggcacaccggacattttaagacaaacaacatcaggtatgttctgaaaaccgcccacactgttatgtaaataagagctaagcattttgttaaattatgtttagggcaaaaagcaactaaaagcagtaccaatataccccctaaaacggtgtacagcttaaaagattttactaacgggcgggttttatttaaaaacagcgttacattatctttcatataagtttgcctctttattatattcacagcattttaaaggctgacttttttgataagtaggtcataaataccgaaaccacaccgacggcaataataattaaaacttggactgtgttgtttatttgactttccgtaacggccatgtaaacagggagagaaatacaatccgcaaatgctgcggcgtaagccaatgtctccgaatatgccgtttcttttatttgataatcggcagaggcagattttatctttttacaggaatatgataaattcccggccccaagggcaaataaaattacggtaagcattttaggcagcttctgcacaaaggccggtaaacaaaggtgcataaaaaccgcacacagcgcaaacatcacaacagccgaaaaggtgattaggtgcatttcgtacacaggtaaaacaaggcttaaataccgactttgagaacagtctttttcaatacaagacaatttgggctttattataaacttgtaacacaagatatataaagtaaaaaaagctaaatacaacaaaatactcataggctttacagtaatacagtgaatttaaaaataaaattgtgttctttaattaaatattatcataacttttaacaaaatgtgtgtgtaaatgttgaaaatcaccaaatcgaaagaaagaaaaagcggaggaatcctccgcttttatagatacgagtaaaccgtaagccgtgttctgtattaaacgatgatctatctactgcgcagattgctctgcgcctcaagcctcctcctgagagccgcaggactacgttaatgctctgctgtcgggagttgctgcggataaggtttacatggcagatgcgtctccgcacctccggtgagctcttgcctcgcctttccacccttgccgttgtaaaacggcggtatatctctgttgcactatctctaaggtcgccctcggctgacgttatcagctatcctgtcctgagcagcacggactttcctcacgggcataaatgcccccgccatcgtatgttttactcgtaaaaaactatttaattgtaccttttatcttttgagggattgtaacgggtaaccatggccgtcataggcgattttgccgctgatgatattgataaactcaaacagcgaccaaatggcagaaacaaagcccagccccaaaaagttgagaaaaaactgtatcaaggcctttttagtgtagcccaaataaaaattatggaaccctaaccaaccgaacaaaagagccagaaccgccgcagtggatttgtagcggtaatgtggcacatagccggggtcatactcccggtaccggtcttcccgatatgaattatcataccggtgggaagggtcaaaatcataaagtatgttgccgccgtgtgccggttgcacgcctactttgtagccgcaataagggcaaaaaagagcgttatcgtttatttcttcaccgcatttttcacagtacataacatacctcccataagatactaagaaagtttatcacattttttcttataattcaaccgaaaattattgttaaaaagaaaaattcacaaacttttcagacaaaatagccctaagtggcagaaatatgttataatgttataaatagccacaagggggattttcagttgcaatacacattcaaaacccgggagaaagaccgggggcttaaactctctaagtttttgaaaaatcaaggggtcagcatcgcccttataaaaaaggtaaaatttaaccgggacggaataaccgttgacggggtaaagcaaaacaccgattacaggttacagccggggcaaagtgttaccgtaaaccttgacggcgcacgggacgaaaccgatgttgtgccacggtatgggcatttaaacatcctatatcttgataactgttgtatggttgtggaaaagccccggaatatgccatgccacccatcttttaaccactacgacgatacactggcaaattattttgtgggttactggcaggagagaggcgaaacaaaggtgccgagaattgtaaacagactggacaggaatacatccggccttgttttaatagcccttgacgcttacaccgccgaatttttaaaggacaaggcagaaaaaacttataccgctattgtgtccggcagccttgaaaaagaccatggaataattgacgcccccatagccagagcagataactcgctgatgataaggtgtgtgcgagaggacgggcaaaatgcggttacggaatatttcaccgaaaaaagcggcggcggaatgagccttgtaaatataaaactgcacacaggccgcacacatcaaataagagtgcatttttcttacataggtcacagccttttgggagatgatttatacggcggagaaaccgataaaatcggcaggcacgctttgcactgttcgcaccttagctttactaccccggacggcggcaagagggttgaacttgcgtcaaaattgccggcggatatggaaaatttggtaaatcaaatgtgaaaaaaccattaaaaagtgtacaatttgttgccaaaatgtaaatttcgctattgaaaagggtgttttcacacctgatttcttgaaaaaagtaattaagaatggtataattttcaatcggagtttagaaaaaaggagatgagtcaatgccattttacaaaaagggtaataaaacccctgccaatggcaaaagaagaaaaaccggttcatcggtgataaacagctttaaaagatataacacccctaatgttacgtctcagggaataaaaaattttttgatatataatttttataaagtgggttataatatagatgcggcttgcaaaatgacagcaaaagccgttgaaaaaacagtcttaatacctattgaaaaatttttgcaaaatgttttggactttatggacaaccttgcaggcgttttgcttgatgacttgggggaacctttgggcattgccaacacggcgctctcaaaggccacggatatttttaaaaccacaaagaatgataaaagcgtaaacacattcggcgagattaaatcttattttaaagacggtctttcaagacacaacaagtcggcggagattattttgtcttacacaatgccgatattgacttgccggttgtttttgttggttatgaattccggtctttcaaaaaattatgctattcaggtttattccggcggcgaaaatctgggtaccgttgcaaattacaacattgtaaaaaacgccaataatataattcaaaacaaaatcgtcagcacaaacgacgaaaagtggacctttaactcggatataaaaatggtatccgtaaaatccgacgatgagaccattagcgaaagacagcttgccaacaatatgttaagcgcatcgtcacgggatattgtagaggccacaggcctttatgttgacggcaaatttatagccgcagtaaaagacccgacaaaacttaaccgggctttagacagccttaaagctccttacgaaaacggagacgaaaacagaactgtttcatttgtgcaggatgtcagccttgtttacggtatttactttaccggcacaatagttcctgatgaccagcttgcaacaaccgttgtaagtgaggtaagcggccagcaggtttacactgttgtacagggggattcaccgtctaagatagcttccgaacacgggcttacattaaatcagctttacagtttgaacccgggtcttgaaggcggcggtatgtggataggcgaccagcttatcataagtgcttctgtgccgttcttgcaggttaagtataccgagagggttacaagacaggttgaaatacctttccggtctaagacagaggataacaactcccttacattcggtgtgagaaaagttacccagcagggtcaaaacggtataaaagaagaagttgtagatgtagaatacatagacggcgtatatcagggcgagacgattattcagtcaaccgttgtcaaagaagctgttgaccagatcactcaggtgggtcgtctttacaaaggaacagttgttgccacaagcggcacaggcagccttatgtggcctgtaccgggttacaaaggcctttcaagaggctttgccggccagtatcctgctcataacggcttggatattcgtgcaaatgtgggtacgcctatctatgcggcggattccggtgttgttacaacggcggtttacactaacagaggttacggcgtatatgtaatcatcgaacacggcggttatcagacattgtacggccactgctcatcacttgcggtatcacggggacagagcgtatcaaagggtcagcttatagcctatgtgggcagcacaggtaactcaacaggacctcactgtcactttgaagttaagaacggcaacttccgttacaacccattcaactacctgtaaaaggggcaaaatatcactgtccgccttgggttacacacaaagcggacagcttgaatatgatatatcagacagcaaacagccacaaacggataaaagttcagatatttgtaacaaaaacacatattttgttcgaattttttaattgtttttttgacaaaacaatgtaaaatagtgtagaatattgtagtttgactgagagatatttatagtacactatacataaagtagctccaaaggagaattgacttggaaaaatatattattacaggcggtaagccgcttcacggagaagttacaataagcggagccaaaaatgcggcggttgcaattttgcctgccacggttttggcaggaggcgtttgcactcttgaaaatataccggatataagcgatataggttatgagatcgacattcttcgtcggatgggcgcccgtgttaggcgtctcagctcatcaagccttgaaattgacacaaccgatgttaacacaacggaggtgcctcttgagcttggggcaaaattccgtgcttcatactattttataggaagccttttgtcaaagttcggcagggccaatgtgccaatgcccggcggctgtaatttaggggcacgccctattgatcaacatcttaaagcgtttaccgctttgggtgcccagtacgatttggactatgcaatgataaatgttgaaagcgaaaatcttgtgggcgctcatgtgttcttcgacacggcgtcggtaggggctacaataaacgcaatgcttgcttccgttatggcagatggcaccactattttggaaaatgtggcgaaagaacctcacattgttgatgtggcaaactttttgaacaccatgggtgcggatgtaagaggcgccggtacagatgttataaaaatacgcggcgtaaaagttatgcacggcgcagattatgcaattatcccggatcaaatagaagccggtacatttatggttgccgctgcggctacaagaggggatatagtcattaaaaatgttatacccaaacatcttgaaagcattacaagcaagttgcgtgtaataggcgcaaatgtggaagaatttgacgattatgttcatgttaccggtgcaaaagaatatcaggcaacaaacattaagacaatgcctcacccgggtttccctacggatatgcaatctataataggcgttttgttgtgccttgcaaagggtacttcaattatcaccgaaagcatttgggacagccgatttaaatattgtgacgaacttataaaaatgggcgccaatatccatgttgagggcaaggttgcggtttttgaaggggttgaaaaacttcgtccggcgcctgttgtggcaacggatttgagagccggtgcggctttggttgttgcggctttatgtgcggacggtcaaagtgaaatatccgaaatttctcacgttgaaagaggctatgttgacatagttaaaaaaatacgcgctttaggcggcaacattgta

SEQ ID NO: 2852 - DNA, 2360 bp, Unknown
  16S sequences of unknown bacteria
gccagtacgacggcgtctatgtcaatcgcttcctgaatgccaagtatatccccggctccatctttaagctggtgacagctgcggcggccatcgaaaatatttcggatatcgacagccagacctttacctgcgagggaagctacgaggtcggcggccagaagatcacctgcgagggtgtccacgggcagatcggctttacccaggccctggcccagtcctgcaactgcgcttttgggcagatcgcccagcagctgggcatccagaccatggagacctacgtggagaagctgggcattacggcgcccctggagtttgacgggctgaagacggccgcgggcaatctggacctggcgggcgccacccagggcgacctggcctgggcgggcatcggccagcacaatgaccagattaacgcctgccagtatatgacgctcatgggcgccatcgccgcaggcggtaagacagcgtcgccgtattatgtcagcgagatcaccctgggtgaccacacggcctacacagcgtcgcaaaagacgctggattacggcctgaagcaggagacgacccagcgcctggcgcagatgatgcgcaacaatgtcgagacaatctacggtgcggggcaattcggcagcctgaccgtctgcgccaaatccggcactgcggaggtcggcggcgaccagacgccgaatgccatgtttgccgggtttgtccaggatgacgcgtaccctctggcatttatcgtcgccgtggagcacggcggctccggcagcgcgacctgcgcacccattgccgccgctgtcctgcaggcctgtgccgccgcgatggatgcaggatgagcctgcgccgcgctgcgtgctgcatcgtgttttacagaaaaacgggactgctggatttttgcagaaaagtggaaataatgcttgacaaaaccgtcgttttgtagtatcataaataggctgagtttaagagcagcgccactttggagaggtggctgagctggtcgaaggcgcacgattggaaatcgtgtaggcgttaatagcgtctcaagggttcgaatcccttcctctccgccagaagtccaccgtaattctgatcgaattacggtggattttttgcatgctggggggatgatcgttgatcaatcaggaaatgcagatggtaaagcagcagggaccgcacaacaatgcggtccctgctgctttttacaatctcagaaaaaaccgatgcggcttggcctgcgtccgtcaggtgatgacaaagccgccgttgacggggaggacttggccggtgacgaaggtcgcgtcagccaggtagcacatggcctgggcgacatcctccggggtgccgtgacggccgatgggcgtctcttcctggagggctcccaggaccgccgggtcaatctcccggcacatgtccgtcagaatgacgccgggggcgacggcgttgacacggatgtggctgggacccagctcctgggccagggccttcgtcagcgccaggacagcgcccttcgtcgcggaataggcggcctcacaggaggcgccgacctgcccccacatggacgagacattgatgatgcagcctgcctgccgggccagcatcccgggcaggacggtgttgacgcagtgatagatgccagtgacattcacgtcaaagagccgctgccactgctggggcgtgatctgggagatcaggccggtgtggcagattccggcgttgttgatgagaatctccgtctgctgcagctgcggggccagacgggcaacggcgtcgccgttggcgacatcgcagcacaggggagttgcgccggtgcggcgggcgacggtttgagcggcctcgtggtttcgatgataaaggaaggtgacatcgtcaccccgagcggcgaaggccgcgacagctgccgcgccgatgccccgggagccgccggtgatcagaacgtgtttcatgagatgggctcctttttttgcagaatacgcttgctcaggcgtttacccagggcgataatgccatcgatgccagccccagcggccagtgcgccagcccaagtgatgagactgagcagcagatagaacagccatagcggccctgccggtaggaagtgcagcagcagcatcgagccgaggttcatcagcagggcgtgggccagatacgcttcgtagctgtgccgcccaatccagctgcagacgcgggcaaacccgccccagaggccgcagcgcagggcgatggcgtacaggcaggcaatcgcgcacaggatgcacagggcgtagagcggaccgagcaggctcatgcaggagaaggtgatgtcctgctgcgtaagaacatatcggcagctgcgccagatgccgacggccagcgccccggcgtag

SEQ ID NO: 2853 - DNA, 2971 bp, Unknown
  16S sequences of unknown bacteria
gccgcttttctattttatggttagactgcttactccaactcaaacgcgccggtgtagagctgatagtaggtccccttctgggcaatcaggtcggcgtggctgccgcgctcgatgattctgccatggtccaggaccatgatcgcgtcggcgttacgcaccgtggaaagccggtgggcaatgacgaaaaccgtccgcccctgcatcagagaatccatgccctgctgcaccagcgcctccgttcgcgtgtcgatagaggaggtcgcctcgtctaggatcatgaccggcgggtcagcgatggcggccctggcaatggagagcagctgccgctggccctggctgaggtttgtgccgttggtcgtgagctccgtctcgtagccatcgggcaggcgcatgataaaatcgtgcgcgttggccagcttggccgccgcgatgcactcttcgtccgtggcatccagcttaccgtagcggatgttgtccatcaccgtaccggtgaagaggttcacatcctgcagcacaacacccaagctgcgccgcaggtccggctttttaatcttattgatattgatgccgtcatagcggatctttccgtcttctatatcatagaaccgattgatcagattcgtgattgttgttttgcccgcgccggtcgcgccaacaaaggcaatcttctgccccggctccgcccaaaggctgatatcccgcagcaccggcttatccggctcataggcaaagtccacatggaacagccgcacatcgcccttgagctccgtatacgtcagcgtcccgtcgtgatgcggatgcttccaggcccacaggccggtccgctcctggcactcagtcaggctgccgtcggcctcccgcttcgcgttgaccagggtgacatacccctcgtcctgctccggcgtctgcgagatgaaatcgacgatccgctccgctccggcgatggccatagccaccgcgttgatctgctgggatacctggttgacattgcccgcaaactgcttgcacattcctaggtacgacgccacaatcggcagcgtcagcgccccggtgagggaccccgtcgtgaccagattctggatcgagaggttcgggatcttcgttccagagaggatcagatacccgccgacaaacgccgtgcagacatagaggatattgccaatgttattgatgatcggcgcaaagacattggcaaaccggtgggccttctccgaatcccggaagagctggtcgttgacggcgtcaaagtcccgctcgacggcctcctcatggcagaacaccttaatgaccttctgcccgttgagcatctcctccacatagccctcgaccttgccaagcgcctgctgttgcttgataaagaacttggcagagccgccgccgacctttttcgtgacaaagaacatcgccagaatgccgagcaccgccacgaccatcaggttcacactgtagaacagcatgatgaggatcagggacgtcagcgtcagtgccgccgcgtagagctgcggcagactctgggagatcatctggcgcagcgtgtccgtgtcgttcgtgtagtagctcatgatatcgccatggtttgtggcgtcaaagtacttgaccggcagcttctgcatattgtcaaacatccggatccggtttttatgcataaagcccggggtgatacgtgctagcagctgggcgtacgtcactgagcaggccagaccaaccagatacagggcgaccatcgtcccgatggcctttcccatctggggcaggacagacgcccagcctgtctccaggccctgttcaatataacctgtcagccgttcaatatataccgctgggacaacaccgacaatggcgctgattgtcaggcaaatgatcacgatggtcagctgcaccgggaaatcccggaacagctgccggagaatgacgcccatggcatggcggtttggctttctcttcttttcaggatgcatcttcttcacccgccttgttctgagattcgtagacctcccgatagatctgacttgagcgcagcagctgggcatggctgccctggtcgacgattcggccattgtccatgaccaggatcaggtctgcgtcctcaacggaggagacgcgctgcgcaatgatcagctttgtcgtgccgggaatctcgctgcggaaagcggcacggatgcgcgcgtccgtcttggtatccaccgccgaggtggagtcatccaggatcaggatcttcggctttttcaaaagcgccctggcgatacacagccgctgcttctgcccgccggagacattcgcgccgccctgctcgatataggtatcgtattttttggggaagcgctggataaattcatccgcctgcgccagcttgcagatccgctccagctcctcgtcgctggcatcggcgttgccccagcggagattctcccggatggagccggaaaacagcacatttttctgcaggacgacagccacctgatcgcgcagcgcctccatgctgtagtcccggacgtcgatgccgccgacccggaccgtgccctccgtcgcgtcgtacagacggcagatcagctggatcagcgtcgatttgctggcgccggtgccgccgataatgccgacggtcatgccggatttgatctccaaatcaatatcctccaggaccatcttctgcgcgttcgccgcgtatttaaagctgacatggtcaaacgtgatgctgccgtccggcacttccatgactggctgggccgggtcgcatagggtgctcgtctcgtccagcacctcaaaaatgcgcttggccgaggccgacgccatcgtgatcatcacaaacaccatggaaagcatcatcaagctcatcagaatctgcatggagtaggtgatcatactcgtcaagctgccaacattgagatacgtgccgccgctggtgacgatcagcttcgccgcaaaataggagatgaggatcaaggaacagtaaacgcaaaattgcatcagcggg

SEQ ID NO: 2854 - DNA, 32759 bp, Unknown
  16S sequences of unknown bacteria
cgtaagcgatgttataatagaagcggaaatgcggaagcacgaagtatttatgggcgtttccgcgtccgattcaaacattgcgtaagcgatgttataatagaagcggaaatgcagaagcacggagtatttataggcatttccgcgcccgattcaaacattgcgtaagcgatgttataataggagcggaaaggcggaagcatgaaagggttattatcatttccgcgccgctctttggggcggttatgccgccacaatcgaattaaaagacagtcacacggaggtttgacaaagactgatgaaaattgcaattgcctgcgatcacggcgggctgaatctcaaaagagcgctgatcgaatatctgatgaaaaacggatacgagtatgtcgatttcggaacgaacagtacggattcgtgcgattatcccgattacgcgctgcccgcggcggagagcgtcgccaggggcgaatgcgaacggggaatcgtcatctgttccacgggaatcggcgtttccattgtcgccaataaagttcccggcgtgcgctgcgcgcattgtcacgacacgtactgcgcgaaatacacccgctatcacaacgacgccaatatgctcgcgttcggcgaaaaatgtatcggcacgggcatgatggaagaaatcgtcaccgcgtttttgacctgcgaatttatgggcggggaacgccacgaaaggcgggtagcaaaaatccaagcgatagaggaaaaatattccgcgcccttgaaaaagtaacgtatgggaagtctgaaaggggaggaaatattcgccctgctcgacgatgcgggcgtcgcttatgaggcgttgcggcaccccgccgtctatacgatcgatgggctcgacgcgctcgaactgcccaaaaaggaaagaattgcgaaaaatctgtatctgcgcgacgataaaagacggcattattatctcgtcgtcgcggaaaaaggaaagagagcggatttaaaagcgttgcgacggactatttcctcgcgcccgctgtcctttgcttccaaggaggaaacggaaaaactgctcggcgtttcgagcggctcggtatctcccctcgggattctcaacgacgaggaccgaaagacaaaggtgctgatagacgatttttttctcggcggggaaatcggcgtacatccgaacgaaaatacggcgactttatggctgaaaaccgaggatttgatggaaatgatccgtcggcacggcaccgctgtggaaacggttgtcttataaagcggcgaacaaggcaacgaaaaagggaaaggacatgaaattctgtacggagtgcggcgcaaaaaatcagaatgatgcgcatgatagtcgggatggcgctgcaaaaatcagaacggtgcgcatagctgtttgattgcggcgtaaaaaatcagggcgacgaacgtgagtgtacggattgcggcgcgactttttctgccctttttcggtatggattttcttttcccgattcagggacttaatttccgtcgtccgccccgtccgttccgcaacggggccgaaagagtatgccggaaaacgtaaagtttaaaacgcccccaaaacgagcataaaagaaagcgccgcccttaaaatcgaacaacagggatccgagaaaacgttttttgcataaaatcgtttaaaaggagtcgctgtccggggaaaatgacgcttcattcactctcccgcggcaaaggcggaaaccgccgaaaaggggacaagcgggaaggacttttgctcattcggaagagccgcttccctgagagggcggaaaaacgcctttcccgttgaggccgccttgacggggcgccgagaatacgaaaaaaacgacgaaaaattttccgtcgtgggcaagatacgacgatttttatatttactatattacgaggagatatattttatggaaaagtacgagttttttgacaatcccagatttcatctggtagatcatccgctcatcgagcacaagctggcgattcttcgggataaggaaacgaagaccaaacagttcatggaactcgcggaagagatcgccatgctggaaacgtacgaggctacgaaggacctgccccttgaaaacgtggacgtggaaactcccgtcgccaccgctcactgcaaaatggtgtcggggcgttccgtcggcgtcgttcccattctccgcgcgggcctggggatggtgtcgggcgtcctcaaactcattcctaacgccaaagtcgggcatatcggtctgtaccgagatcctcaaacgcatacgcccgtcgaatattactgcaagcttcccgccgacagcgaaatgaggacgctgctggtcgtcgatcccatgctggctacgggcggcagcgcctccgacgccatcgccatgatcaaaaagcgcggcgccaaaaatatcaagctctgctgcatcgtcagttgtccgacgggtatccgcaaggtgcttgccgatcatcccgacgtggatttatatgtcgcggcaatcgatcccatcctcaacgagcattgctatatcgttccgggactcggcgacgcgggcgacaggctgttcggcaccaaataagcgattttccggaaaaatgcgggaatttagagtgtgtttttacaaataggaatcgatttttgagaggatttttcgcatgacaaggcacgcggcgggcgcataccatgacgtatttaatcgacgcgcaacgatgtattgcggaaacgcagccaaaatcggaactttatattttgtgtgaatatactttggtccttgcgtaataggaaaaacgcaaaacaaaacggcaagggagcaaaagcgtttttgggcgtttacatagaaaagaggagccgtcgagaaatttgtttcggcgctccgaaaggaatgaagtcccgatggaaggattttggaataatctcaaacagtttttttggaattttatcaacggttacggactcaatctcgtaaaagctctggcgattttcgtgctggggcttttgattatccgcatcgtgacgacgaccgtcaaaaagaattcggtgaagagccgccgcctcgacaacgcggcgtccaccttcatcacttcgctcgtcgcgctggtggcgtatatcgcgctggcgctgacgctggtcggaacgctgggcttttccacggcgggcatcgtcgccgcgttctcgtcggtgatgctcgccatcgctctcggtatgcagaacgcgctgtcgagtcttaccaacggcattctgctcattttcaccaagccttttcaggcgggggattatgtggacatcggcggcacggcgggaacggtcaaggagatcaaattgttttccgtgaagatcgtgacgcccgacaatctcaccgtcgtgattcccaacagcacggttttagagtcggtgatcaccaattacagccgtatgtctttaaggcggctggacgtcgtcgttcccgtttcctataacgcggacgtcgggaaggtaaaagcgctcgtgacggaatttatccaaggggacgcgcggatcgcttctctgcccgcaccctttttccgtttgacggaatacggagcgagttcgcttaatttcactttgcgcgtatggacggatcccggcgtattctgggacgtcaagttcgatttgttggagggaattttaaaagtatttaaagaaaacgggatcgaaattccctacgatcagctggacgtacacgtcgtggacggaaaaccggcggaaaacgggaaggaggcttgaaaagatgggagcatacggaatttttttgaaggtcgcctcttttttccctgcccttgtcgccgtgtcggcggacgtttcggaatccgtttccgatacgcctgtcgcaatcgaagggggaatacagctggcgatacaatacgggtggtatctcattctcatcgtcgcaggcattctccttttagcgctcgtcagacgtcgggctaagaaaaatctgacgcccgaagcggtgaaacagaattgcatttctctccaaaaacgcttggaagacacgctgaaagaggatgaaaaggaaaagagcggaaggagcggaatgttcagtcagacgaagctgatgaaactgcgttccatggcggaagagtccatgtggagcgcggcgcggctcgtggaggaacgcaaggatctggtgttcgacggagtggtgagcaatctcgacgagatcgccaatcttttagcggactgtgcggataatgcgtttgcggaaagggaagaaaacgaaaagaacgtgcgtgcggcgctgaaaaagacggaaggggtgctcgcgcagatagaggcgatcatcaagacgcggaaggagtgaacaggtgaaacggatcgtagcgatcggcggcggcgaactgcgcgacaaaacgacattgaagatagacgaatatatcgcggctcttgcaaaggaacacgcgggagaaaagcgggcgaacgcgttattcattccgaccgcgagtcacgactttatgccctattacaattcttttcataaggtctatacgggcacgttcgacatcaagacggacgtcgcgctgaccgtcttcaaagagccggatatggaaaggctcagagaaaaatttttaaaggcggacgcgatttacgtgggcggcggcgacaccgtttttatgatagaacattggaagaaaacgggccttttgcctctccttgaagacgcttacgaaaggggagtcgtcctcgcggggctgtccgcgggagcgatctgctggttttcggatatctacaccgattccttaaaggcggaggacggcacgcgatacgcgatgttcaaaggattaaattggataaagggaataatttctccgcattatgggcaaagaatgcttgactttgataaaattgtgtgttataattaccaatgtgcttacggaattgaagacaatgccgcgcttttgatagagaacggagaaattgtcggaagtatttcggcaggcggaaaagcttatcgaatcgtaaataaaaagggcgttttagaaaagtgcgagctttgaaaaatgcctgaaagaaagttgctcttttctgaaagacgagaaaacgttttggaattttgcaggatgtaagcattataaattaaaaatatttccgcgtaaaagcggaatatatgcggatgtggcgaaactggcagacgcgcaagattcaggttcttgtgggagaccatgcaggttcaagtcctgtcatccgcaccaattatacgggcttttgtgaaaaatattcgcaaaagcccgttttttcgtgttgttatatgtataattataataccgaaattatgtcaattcggtgagaatggggacgaaaacggggataaaaaagccccgtgtatttatgcaaaaccgcttgccgcttaatattcaagctttgccatttcctcccgttggaagtcatcttcccaatgcgtataaacgcggtctgttgtattcgcgccgcctctatgcccggttacatagtccacccaggatttataacaatgcgcttgctgtgcggcggtggtgaacgtgtgacgcaagtcgtaaagccgaaaatcggccgggaaatgccgatgaaaggcgcgttcgagaagaaaaagggaaacaggcagggcggcgcggattttgtcgatataaggcaaaagcgcggggtgcagggggatccggcgggtttcggggttctcccattttttctttttggcggtttgaatggaaacaaagacgcttttgtcggcgttggaatgcgtgcggcagtgtctgagagagaattgaacaaaggggcgggcggggcgtttgagagcgcccgctcgcttcttgccatagagagggaaacacggcgcttaggaaaacaaaaaattgtatatgaggaaggaaacctgtctgtaaaatcttccgcggcgctgcgcggggttataaaacatggaatatagatgagaggagcgtaaaagacgctttgagattgtatcggacgcgcattctttaacgaatgtataaaatttcttcctttcagggcggcgaaggtatattcttccccgcggtcggtcaaaatggaagtatagccattgatccgaggcgccgccgaaaaaaattttgatagacgcaggcggccgtatccgcttccaaagcgaactcggaactttgttttcaggagaaaactatgaagagcgcgatcgttatttctgtgctgttgctggcactgtatatcgtaaaaatcggaatcatgatatggaaaaaggacgactgagcagccgactttcctaaaataaagcagtcgaatagagtgggcttctcgattgtccccgtaaaaatattttttcgaaatgccgttaaaaatgtagaatgtgtgagtcaatctcttttgcgttaaagcatactatggtaggagcggcaagcggcgaaagttcgttttttacgtttgattcaaatcgttttaaacgggttataataaagacaaagacgtcaaagaattttttgcgtcgcggctttttaagccttataaaaataaaagttcacaaggagataacgaaaatgacggaaatcaacaaaaataattttgagaaagaagttctgcaatcggatatgcccgtggtagcggatttttgggcgccgtggtgcggctattgccgcaggcttgctcccgtggtggaacgcctggataaggaatacgccgataaaattaaattcgtcaagatcgacacggacgataatgcggcgctcgctaacgagtacggagtggataccattcccaccctgattcttttcaaaaacggagaggttttgggaacggctgtcaatcccggttctcagtcggcgatcgtcgattggctgaaagaaaagcaggcgttataaaagcttggaatttacggacaagggcgggagataattttcgcccccttcaaaggagaaacaatggacgagagaacgtatgacgtcgccgtgatcggcggcggtccgggcgggtatacggcggctctgtactgcgcgcgcagcggctataaaacggcggtcatcgagaagatgtcggcgggcggtcagatggcgacgaccgaccgcgtggacaactatccgggcttcgaagagggaatagacggcttcgaactgggcgaacgtatgcaaaagggcgcggagcggttcggggcggaaactctttacgaagaagtaacgggcgtcgagctggaaggcgacgtaaagcgcattacgacgacttcgggaaaattgacggcccgggcggtggtgatcgcgacgggcgcgcacgctcgggaactcggtctgcccgaagaaaaagcgttggtcggacgcggggtcgcctattgcgcgacgtgcgacggcgcgcggtataaggggggcacggtagtggtgaacggcggcggaaacagcgccgttgcggacgctttatatcttgcgggcatctgcaaaaaagtatatctcgttcatcgtcgggatacgctgcgcgcttccaaagtttataccgagccgctgaaaaagagcggcgtggaaatggtttggaacagccgcgtcgaagaaatcctgcacgaaaagaaagtgacgggagtgcgcgtcgaaaacgtaaaaacgggcgaacggcggacgatagactgcgacgcgctgttcatcgcgatcggacggacgccggaaaccgcgattttcgcgggacaggcggagctggacaaaggcgggtatctcgttgccgacgaaacgacccgcacgaacatcgcaggcgtattcgccgtgggcgacgtgcgggtgaaggaagttcggcagatcgtgacggcaacggcggacggcgctaccgccgctcattatatagaagaatacctccattaaaatgtaaacggccggataaaaatacgctcctcgcggggcgtattttttatttgcccaaaacccttcgttccattttttctgcgccaatatgatctaaaaaattttatcggattggacaagagaaaaaatgaaggggacagggctgcgatgaacgggaaaagtccgcggggaaaagttttgaaaacgcttgacctgaggactttttatctgttataataaatacgcttgggaatcgcccgaataaaggagttgcgaatttatgaacgattgcgaaaaaatgcggagtgtgacaaaccgggaggtttgcgcactttaaaatctgcatacctcccgcaagtttatttgacgactttcaggaggataaaacattgtataaaacgaataaatataccgttcggcaaagcgccgatacggaaacttttacctgtgccgtatgcggaaggacggttacctcggcgggtgcgggaagtcttcacagaaaccattgtccctattgtctttccagcgtgcatttggacgatcagcccggggaccgcgccgccgaatgcggcgggatcatggagatcgtgggcgtatgggtgcggaaaagcggagagtgggcgatcattcatcgctgtaagcgctgcgggatttttcattccaatcgcgtcgctgcggacgacgatccgctgattctgatgtcggtcgccgtaaagccgctcgcttcgccgccctttcccctctcttcgttggaaaaaaggggcgagaaagaagaaacggacacataagacatacggagaaaaaagaacgcgtgccggggatgttttttgccgcgcgtacgcgcaaatttcgaaagtgggaatttatgcgtttgttcaacaaagaacgttgcctcagcgcctcgtttgccgaggctcaaagaagaaaaggcggcaaaaagcggagcggagaagcgctatgcctttgaagcggaacgacttgaatcagagtgctttcaagaagcgttttaagggcatactatgttcgtgaagctatctttcgataaagaataagcaaacggagcagaaatcatctgctccgtttcttttggattcgtcgaaaatttttgcgcaaaaatgcgcaggagataggccgcgggaagaaatcgagtgggaaatatgcgaaattgtattctttaagcctgtctttctatcggagtagtgccgagcggggagttttcgttgcgataggaaagttttaagagaagcggcgccaggatggaggtgagaataatgataataaatacgaacggatagacggcgggagaaacgagtccgctcgaaattcccttatccgtacagatgaggaccacctccgcgcgtaccatcattccgcagcccactcggaagctgtcttttcccgaatatcggcaaagccgcgccgccagagaacagccgcccagctttccgacgatcgccgcgaggacgtagcagagcccgaacagcgcaaacgagcctgtaaaaccggaaaaattgagattcatgccgatattcgcaaagaaaatcggggagaagaacatataccccagcatatccgctttgacttccacatagggcgtttcctgcaacgtgccgccgagcatgatgcccgcgacgtacgcgcccgtgatgtctgcgacgccgaatatcttttccgccacgtaggcatacacgaaacaggtgccgagggcgagaataggcactcggcggttatgcggatattttctttcgatcttattgaagagctttctcaaaaggatccccagcccgacggcgatgacgaagaaaatgagaattttcagacataccagccaccacgccgcgttttcccaccattcgggcagaaaggacggagcgcctgcgcttcctccgctttgcggggtgaagcccgtaagaacggaaaggatgatgatgccgatgacgtcgtcgatgaccgccgccgcgacgatggaggtgcccactttcgtattgagtttcccaagctctttgagcgcggcgaccgtgacggaaacggaagtggcggtcaggattgccccgtagaagagatgacctaaaaatccgtccccttccccgaacgcccatgccaccaacgtgcccagcgccatggggaccaggacgccgaacgtcgtgatgacgacggaggaaaagcctgtcgatttcagttgtttgagatccgtgcccagacccgtcgagaacatgatgagcaccacgcctacttttgcaaagacgctcagccattctttgatgtcctcggaaaagaaaatataatcgattgcatcggagtggatgtttttgagaagtccgatcaaaagtcctgcgatcagcataccgatgaccgcgggcagaccgaccttctgagaacctaatccgagcagtttggtaaggctcagaatgagcgctaaggggagaagaatttcaaaagccgacatagataaactcctttgtacttcctgaaactgccgtgtgaaggaaaaaaggggggaagaggaaaaaatttcatttcacctcgccttcaccccgttttcaaccgcacaccattatactccttacgatttggaaaagcaaatgtttcagcgtgctaaacacgtgaaagaagactaaattttcaaagaaatcgcaaaaaagctttgatttgttattgacaattacaaaaaatatgatataataaataacggtgtctaaataatgaaaagaatcggataccgcgtcaagaaattcaaggagatgttgagattatgtatcggattatcgacaaaaaagcgctgaacccgacggtcaccttaatggaaatcgaggcaccgttcatcgccaaaaaagcgctgcccgggcagtttattattctgcgcgtggacgaggacggcgagcgtattcccctcacggtggcggactacgacagaaagaaaggaacggtcacgattattttccagatcgtaggcgctacgacggaaaaactcaatcataaagaagtgggggactgccttcccgacttcgtggggcctctcggcagaccgacgcacacggaaggacttaaaaaagtctgcgtggtcggcggcggcgtgggctgtgccatcgcgcttcccgtcgccaaggagcttgccgcacagggctgcgaagtcacctctatcatcggtttcagaagcaaggatctcgtcattttagaagacgaattcaaggcggcgagcaagcgtttcttcatgatgacggacgacggctcttacggcaggcagggcaacgtctgcgtgcccctcaacgagatgctctccgcgggcgaaacctttgacgaagtcatcacgatcggaccgctcatcatgatgaagttcgtctgcgcggcgaccaagccctacggcatcaagacgatcgccagtatgaatcccattatgatcgacggaacgggaatgtgcggcggttgccgtctgaccgtcggcggaaagatgaagttcgcctgcgtggacgggcctgaattcgacggacacgagatcgatttcgacgaggcgatgagccgttcgagaacgtatgcggatttcgaatcgcacgaaagagatgccgcgtgcaacctgttccagaaggaggtaaagtaagatgcctaaattcaatatgacccctcttaaaaatcccatgcccgcacaggaacccgacgtgcgcaacaagaactttaaggaagttgcgctcggatacaccgaggaaatggcgatcgacgaggcaaaaagatgtttaaactgcaaaaatcgtccctgcgtggcgggctgtcccgtcaatatcgccatccccgaatttatttccaaggtggcggaaggagattttgaaggcgcttatcagatcatttctctttccagctctctgcccgcggtctgcggccgcgtctgtccgcaggaaacgcagtgcgaaggcaagtgcacccgcggcatcaaggcgggctgcgaagccgtcggcatcggcagactggaaagatttgtcgcggattatcataatatgcacgcgaccgaaaaaccgacacccgttccgtctaacggacacaaagtggctgtgatcggttccggtcccgcagggcttacctgtgcgggggatcttgcgaaactcggatacgacgtgacggtttacgaggcgcttcacgtggcgggcggcgttcttgtctacggcattcccgaattccgtcttcctaaggcgatcgtgcagaaagaagtggataacttgaaggcgctcggcgtcaaggtggaaacgaacatggtcatcggccgcgtcatttccatcgaggaactcaaagaggaatacggctacgaagcgatcttcatcggttcgggcgcgggacttcccaagttcatgaatattcccggggaaaatttgaagggcgtatattccgcgaacgaatttttgacccgttccaatctcatgaaagcgtataaagaaggcagtcctacccccattcagcacggcaagtgcgtggcggtcgtgggcggcggcaacgtcgctatggacgcggcgcgcacggcaaagcgtctgggcgcggaagtgcatatcatctaccgccgcggcgaagaggaacttcccgcgcgtagagaggaagtggagcacgccaaggaagagggaattatctttgatctgctcaccaatcccacccgcattctgcccaccgccacggacaatccccgcgatcccgcttacggctgggtaaacgggatcgagtgcatccgcatggaactcggcgaacccgacgccagcggcagacgttcccccgtggaaatcgcgggcagcgaattcaccattcccgtggactgcgtcatcatgtccctgggtacctcgcccaatccgcttttgaaggcgacgacgccgggactcgaaacgctgcgccgcggagaaattgccgtggacgaagtcggcaagacctccatcgagggcgtgtattgcggcggcgacgcggcaacgggcgccgcaacggtcattaaagccatgggtgccggtaaagtggcggcaaaagccatcgacgagtatatcaagagcaaataatttttaaagatttgagtctgccggtcggcggacgaaagcgaaaaggaataccaaagagaaaagcgcggacgcaaacgtctgcgctttttggcgccgtcgggaatggaatgtcgagggcaactttgggataaggcgcctgtttttcgcggacatagggaagaaagacgggcacggcgactgatttttatgtctttcgattcgggaatttatttagaacaaagagtgcggggaggctttcttcctttttatgcagagtcgggcggaaaggaaaaattcaacggaaggcagaaaaaaacaggcgcggggcgtatcgggaaacggaaaggaacgacgcgaaaaagcaatctgcaaagaaatatctataaaaggtattgacaaaatacgtttttttatgctatcataacattgcagactgcgtttgaatagagtgtgaaaatgtctgttaaagaatatattttcgcatttattataaaaagattcagattcccgacgggcattggtcggaagaaaacttcgggaaaaggagaaaaaagatgaaaaaattatggaaatcgggtgcggcgctggcgatgagcgtggcgtttatcgtatcgagcgccgcttgcggcgcacccatagacaacagcggcgaatcgtcgtcttcttccggcgggaaggaaaactccgctttaagcacggagtatgtcgccaaagcgttggaacaatttgcttcggccaagagcgtaaagatttcgataaacgcggaaaccgcggtatatgccggtcgggtgaataacgcaaattccgaaacgcaggtgacggcgaatgacacgcaaacgattcagggcgagatccttctttccgaaacggaaacgggcgtcgatatgagcctgaacgtcacggggagcacaaaggacaacgctacgtcggaaacgacggacgtcagcgcgagcgtgtacgttctcggcgacaacgtttacgtatatgacgaggactgcggcgcgtatattatgcaaagcctgtcctcgctcatcgagaacgcgcagcccgacatcttcgacgcgctttcgatggcggacttggagggaatgaccgcggatatcgatacggcggaaatgatcgggatgctcgcctctttgctggatgaatacggaacggtgaacgaaacctctgcgagcgtttcgctctcttatgacgcttcccttatgctcaatctgctcatcgcgcaaatcaacggcatcgatgaaacgacaaagactttggaagaagcgatcgacgatcttctccgactggtcggcgacgtccgcgtggacgaccttctcgatgcggtgaagccgttgggcgcgttgacgttgactcaggcggcagcgcaaatcgacgccttgctgacctcctacgatgtttccttaaaggacattaaggacgccgcgatacaggagataggagaggaaactttcgaacagttggtggcctcgggctctttgacgcaggctcaggcggacgccctcaaaacgggaacgatagcggaggtgctcgcggcgtttgatgcggcggacatgaccgtcaacgcgctgatcggactgctcatttcttcttccggcggaacggaggttcccgacacccccgcggatgtcgtcgaacccggaaaagagagcgaatggacgagtatgtatgccgcgggcgccgctgcggaaacggagccgttcgatttggccgtatttatcgaagatacggtgaaaccctatttgaaaaacactaccttggcggaagctgatatttatctgcccgaattggacggcgtttcggtgacgaaggcaaaggccaatgcccagatcgttttggaaaaaactgccgtaaaaacgatggaaatgagctatgaattcggatgtacgaggcgcgtgaatgcttccgacggcttcgcgacgaccaaggtcgacttgaaggggagtatcgcattggaagagctgagcgcttcccccgtcgacatcggcttgcccgcaaacgccaaagtggtgtatgcgctttggactgaaaattggaaagcgtatgccgactcggaagaatatcgcgcccatatatctttctattcgcctgtgtttgaagaggaaacgctcaaatattacggtgagatatgcattgcggaccctcaatcggcgagcgtcattacgtatgcgttcgagtatacgcccgcggtttctgccgatgtgcagagcgtatccgtcacggtgctctctgcgaattggtacagcgctcagataccggagtggaagacattgacggacgaggaactgaaagcgctgctcggcggcaaagttactctgacgctgggaattgatgcgggcgtcgtcgatgtttccgcttttcccatgtatgagccgtctgcgcaataaagctgttaaaagagaggaaagggggaaggagtcgccgtttttgcggatcggtgttcccactttctgtttttagggaggaaaggagatcatggacatcggaatttataagtcgaaggtgaaagaaggcgtcgtcgccgaaatgcttgcttataagaaggaagtaccggaatgcggctatcggcgcgggcacgtcgcaaaatgcaggcgtttgcttttcggatatttaaatgccctcgataaaaattcttccccgacggacgaaaaaattatggagcaagtgaaaaacttggtgcttgctctcaataaactcaacgaaaaaaccgattacagcctcatagaaaccgatgcgagggaatgtatttgggagattattcaaagcagcgccgtggaatgcggtctgagggaagcgtccgaggacgtcacggaagaatggcgggaatggtaattcgctcctcctataaggcaatgaaaaacacgctatattcactttgcggagtgtagcgtgttttttagtttttcagaagagctcttttgcctttttacgaatttgtctgctttgtaacggcaatctcttcggccgcgaaggataagaattctctttattgacaaaagagcgggaaaactatttttttcgcaaccaattataggaaattttctacttatctatgtgtgtacggtggaatagaattgactaacaaggtgaaaaatggtagaataaggttatggacaagtcaaaggaaacgaaaagaaacatgaatattccgaaaaaaaatcctgaaaaaaagaccgcggcgacttccgcgcaagtcccgacggaggcaccggtggggaacgcttctgctgccggtaagggcgcaaacagaggagaaggtatcttaaacgccaaagaaggaaaaaagaatccgaaggacggtccgtcggcggaaagaggggagaatagcggggcggacgttttgaaagcagtcgacacagatgcgccgggggatatttttaggacgggaagagaagacggcgcagagcgtgtcttgacccacgtaaaagaggaaaaaaattctgattgcgcttcggaaacgggaaaagacgaggggaaagccgtctgcgcttcggaaacgggagataacgggaataacgcaaagcgtgcttgggaagcagaaaaagacggaaagagagagggggataccgtgaaaaccggtaaggccgggaacacagaagaaaacggcgcggcggcgattcaagatgggagtaaggataaaaattccgcgatagccgcttttgccgcggagggactaaaagagaaggagaacgcggagagtgcctcttgcggcgtcgtcgaaggcggcgcggaaaatacgcgggagggcgttgcggaagacgaggaaaaagaaaaggaaagcgtttttaagacgagttttcccaaagcatatgctttttggacaaaatactggggactttttctcgcgccgatcatcgccttcgtcatttatttcgtacagctggcggtgtccgaggtatatccgttcggatccaattacgtggtggcaagctacgacctgtccgcgcagatatgtccctttatcgagcatttattcgacgtcatggacggaaaatcctccctgttctattcttacgcgatcgcgggcggggcggacgttttcggcactttcgcgtattttttcatcagtccgttcagctttatctatctccttttcggggacggaaacgtatataacgcctgcggcgtggtcatggctttcaaacttgccgccatcgcgtttgcgggagcgtggttcgtcaaaaaacttttcaaggagatccccgattatctcggcgtcggaatcgggatcgtttacgccttctgcggctatgtattcgtcgccagcacgtatgtcaactggatagattttctcatctatatgcccttctgcgcggcggctttcgtgcattttgtccgcacgaagaaatttctgcccttctccattttgatggcgtgctgcatttacacctgtttttccattgcctgtttctccatgctgatcgtttttcccacgctgatcgcctatgcgtttatctgcgtgaaaagggaagagagaaattcgttcatcgcatacctgtgccttgcctttgtcgtggcggtcctcatcgcgctgcccgttttggcggcggctttgatggcgtatttaaggagcgggcgcggcggcggactcttcgacgatttttggtacggcttctttttgcaggatgagaagtacgcctttaacgtcaaatattactttgaacgcgcaggcgaagcgtggtatagaaaattcagctatattttcagcgattccgtattcgttgtactgacgattgtctggtttgtgcgagggaaattaaagaccccgctttctaaattcatgcttgtcgcgggaatcttcaccatgctgcccgtattcgtggacgaggcgatgctgctcatgaacatgggctcctatatgtcctatgcgttgcgtttcggcttcctcaacgccttatatttcctgggcggggcctgtctagccatgagggaatgcagctttgcgcccgaaaaagcgttcgacggcagcgcgctcagaaagaagggacgagaaggttccgtcctcttttacgcgatcgtcagtcttgtcatcgcggtgattttggcggtattcgtttccagcgatctatatctcaatatctgggacaactttatcaccgacagtggaatgctcagcgacatacacggcttttcgggaatgttcgcccattccctgggagggctgcaagtgaccgtggtgttcttcctcttcatcggctttgtcgtggttttgggcgttttgatgctgcgaaacaaggagatcggcgcgcgcgtgatgtcgattatgctcctgtgcgtcgtcggcgtgcaggtgatgttttacaacgagcagctggtggtgggcaatcgtgcgacgcattacaatttcaatcactatcagacgatgatggcggaactcaacgaacgggacgacagctatttccgagtcaaggattacgaggacaaactgacggcgaacgcgccctttacgggagattccaattcgttcagcgtgttttcctccgtcatcgatagggacaatttcgaaatcgtgcagctattcgggtattcgggcaacggtcgcaacagcatgaagagcgtcaacggcaccgtgctcggggatgcgtttttagggtacaaatatttctttgtttccgcgcaggatcccgacaatcccaagagcgggaagtgggaacaggtgaacaatttgtcctacacggagccggtattggcgacgggcgaggacggctcctcgtcgcaattgcaggcaggcggattctgtatgtttgaaaacacgatcgtgtttccctccgggtatacggtggcggacggagaattccgcttcgcggcggaaaacacgagttctaaccgcaccaaaaatcaagtggcgctgtatgaatttttgggcggggataaaaaggcaggctccgtgacgaccaacatggtgaaagagctttccacggatttatgggcacgcgccgcggaaatcgaggtgggacaggcggagatcaccgccaaagtgaccgccggggaaggggaatgtctgttcttgaattttgtggcttccaaaggctataaagttacggtcaacggcaaagaagcgcagcttatcgacaacgatctgcactttctttccgtaaaattggaagagggagaaaacgtcgtcgtcttcacctattcttcgccttacgtcaaatatctggcgatagggctggcgggcgccgtggcggggctgctggtcgtggctttgatcgtcaagaagaccaaatttatggaaaagtgcgcgcccgtcatcgcctgggcgggagtgactctcgcgcttgccgtcgtcgccttcttcatgctgttcccgacgctggtgttcctcggaaaattgttgaaggcgggctggataaaactcgtcgcgctcttttagtaaggtgggaaaatagagaacaatcccgaaaaagaaaataaaattctttttaaaaattgccgaaaaacgcttgactaaattctttcgtgtaagtataatagtttatgctgctttgagagatattttcgggcgcaatggacggcaatattgaggcatagcgcagtttggtagcgcgcttggttagggaccaagaggtcgtgggttcaagtcccgttgcctcaaccaaaaaggaactaagttcaatcgacttagttcctttttattatatgtatataggtttgctatggacgagtgtgcgcggcggcgcttcgcttttgattttctaagccatttataaattattgttctgccgaaaggaagctatatagagaatcgggtatgcccgcattcaggcaccatcccgactttgttcgttttataaaagaaaacgcgttgccgtttaagacctaaggcaaagtgagaaaaactcgataaccaagggaatcggattgtttattttctcatttcaattcgtccggaacgcaaaatcagttgaatagagatagggaaaggcgggcttttcggctcgccttttcgattgccgcaaacgagagcaagacgtatatatcgcacgggcggataaggaaaaaacaggcgtaacgggaacggaaagcgcgttaaaaatatacgaatattctcatgttttttctatcgacaaaataaaccgttctatggaaagcccgcgggagattggaaaaaggttgcgtatccgccgctgtccgcgctttaaagcaatataaaaaaggaaagccgctcttttaaaaggaagggacgagagggcttgggaagaagaaaatttgtctttaaaagcgcgtaaagttttccgaaacgagcacaaaataatcttttgttaaccgaaaaaaagccattgaaacaaagaaatatttgcgttataatgaaaccataaatatttgggaggggaaactatggacaaaagcggtttcacaaaaaaacgcgcggccgccttatgcgcgatgagcgtattgacggcgggggctttctgcgggggaatggctaccgcgcatcttgcaaaggcaagcgaaaccaaaagcattgctttgacggaagatctgaccgccgtttcgacgctcgccgacctcgaaaatacatcgcttaaactgtacggcgctatcgactgggcgggatacgggcgcatcgcgttaaacgaaacgaaccgggggaactttcataacgcctacgtcaacgacgtaaaactgggggaaaactccgatttcaaaaacacgaatttcacggcgagcggcaaacacacggtaggactgttgtccgaggcgaattcctgccgcattttttccgttgcctacacggcaaccgcggacggctatctcacgatttcgagcgggaatttgaaagttacggaggaaggcgcgctttggaatcccgctgtgacgtataacggaaagctcgccttatccgttaccaaaaacgacgcggataacaaaatcacgcccgatacggcgggttgggaatattacgaggcgggacgggcgtatacgccggaagacgaaacggtgcaggttgcggcgggcgataccgtgtatctcaatttcagggcggtgagagtggacgattccgttgcgcattgttacgtggcgtttgaatacgctcccgtctttacttattcggaaacggagccgacgacggagcccatcgattacgataacgtttctctcaacgaagacctggcgagagtgaattcgcttgcttcgttgaaagacacggctttgtcatactacacggggaacagttgggcgggctatgagagagtaagaatctccgaagcgaccaaggacgaacatccgcaggtttatcttaacgacgtgatgatcaataacgcttcggaattggaactcgtcaatttgagaagcagcgggacgcataccgtcggggtgtggaacgaaaatgtcaacagggtggtttccgtaggatatacggcgcaaaaggatggctacgtcgtccttcccgaaacgacgttggaagtcgtatccgacgcgacgggcggcataggaaaatcctttaacggcagactgggaatcaacgtcaccgtaaacgacgcaaagacttcgccgcaggacgcgggctgggagtattacgaggcgggaaaaagctatacgattcccgcgcgggcagttcaggtgtccgcgggcgacattctctatctgagctttttcagcgataggatttccgcggcggaaaccaatttgagctatgtgtcctttatctataatccttctttcgtctatgcacaaaccaatcccctggtgccttccaccgtacatgaattcagtcatgcggggaaactcgtcaagaatgcggaaggagagcttatcaacgacgtgaaaatcgccgatgacgacgctgcgacctatcctttctcctatctttacaggacgacggcgggctccgcgtcgggatatcccggtacggaagactccacggggattctggaaatgagcgcgaattcgtctttgggtgcgaagaatatctacgcggcggggtcttattcgggctttcaggcaagcgacggttccatcatcacggtggcgattgtgcccgatccgaataacgtcattctcggctttacgtccccctacgacggaaaactgaccgtttcggatatttcattcggatacgtatactatccgaatgccaaaaacaattacgagttttatggaaatgcggtcggcaagcccttcctcggctatgcgttccgcgtattgctcaacggaaaacaggtatggccggcggacgggggctgggataaatcgctggcgaagctgtatgagcgggaggacgcgggatacgcggcgggagatctgattccctcgcagtccacggaagatataggggatatttacgtccgcaaatacgacaaagtgtattttgagatcacgcgcgccgatctgtccgcggacgcggtgcaaaactgcgatctcgtaaaattcaatcccacgttcagcgtcgatacgcaggcggatatgtccctctacaaagattatctcaccgccaccgattatttcgacaccgtggaaaacgagaacgaagcgaacagccggatttcctattggtacgtagatacttccaaaggactttacgacaaagcggaatacttcctgatgagcgacgtcgactatgcggcaaacgcctatacgtcggggcttttggatccgtcgtccgcaaaaataggcatgaattatctcatgcccgtcaaaggaaaggacgcggcgcttcaatatgcggtaaaggcaaagggaaacctcacggtttctgcggaaaccctctttcgaaacggaaatatgacgctgtggcagtattatgatttggcggcttcgggaaacgcgccctccgcggacggcatacgcatgagagtggagataaacgggcagcgggtatggcctcttgacagggtttggaaagaatataagccgacggaagaaaatcgcggcgtattcgattttcaagacctcacgttcggcgtgaacgaaggagataaagtcgttattcgcatcaactgcggcggcgacgacggctatgacgggctgaattttaatcctgttttcgcgctcgcggaaacggaaacgcccgtgagtaatcccgccgtcaccgtttcggaccccgtcgaccccgaaggcggaggagaaagcagttccggcgacagccaaagcggaagttcgggcggcgacagccaaagcagtcagagcggcaaagacagcggagaggaatcgggcgataccggggcaggctgcgccggcggctgcggctctgtcgcggcgggcgggatcgccttcctttcgcttggtatgtgcgcggcagtatggctgaaaaataaacgcaggcaataagcccgccgccgaagggaatacaaaacagggagccgattttatgcggctccctgtgtccgtgattgccgcctgtttccgtatacccgggcggaaaaagacaaaaaatgagtagtgggaagcgcgggacaagcgtgttatataaaaaaatggggacgttgcgttatgcggaaaagggagcgatagggcgtggaacatcagggaagaggcgcggcagagcggtatttacggaaaaaaggaacgggattcgcaagaggtaaataaaaaacgtcgtgccgcggaaaaaggaagcgcgctgtgccaagagaaacataagggcgtcgccctataaaaagaacagggcattgacggcgagagcgtcgtccgcaacttgcctttgagataggcgtttatagctgcgcgcgcttttttagggaaaaaagcggatactatacgagaaaaagcggcggcatacaaaagggcgttttccgtcgcggacgggaaagaaagtatatcgcgataagagagaaaaataaatcggaaggaaaaacgtcggggagggaggtcaatgaagaaaacggaacgcgcggataagattttcggcacgaattataaactggtgatcggcgcctttttgttccttattttcgctatgcctatggttttgttctttttcgagcataaaagctatgtggaggaaaagagaggcgccgtctatcggattcagtcgaaaacggacgaaaaaatacagtcggtgaaaacccttctcaactatacttttttcgacgaggagttccaggagcgcctgaaaaagatcggggcgggcggggaacaggaggactatgaaaaaatttccgcgcagctcacctccatgacgattctaggggacgtcataaaggatgtttggtattttccgaaagcggaaaacgggggcgtcgtagagagcggagcggtggtctgttccgactatctcaccgcctatctcgccgacaacgcggcgaccgtcaacaagtttgccctcgacgagagatacgcgcggggcgaatatttcttctttcggatccgggagccgggcggggaaaacctcccctccgactactcggccatcgggcattgggtgacgagcacggcggcggaggactatttcgaacctatcggcataggacttgcgctcctcaatctgcccgtactcgtcgataacttttccgagatcaaggatatgcgcggcgtgcacgccgtattgtgcgacggggaggaaaacgttttaagcggtacggcgggctatgagtacggcggctgggatagaggcggaactttgaaaatgaaggtttcctcccgctttttcggcttaaaaaccatactctattttgaaagataccagatttttctggattttctgccctttctcttaggaattgcggcggtgttcgtattcttgtgtttatgcttctatatctatctccgagcgaacgataaaaagcggctttcctcctatcaatcctttatcgacgcctttcggagaatcagcgagggggatcttagcagcaggctggaacgctgcgggatagaagggcttgacctcgtggcaaaacaattcaacatcatgatggattccgtcctgaaactcaacgacgagctggcggaggaagagaaaaaaagattgcggacggagctggaaaaggacgcttacgtgctcaaatatctgagcacgcagatgaacaagcatttcatcttcaacactttcggcacgatccgatccttcatttccttaaacagaaacgaggaggccgcggaatgtatcaatcgtctgtgcgagtatctgcggtttacctttaaaagcaaggactacgtgcgggtatccgacgaaacggaggcgctggaatcctatttgagtatacagagggtgcgattttgcggaatcggcgtggagatccgcatggacgacgagcttgccgactacaaaatgccgcagttcatcctgcaacccatagtggagaacgcttacaagcacgctttcgagcgcgagaaaggaaatatccgcatccgcggcagagtatccgccgacggaagaatcgtctttacggtttcggataacggcgtgggactggaaaaggaaaaaatcgaaaaaatcaacgcgcagctggcgtcgggcgaggaaacctcggacaacggagggatcgggcttatcaatgtgcagaatcggctgaggcttttgacgggcgaggcggcttacgtcaaaatcggagggaaaaagggctgcggaacgacggtggaaataaaatttaagggaatcggagggtttgcatgataaaaacgtatcttgtcgacgacgaacaggtgatcatcgacgagcttttaaaaatcgtcgattgggaaggaagcggatatacggtgtgcggctatgcgaacgattcgaaaacagcgctcaaagagatagaaaaactgcgcccgatgatgatcgtctgcgacatcagcatgaacggcatgaacggattacagctcatttccgaggtgttaaaggtgtaccccgaaatgggcgtgatctttctcaccgcctacgacaatttcgagtatgccgtggaggcgatccgtctgcacgtcgccgcgtatctcatgaagcccgtgcagacgaaggaactcgtcaaagtgctgaaagagtttcgccaaaaatgttttcgtcccctgttcgacaaattcatggggctggcgctttcgggcagggcggacgaagccgtcatcaagagcgcggaaaaagcctgctgggagtacggctttatccgggcgggcaaggaatacgtctttgccgtgtgcggcgcggagagagaggtggcgcaagagccgatcgcggcttatacggaaaacggcagaacgcttatcctcatggaaaagtcggacgcgccgaaagaggatatttccgggacgatctttgtgggaaaacccttccgcaatgaaaataattttttccgatatgccaaagaggccgtgaagcggtacgaggaggcaagggcggctttcaatgaggaaacggaggtgaaagcggtattaaaacagatgttggaggatatttccgtcgagtatgccgaaaagatttccctgcaaagctacgcggtgaaatatcactataacaccagctatctgagcgagcagttcaaagcgtatgcgggcgtcaattttatcgattatctcgtcaggacccgtttcgaaaaagccaaggagctgatgaaagacgagaaactgagcatgaacgacgtggcgatgttggtgggctatgaggattacagtcatttcagcaaactctttaaaaaacacgagggatattctcccgtggaataccgaaaaaatttttgctgaaataagcacaagacaggaggcggacatcaaaaaataatacatttattttgcgcgcgccgtgtgataaaatgatcttagaaaagaggaggctccgaatgactttggaaaagggaaaattaaaaaaaaccgtctttcagaatcgcatattttacgctatgctgattcccggggtggcgcttactttcatattcagttacctgcccatgtacggcgtcgtgctcgccttcaaggaatattccatccgcgcggggatcctcggcagcaagtgggtagggctggcgaatttcaaaaccctgttcgatattccgcagttttgggtggcgttcaaaaacactctcgtcatcaatttgctgaaacttgtctttgccttccccgttcccatcgtgctcgccgtgatgataaactccgtggaaacaagctacataaaacgtcccctgcaaacgatcttatatctcccgcattttgtgtcctgggtcatcgtggcgggcatcgtgttttcgcttctggatgaaaacggattcctctatcagatgctggaaaaattcggggtaaaggacttcgatattctggcggataagggcggatttctggcgatcctcattctctcggacatctggaaggaagcgggatggagcgccattatttatctggcggcgctcacctccatttcgggcgaatattacgaagccgcaaaagtggacggcgcctccaatctgagaatgttcttttcgattacgctgcccctgttgatgcctaccgtttccatcatgctcatcctgcgggtcggggggcttatcagcggcggattcgatcagatctacaatctttataacgagcaggtgtacgacgtcgccgacgtgctcgataccttttcctaccgtttcggtatcggggacgggaattttgaactgggtacggcggtggggctttttgccaatgtcatcaatatcgttttgctgctgacggcaaataaaattacgacgcttatcggaggagaaccgttatactgacatgaaaagcaaaatgaaactgtcgcccggcgattgtattttgaaaataataaacgcggtattcctgctcgtattcgttctcaccatcgtctttcccttctggaacgtatttatcaaatcgttcatgacggataaggacatcatgttccacccgctttcgctctggccgcagtcctttcagttcgacggctacaaaacggtgtttaccaataagctgtacgatttcggcagggcgtttgtcaattccgtctatatcaccgtcgtggggacgatatatcaattgatcgtaacgacgtttaccgcctatgcgctgtcgaggagaaaactgcccggaaaaaagatttttctcgtctattttctgttcaccatgtatttcagcggcggcatgattccctattatctgatcataaaacagctggggcttcgggatacgcgcgaagtgatgtatctccccgcgtatatgagtatgttcaatatgctcgtcatgcgctcttacttcatgggacttccgcaggatctcgaatcggcggcgatcatcgacggcgcggggaatttccggatttttctcagcatcgtcctgcccctttccaaagccattctcgccaccatttccctctttatcgcggtggggctttggaataactggtacacgagtatgctctttatcacgacgaaatccaaacggcctctcgcctacgccctgcaagtgatcatcgaaatcagcaaggggaccagcgcttcgacgccggacggggcggtcgtcgtggggcggagcattcaatacgcggcgatcatgatcaccgtcgtgcccatcatgtgcgtatatccctttttgcaaaagcattttgtgacgggcgtcctgatcggctcgataaaggaatgaacttctgttttgtcgttgaaacgacaggtaagaaaagacaaattttatgaagacggaggaacggtatgaaaaagaagatttttgctttgcttctcgcggccgccacggcattttgcgccgccggctgcgcaggcagttacgaggacaccctgaaagacgagtacgaggacggaaaactggtcatcgactttttcgggcacggattggattccatgcaggggctgacgcccgattcccaaaagatcctcgactatgtggaaaacaagtttcagataaaattcaagacgacgacggcaacggttggctcggctcccacgctcttgaatcagctcatcagcggcggggacgttcccgatatgttcatccatttcctcaacgagcccgcctattccaaatggctgaaagagaagtatctgttcaattattcggagtatctcgacgactatcccgcgctcaaagccaattttacggcgctgggcacggaaaaggtggtgaaaaactttctcggcggggattattacagctttcccatcgtgctgcacagcaacgcggaatcgggcgcgctcagcgtggagatggcgatgtattacaggcgggattggtatcgggcgctcgtggaaaaaaattggaaaccgtcgagcggcagggatttggtcgatcccgaagatcccgatttcagttatctcaatttttacgatttgtgcgaggggtacacgaagggggaccccgacggaaacggggcggacgatacgatcgggtacggactcaacaaggacaacggcatctattggtggtatccgcttttgaatatgtttaacatacaggcggagggctgggaatataacgaggcggaacaggaatggcggcccgaaattctttccgaccgcgcaaaacaggctgtgatgtggatcgccgatatgtacgacaacggttttatcaactccaattataacacgacgaccacgtacgagatggcgaagagcgatttttgcagcggcaaatcggggatcatcacctacaacgccattacgtccgtgccggaagggacgctggaaatgatgacgcagtttatcggcaaggtggcgggcagcaagtccatgggcgacgtcgttcggggaatgcccgtcgtaacgggcgcagacggcgtcaagagaatgcagggcgcggtgaacaattacggctatctcgcgatcaacaacgacgtttccgaaaccaaaaagcgcaagatactcgaactcatgaactggatttttaccgaagagggggatactgcgctcacctggggattggaaggagaacattgggaaaagagtgaaaacggggaaaagaaaagccttctgcccctcgacaacgcgggcaatcagtatctcctcaaaagcgattccgtcgcgcccgccgcgtatcggatcaagggaatcgcttcctgggaaacggagtacacgaattatccccgctcttacgtgacggagtccgagcagataaggacggcatgggatacgcggcatctgatcgtagacgaattgtatttcgtccgcgtgccgaacgaatatatcactttggaaacggagttgaaggataaggtgtccacggtctgtaaaaatatcgtggcgacgatcaggaaaaatcctgccgaaacgagagaaaatctttggaattcgctgctctcctattggaacgagcggggcggggactatatcagggcgaagaacgaagcggcgaaagccgttgtggaataaggaggaaaaggggatgaaagtaaagaggatttttggaacggcgttgtcgttgtgccttctactgcccttctccgcctgtacgggcggcggagagagcgcggaaagcggagaaaaggaaactgccttttacgagtttcgattcgaaacggatctggcggaaaaaagcgcggacagatatcccgcggcgggcggcggaaacacttattacgtttcttccaaaggcagcgacgaaaacgacgggctgagcgaagaaacgccgatcaggacgatcaaaaaagtgaacggtctgcaactgaaagcgggcgacaccgtccgcttcaagggcggggaaacgttttcgggcgcgacgcttaccgtttcggcgagcggcactcaggacgctcccgtcactttctgcggctacggcgacgaaacggcaaggccgaaaatcgtcgcccaaaaggtggacggcatcaattttttcaattcgagcaatctcgtgattcgggatttggagatcgtcgtcgtgggcgacgagcgggtttccgaagcggtttcccgctccgtcgtgggcatcgaaggctcgtatacttccaaggagggttgcgagaacgtatatatcgtcaataacctcatttacggtgcctataacacggcgacgagcggtatccgcgtcacttcctcgtataccttcgcggaaggggcggaggacgtactgaaaaacgtacatatcgaaaacaacgaagtgcattcgctgggcatcgcgggtatctatgtggacggctggctgagcgacatcaataaaatgaacgcctcgcccaggctgtattcggaggtttacgtcaacgaaaacaccgtctacaatatcgggcagatcgccatttacgaggagtgctgtcacgattcggagatgaaccgcaatctcgtacacgatgccgccattttcgacaagcccttcctttccatcggacagacgggcatcatggcgctcggctgcgaggatacggatatcatgaataatatcgtgtataacgtgtccaatgcctgtcagcctttcgacggcatggggatagacatcgactggaataccaatcgtataaacgtacaatacaactgggtgtacgactgcgtgggcagcggcgtggggacgatggcgaatcagaattgttttatccgcaataacaggatcgaaaacaaccgctgcgaaggcaatcagcacgggcagattcatgtttccgactttacgacgagatacgaggcggtggcggaggataggcacgcggtgaccaatctcaccgtcaaagacaatctcatcgtcagcgataaggagggcaaaagccatttcaacgccaacgagctcggcggggactccacgctgtgggcgggaaatacgtttgaaaacaacaggctggtttccaataccaagacgaacgatatttggatacaggtgtcaagcgcggtagcctggcacaaatttgcgcaaaacagatactacaaagagaacacctcgaagtttacggcgttcgacaccacgccgcaggaaaagataaacgagggcgcgctggcttacgacggcacgggattcgaggcgtggaaaaagagggacacgggcgcggttttccaaactctgagcggggcgaagcccactctccccaaaaacgtttgcgccgtttacgaagacggaaaggtgacgctgacatgggaaaagccgtcgggggaagtatggcattacaacgtatatctgacgcaggaaaatgaagaaataagctatctcaatctgtcgggagaggcgttttcggaaacgtttacgcaggaatttgaagcaaagggcgtctattatctcgcggtggagcccgaatctaatcaagggcactgcggcgaagtagtaagggtgaagatcgttctcgaatagaatcgtttgggaaaaggagaaaaaaatggacacgaaaaatctcgccgtgataggattcggcggcagggggcatatttacggggaattttcccgcaaatatcccgaaaaattccaattgaaagcggttgcagaaacggacgaatacaggcgccgcgacgcgaaggaaaatttcggcgcggaggtgtacgaggattataaagagcttttagatcagggctaccgcctcgacttggtggcgatagccacgcaggacgcccagcacaaggaacacgccctgtacgctttgaacagaggctacgatctgcttttggaaaagcccgtcgccattacggaaaaggattgtctggaaatttacgaatgcgcaaagaagaacaaccgtcgggtatacgtctgtcatgttttgcgctatacgcccttctattccaaaataaaagaaattatcgacgagggaacgctgggggagatcgtcaacgtccacgccagcgaaaacgtcggctattatcatcaggcgcacagctatgtccggggaccttggcgaaacagcggagaaagcagtcccatgatcctcgcaaagtgctgccacgatatggacatcctgcgctatctgatcggcgaaaaatgcgtttccgtcaattcctacggttcgctcagctattttaaagaggagaacgcgcccgagaatgcggaggcgttctgcaccgattgcccgcgtaaagaggactgcgcatataatgcgcagaagctgtatacaaagtacgtctggcccgcgggatattttacaaagggagcgctcacggaggaaaacattttgcgggatttgaaatattcgccctacgaccgctgcgttttcaaatgcgacaacgacgt

SEQ ID NO: 2855 - DNA, 7976 bp, Unknown
  16S sequences of unknown bacteria
acgttcttgttaacagccaaaactttagttttgctgctgttacaaggttgttataacataaaagttaaagcgttcttgtcaacagtcaaaattttaattttgtatttgttgctaggttgttatagcataaaagaaattgctttgcatgtttaactataaaaaactaaaatgttctcctaacaaccaaaattttgaacatggaaaatgttcctttctatgtttattttgctactgttacaaggttatttcaacataaaacaagctctacacctttgtaaaaggcactgctttgggtaacaaatacaaataaaaaggcgccgttaaacggcgcttttttcatcgtttctgattcgcatatcgttttgcttttttattggacatagaacttttaaaaatcgcattggtaatcaatgcaacaatacgttctattacaatgcttgcaacagccgcaataacaaaaataagaagtgcggttctggaaggcatggttaattccagtaaacctttgaaaatatatgctgcagcaaagtatccaaatgtcatggacaagaataaaaatccgcgcaatggattaaatggacaacaagccttaaatacagctgtaatgccaacaaagccaaccaaaagatacataatggtattggtttgttcgggagaaacaccaaataacggcgctatgagaaacaatgctaccacgccaatggtggttgcaaccgcatttggaattgcccgcctgaatactgacggtaagaaccgaccagttacctttcttccatccggctcaaaggacataaagaatgccggatatccctcaatggccaagtcaatcaaggtaatttgaattggcaagaacggaaatggttgattggtgcagatacaaatgatggataacaaaacggaataaatggtctttacaaagaaaacacctgcaacacgtgtaatattatttacaacacgtcttccttcagccaacacttgcggtaaagaagaaaaatccgaattaagcaacaccaattgcgacacttgtctggctgcatcgctgccttctgcaatcgcaatactgcagtctgcttcacgcaatgctaaaatatcgttgacgccatctccggtcattgccactttgtgaccgtgtttctgcaaggcttccaccaacattttcttttgctgcggtgatacacgaccaaaaacagaataacgatttgccgcttttaccaactcttcttttgtctgaatggtgctcatatcaatgtaattttcagcaccttccaaaccggcttttttggcaatggcagcaactgttgccggattgtcacctgaaattactttaattgcaacaccttcacgtttaaagtagtcaaaagttgcttttgcgttttcacgaatagggtcggtaatcacaattgcttttaacggtactactcccgtcagcggtccgtctgcagtaacgttatcctttgtcattcctaccaaaatgacacggtttccgttctgaatctccagctgtatttcttcgggaagctgtgaattggttaatctttcaggtgctcccagaacaagtgtaccgaattgttcaaatgtcattgcactccattttctttgagatgaaaatgggattttttgtacgggtgcatagcgtttacattcttgataatatcctttaatcgcttgaaatgttgcattattatcatcggtgtaatgtaaaaaagaccccatgacatcatcaaaccaagcaatatcgtcttctcttcttaaaggataaactgtctctactttcatgttgccttctgtaatggtacctgttttatccaaacaaagcacatccacatgggcaagtgtttcaagggagtacagttcttgtaccaacactttacgctttgccaaacggcctacaccaacagctaagctaatgctaatcaacagaaccagacccttgggcagcatgccgagcaaacctgctgctgtggaaacaacagaagtggtagggtctccgccgcgcaagaaaaatgcttccaaaaacaatacaatgcctaaaggaataattaaaaatcctgtaaaacgggttacttttctcatagaagtaaccaattcggaatgtacttgtttcatttttttggcttcatgcgcaatatgtgtggcatagttgtcattacctacatgctccacttttgcataacacttgccgctgataacaaagctgccggataatacctggtcacccggcactttattgattgggtcggattcacctgtcagcaaagattcgtttacttccgcttcaccttctaaaataatggcatctgaacaaatttgctgacctgcatataggcaaatcacgtcatccaaaaccaaatcttccaccggaacttcccgttcttttccgtcacgtattactttggcatgcggaacagaaagcaaggaaaggctatccaccaatttttttgctcgcaattcctgaataatcgcaattaagatattggcaatgatgataacgataaacaataaattgctgaaggcaccaacacaggccaaagcaattgcaataattaaattgaataaattaaataaagtacaaacgttatctttaataatttgtcctgtggattttgatattttttccgttgcctcattttttagtcccttttctttttgactggcaacttgctgagatgttaagccggtttttgcatccggatgcagtctctgcttttcttccatcatatcaccttttctgttattttgtatgtatcaacacatacggattgattgtcatatttactataccatatcttgctaacaatacaataaaaaaattctaaacgatttataaattttacaatgaaaaaaacagctgccaatggcagccgatacttaaacctctgaattctgattttcttctctgggactgcataagaattccacatcgttaatatgtagcgtttcatacagttgatagctgtttttctccttgatttcgctcatgctccacaaaaacataactcctgttattgcaagcatagccgaccatacgcactctttcacaaataccgcaccaatcatactgccaattcctactatgaaaaataccggccaaactttttccataaaacaactgttttgttttttcacaaaagaataaaacacactcatcataacgaaacaaaaaataccaataaataatccttccatagacaaaatgacctccaactgttattgatttacacctatggtttaccatattgcatctaacaaaaattggttacaaataaaaaaattagaaaaaaacataatttagacataattatggattataatcaaattatatactaaataaaagaaaagaattaggaggaaacaatatgctaaatcaaacactggaagaattagccctaaatattttaatagagggtgaatttgatacactgcctattaaaattacacatttggcaaaggtaaatcgtgttgactatctgaacaattttgaacatgaaaaatttgaaaattgtacggatatatgccagttcattttacaaagcgaaaatatggattccgaccgcgaacaggcacaaaaattagctgcattggttatggctcctaaatgtgtactgaaagcttgcaaagtatccagcgctgaaaatctacatgtattaacagctgttccaattaaaatagcaactgacttatatgaacacctgaatacctcctctgcaagtgaagccttatcggagaaagaaaagcaagtagttgctcagttccactcatttatcaatcaacaactaagcgaaaaaccgcattttcacagaccataaaaaaagaggaacgatgttcaaagtcgttcctctttttttatctcattccatcaaagatgactgtgcttcttttctttgctgctctctttcctttttggaaaaaatacatccgcaatagtcttgtcgatataacccatactgttgggataatatcagggattgtttaaatccttctttcttcttaaaatcggagcacaagtatggtatatgatatttttcacccaataactgccctatctcatttaataaatttgcgtttttatgcggactgatggtcaaagtagtggtaaaataatctgcatctaattcagaggctttctgcgccgcttctgccagccttaattcaaagcattttttgcaacgctccccgccttccggttcattctccaaaccaccgacgcaatggtaaaactgttccggatggtattctgtctctatgacttcaatctcttgctccaactgcatttgcttgagcaaagaatgcagctcatccaatcggcggtaatattcttctttcggagaaatattgggattataaaataaaattttgatgataaaatactgggctaaatactttaaaacataagtactgcacggtgcacagcagcaatgcagtactaatatgggccgctttccttccgcctgtaatttttgtaatgtttcctctaattctttttgataatttcgcttcatactgtcccctactgcaaaccatatttttattaatcttatcatatttcccgaaaaaaatctaccggcacagtcaaccttctgtgttatctactatctaacaacacaacatttttctgacaaatccagtctgtggacaaattcattgccgttctgcaagcatttgtctgatccaatacattcagcataacaaaatcatggatggttccttgaatttgtactgcggtgacattgacgcctgcacgcattaatttttttgcataggcttctccgtcatctttcagcacatcagcttctccgttgataatcatggcatccggaagacctttcaattgatgtacagaggctctcagcggtgaagctaaaatatgactgcgctgtttgaacaggggtaaatattgattccaaaaccattccattcctgcgcgatacagataatatcctcttgcaaatctatggtaggactctgtttgaaaacaagcattcgttacaggataataaagcaattgtttatgaatcttgggaccgcacttttctttggccaaaagcgtcatagcaattgccatatttcctccaacgctgtctcccgcgactgtgagcgtacggaaatcaatattggggtatttttttcctattaattaaggaaggcgacataatagataatagcattgatgaattgcggttggaaatctgacttcgggcgaacgcgtatattccggaaatacaatcaaagaattggtacgtgcagacaattctcgaactaatttttcatgggtatgaaaactgccaaacacccaccccgcaccatgaatataaaaaataatactttttacagaagtattttcttttggagtgacaaaataagtggtgatttcttcccctccattgatttgaatttgctcacactgaatattggcaggatacatatttacaggggaattttgctggtcttccagttgttttctgccttttgcgggaggtaattgaaaaataaggggtggcactgagctttgctcgcatactttgaaagctgcctcttctaaagggatacgtctcataaaaaactcctttcataagaattttattcatacttatgctgaaacatctcatttcactcctaacaatttttatggacgtatcaaaccgacaaatacatttgtcggtttgatacggcaagtatctacgatgtaaaaacagtttcgttgtcaggcaattgtttatgtaacgcctcatctcttcttttatgaacggcacgatggataaaataaagatacggcaatcccaaattggtttcaagcaaagaattgacaattaaagtttgcaaactctgattgcgtattcctgttatatttaaaacaaattcccagccgaattgaaccaaaatgccaatggccagaatccataagacaggaatcttttttgttttatctttcaatcgaatgttataaatacatacaatgccatatccaatgaccaaaatcaaagccataattccatgataatcattggtaccccgcataatagaaatttgcgaaaattgatttccaaagttttgtgacagcagtgcagtagccaaccaacctgcaacaattaagactgaccactctaaggtatgtccatcgcggtccagccacagccatatccatacgaaatttgtaaatccgtaactgatggaaagccatagcaaaaaccaaaacggatctgctccaactacttgccgtgttcccagaagcaaatagaacataccgtaatctaccgcaaaatacaaagctcccccgatgagtcccgcaatcacagcttgtctgcgcttggtccatagcaacacgcccagtaacatcataagataagcaatatctaaccaaatatataaactgttcatggttcttgccgcaatcacttcaccttccaagttcgtctccccctttgcatgttatttacaaataaaatgataccataatcatctgtaaaaataaatataaaatatactatttgtattatctttttgttttaaggagcaaaatttgaaataaattgtcaaatgaacggggttttatgcgcttacattgacaaggttgccccaagtatgatatgctacaacatacagcaaggaggcgtttttatggcagaaaaagcatcaacaaaaacaattgcacaaaataaaaaagcctaccatgactattttgtagaggaaagcctggaaacaggcattgagctgtttggaacagaagtaaaatccttgcgtcaaggaagagtaaatttaaaggattcctggtgttcgattgtcaaaggtgaattgtttataaatggcatgcatatcagcccttatgaacagggaaacatatttaacaaagaccctatgcgagtaagacggttattggctcataaacgagaaattatgcgcttatacggtcatgtaaagcaagaaggatattctttgattcccatctccatttactttaaaaattcaaaagtaaaagttcaagtaggcttatgcagaggtaaaaaactctatgacaaacgtcaggatttagccgctaaggctgccaaacgtgatattgaacgcgctatgaaagaaaaaaatcgataggatatctcctattgttctatatgggggcgtaaaggtttcgacggggattgtgaaccttagtaagcgagtagtggtacggacccactgaaaacgccgtatttttaaaattaaacgacaacaaacaagttgcgtacgcagcctaattaaggctgccgtctcatttaggagtaccacggcctgaattgagatgtcgatgagtggtgcacgtgaatcaagcgacgcctttcacttgatcatgactcaaaggctaccaattctttcagctttccaattagcggtaagatgcgggaatgttaaataattggatacactcgtagaaagctttggcaagtgattttcggacaggggttcgattcccctcgcctccaccataatgcgcacatacgaaccccaaattaccgttgcggtgttcaaaaatgtgtttgcgctaatatttaaaatcactaagtgattttttgcataaaaaaaagagggtaacggctgttaaaccgctacccttttattttattcctgctgcacttttaatagcatccaaatccacttgcgcatcatatacatcttttagcttaggtaaaaaacatttatatcttgctttcctgcttaattggtaaagatggatgtattcatctctgaaatcgtctatattatcgatattttccatttcatcttttctatcctgatggtctatgacatgaatatttttttctgcaagcatagcttcaacgatatgtacaccacaataaaagataactgtaatttcccaatctggatacttagatccatcttttataccattatctaaaaaatctttattgtggaagtatttttctaagtgtgcttgcttactttccattaagctcatccctaccttttttgtgaaatgaataagcagg

SEQ ID NO: 2856 - DNA, 11279 bp, Unknown
  16S sequences of unknown bacteria
gcaatttcttttatgttataacaacctagcaacaaatacaaaatcaaagattttgattgttggctagaacgttttagcttttatctgtaaaaaattgcaaagcaatttttttaatgctataataaattaatttaaattacagaaagaagcataggtgattaatttgtcagtgccacaagacagaataagaaattttagcattattgcccatatcgaccatggaaaaagcactttggctgaccgtatattggaacagaccaaggctgttgctctgcgagatatggaaaatcaactgctagacaatatggatttggagcgtgaacgcggcattaccattaaagcacatgctgttactttggtctatcacgcaaaagataatcaagattatgtttttaatttaatagataccccaggtcacgtagactttacctatgaagtctcccgttcattggctgcttgtgaaggtgccattttagtagtggatgcttctcaagggatagaggcacaaacactagcaaatacctatatggcggttgacggtggattggaaattgtacccgtgattaataaagtggatttaccaagcgccgatccggatcgtgtttgtaaagagattgaagacgtcattggcattccggcggaagatgctccacgcatttctgcaaaaacaggtcttaacatcgaccaagtaatggaacaaattgtaaagcaaattccaccccctcacggagacccggaccaacccttgcaggcacttatttttgactcctactatgacgcgtataaaggtgttattgtatatgtccgtattaaagaaggacaggtacatacaggagatgtgattcgcatgatggcaaccggagccacttttaccgttgtagaatgtggttatatgcgtgcaggaggcggaacagaaccttctgatgtattatcggcaggcgaagttggttatattgctgcttccataaaatctgttcaggatgctcatgtaggcgataccattaccttacacaatcgtccggcagcagaacctttgcccggttacagaaccatacagccaatggtattcagcggcatttatcctgcagatggtgcccattattctgatttgagagatgcgctggaaaaactacagctaaatgatgctgccctgacttatgagcctgaaacgtccattgccctcggatttggctatcgctgcggatttttaggactgctccatatggaaattatacaggaacggttagaaagagaatataatttagatattattacaacagctccaagtgttatttaccgtattacaaaaacaaatggagaagtaattatggtagataacccaaccaactatcccgattccgtattgattgcactggcagaggaacctatgaccagcgctcacatttatactcccagcgaatatgtaggcaatattatggaactctgtcaggaacgccgcggtatatttaaagatatgaaatacttggataccgatcgtgtagatatccattacgaactgccattgaacgaaattatatatgacttttttgatgcattaaaatcccgtacacgcggatatgcttcgtttgattatgaaatgattggatatgcaaaaagcgatttggtaaaactggatatgatgctcaacggagaagtcgtagacgcattaagctttattatccacaaagataaagcttatgcacgcggcagaaaaatggctgaaaagttacagcaaaaaattcctcgccaattgtttgaagttccgatacaagcttgtatcggcggcaaaattattgcacgtgaaacagtaaaagcggtacgaaaagatgtgcttgccaaatgttatggcggtgatattagccgtaaacggaaactgctggaaaaacaaaaagaaggtaaaaaacgtatgcgtcaattaggaaccgtagaagttccgcaagatgcgtttatgagtgttctaaagttagacgagtaatcactactgataaaaaatacatataaaaaagagacaagcaatgcttgtctcttttttatattaaaattgtttctgtcttttctctcttaatttccaactgaaaaatccatagatatcattcaataaaaatatactgaaacatattaccattggtacgtacgaaatttgtgttaatgatgccaatatccacagcacaattaaaacaatatcattggccgcatatgccaaggcatagtaagaattacggaataacattaagtaggacgccaaaaaactggtagcgatggaaattgtgctgactgctaaattgggagtaccaagcgcctgaagaataaagaaaaaaatagcagtaacaactgcggtgagaagccacatcactcctgtctgcaatttggtcagtttatgtattttcacctcgctccctcccttttcatacggatgacgaatccaagaaacaatggaaagtacagcaataggcattgtcattccaaggtatgtaatcatttctccgtaatactgaaattgcagagaagcgatggcatataaaatactgaatatcactgtcagtatctgcccccatacattaccttttgctacaaaaataagggctgttactccgataaccgtcgcgcaaagggtaaatatttgtatttctcctgttaatatattggaagttgtcacaatgataacagacaaaatccaaatcacccaatcgtgtttcttaaaattctgaaaagggttttgcatttcatatcatacctctcaaaaaaaataagcacccacatgacacatcttcaaagacctaacgatgtgcaagtgaatgcaatacatttcacactacccggtggcagtttctatatgattttatttaattatacttgatatgataattcaggtcaagtcaatggttcatttctataaaaatagagagattaccaccgtcatcatacctgcaacacccaatgccatactgctcattgcaccttgtatctctcccaactccattgccctggctgttccgattgcagtactgctgcagcccaaacctacaccaataccaaccggatttttgatgcggagcaattttaccaacagtggagcaagcaccgcaccaattacacccgtaaaaataacgccggctaccgtaatacccgtaatgcctcctaatttttcacttacgccaactgcaatcggtgttgttactgtatgaggaaccagagaacctgttaaggtttcgtctaacccaaatactttacataatgcaatggtactgccaatagaaacgccgcagcttaccaaacagcctgttaaaatgggaagccaatattttttcaatgtttcaagctgcaaataaatactatatcctaaaatagtagtaacaggtactaagaataccgtaataatacttccgccttcattataagaatcatacggaatacgacagaaatataaaattggaataataagaaccattgcaatcaacaacggatttaaaataggtgttttaaatttccgattcaaccacaggccaattaaataacctacaattgtcaatgtaattccaaataaaccattgcttaaaatggcctgtaaattgctcaagatattatccatttttatctcctttattcgccataattttttcctgaagtttcataacaccaattacggtatatgctgttgccaaaaaagtaagcaatgccgaaacaatacaaatcaatgcaaactgccacatatagccttgtaaataacctacgctctccatgatacttactgccgtaggaatataaaagaatgaaatattttttagtacaaactgtgaaacctcttcaatatgacgtcttttaataaatttaaacagtagtaataaaaataacaatatcatgccaatgacgccggatggaaatgtaaacggaagtacagccgcaatacattcagcaacaaggcatatagtaaatataatagctaattgggttaaaattttcataaaatacactccgattgtttatgattttttgtatactaatttagtatgctttcaatttactatgtttctgcaattctgtcaatagtattacgtaattataaaaatattattatcattttgttttatccttttgtttcttataaagcgaattaaatttatcaatcactaacaatgttatatttgaattcacaaagattgaaaccgaatcatctatgaaagattttccttattaataagacagaaactgcaaaaactagtctgagaacccaaaaaacattttacaccgtttgacttttaccagcgagtaaggtataatgtctaacggtgtaaaatataatgataaagattcaattaagaacgaaaaaagacgaaataataataaaaaacaaacaagacttttctgtggaaaagtttcttccggaattgcgaatccataatcatacaggacgcaatgaggaaaactatgattggaggaacttttagtgtacatcaggttcttcaagcgtttgtgtgatttctgcatttccttgatatgcagtattatttttctgcctatatttattattctaatcattgttgtaaaactggattccaaaggccctgttttcttccgtcaagaaagagtaggaaaagacaaaaaattatttcatattttaaaatttcgcacaatgaaagtagatactccaaaagagattcccacctgtatgttggaaaatccggagcaatatataacgagagtaggaaaatttttaagaaaaacctccttagatgaacttcctcaaatttggaatattttagccggacaaatgagcttaatcggtccacgtccggtaataccacgtgaaaaagaattaattgctgaacgagatctctacggtgcaaacgacattcgtccgggactaacaggatgggcacaaatcaacggcagagacgaggtctcttggaaagaaaaagcccgtttggacggagaatatgttcaaaagatgagtttttcttttgatgtgaaatgttttttcaaaaccattgttgctgtattaaaacgcgaaggtatggtggaaggaactgcaggacaatctaaaaataaggaagaaacgcatcaaactgacgagagatagctcaattttgcaaaagtattttactatgatgatatttatagtgaaatattttttgtttttttatcaactgaaaatatctcaaatatttaaattccccaatacaggatattactttataacaataagaaaaaccggtgtaaatttacaccggtttttcttattgttattttagcgtgcttaaccttttgcgtattcatccaaaaattaattcaaaatacgccttataaattaagctggcactacagtcgccttaccaaggcacacattgcaatcgaatatatcctaatctttataccccaagcttataaaaataaggaaataataacggtcatcatacctgctacccctaacgcaatactgctcattgcaccttgaatttctcctaattccagcgctcttgctgttccgattgcgtgacagctgcatcccagacctacaccaataccaaccggatttttaatacgaagcaactttgccaataaaggcgctgccactgcaccaaaaatacctgtaataataacggccgccactgtaatgcctgatatgccccctaatttttcacttacactcattgcaattggcgttgttaccgaacgtggaatcagagaatttgtcagtgtgttatctaaaccacataatttgcataatccaatggtgctcccaatagagacaatgcagctggtaaggcaaccaaccaaaatcggcagccaatatttttttaatactttgagttgtaaataaatactataggccaatactgtagtggcaggagctaaaaacaatgtaataatacttccgcctacattataagagtcatatgaaatatggcacacctttaaaatgggaataataatagccacagctatcaataacggatttaaaataggagatttaaatttttggtttaaccagacacctattttatacgccacaatgcttaatgtaagaccgaataacccatcacttacaattttattcatgatgtttctgacctctttttgctataattttctcttgtaacttcataacgccaattacggcatacgatgttgcaataaaggtaagcagcgttgcaacaatacaaatcaaaagaaaaaccataatatgtccctgtaaataagtaatgttatccataatgcttaccgcaaccggtataaagaaaaaagccatatttttcagcataaattgagaaacatccttgatatggcgctccttaatgattttaaccagcatcagcaaaaataatataatcattccaattacgctggaagggaatgtaaacggcagtattgccgaaatacattcccccaccaggcaaatgccaaatacaattgccagctgtgttaaaattttcatagtaatcatctctgtttaataaaatttcttaattttattttactcctttcgctatgtactgtcaatagtgtccagatctccaaaacatgccttctgatgtacagataaaacatatttgtaaacttacattgcctaatttttctcatttaactaaatttgagaaaaattaggcaataaatattatggagtaaatacaaacaaaattataataaaaataaattgcaataaactcatggaaaggagaaatgtaaatgagtacttgtaatatagacaaatggaatatgttagctccaacttttaatgcctttgaaattccaaaaataggagaagatgactgccttactttaatcaatgatttaaaactaatcacgaaagacagctctgttatggatgttggctgcggtgccggacgatatgcaattgcgtttgcacaaatgtgccgcaatgtaattgggacagacctttccccccagatgatagactatgcccaaaaaagagcggatagcatgggtctaagccatatatcctttatttgtgaagattgggatgccatatctatccaagagagaaattatcaaaaccaattcgactttgtatttgctcatatgacccctgcaattcataatacagaaacattagtgaaactgcaggcatgcagcaaaaaatggtgtatgctggtacgtcatattcatatggaaactcctttgttgattgctgccaaacaaatgctaaacctaagcaatcaaaaaaccgccgattcatatgctgctgaccaaatatttcatgacttatggaaacaaggcaaacggcctcaaatgacatattttaaacaaaaacgagatatgcagcgtccaatcgacgttgaactgacattactatttgaagatgtcgaaaaattgacacctctaacgcctgaagtaaaagaacagctaacccatttggctgctgcttatacgaaagacggaatggttcatcaaacgtatgaagcgcctattttcgccatgtactggaatgtactataaagcgacaaataaaattttaagttttgaaagaaggaatcattatggagcaacaattatgggaaaaagcaattgcatttcatggacatgcatgtcccggtctggccatcggtgtacgtgcagcaaccgaagccatcaaacggttgaatctctcttttagtgaagatgaggaagtagtttgtgtgacagaaaatgacgcgtgcggtgtagatggcattcaagcgattttgagctgcacagcaggtaagggaaatttaaaatttcgcgatacgggaaaaatggcattctccttttttaaccgtaaaaatggacaaaaagttcgtatgtgtctaaaaccgtctcaagcagatatgagccgtgaagaaaaacaagacttttttctaaacggacctgctgaagaagtctttactttttccgaaccttcgtttcctcttcccgaaaaggcaaggttatttacaactatcacctgtgaagtatgcggagaaggcgctcctgaacataaagtgcggttggaaaatggaaaaaaagtttgcttggactgttttcatgaatataaaataggttggtaaattgagatgaggtagaattatgaaacatacaagagtaaagttaacagttttcacgttagctgttgcgataatccttgcaatggtacttactgcctgcggctctgaagccggtacgcagacaaatgcgcctgtatcctcaagtacatctgattccactcttcccgcaagtgttacagacgtctacggcagaacagttgaattaccggaagaaataaacagcacagtttgtctgggcgcaggcgccttgcggatggtatgctatgcacaaggtgaagataaagtaattggtgttgaagaagcagaacacgaacaaaccttggcaaaagcatataactatttaaactacgataaatttaaagatttaccaattgtaggacaaggcggttcaggaggcaatactccttatgaagaagaaatcatcaaggtgaatccggatgtcatcattgccgcttatacacagcaggaagcagataaattgcaagcaaaaacaggtattcctgtagtatgtgtcgcttatgacggtatttttgaccctaccatggaccaatcattagaattaatcggaactttacttggcaagcaagaacgctgcaaagaagtgattgactatatgcaaacagcaaaacaagatttgaacaaccgtacaaaagatatccctgataaccaaaaacctactgtattcagcggtgctgtatcttttcgaggcggacacggtattgaaggaacctacgcacaatttcctccttttgtagcaatcaacgccaaaaatgtggtagatgaaaccggtaaagatggttctcttatcattgacaaagaaaaaatactaacttggaatcccgatattatttttcttgaccctaacaatatgcagctagtccgtgatgattataaggataaccccgatttttatcattctctaaaggcggtacaagacggaaaagtgtatacacaaattgcctataactggtatacaaccaatgtagaagttgccattgctgatgcttattatgcaggaaccattatttatccggaacaatttaaagatgtaaatattgtagaaaaagcaaatgaaatttttgtccacatgttaggagatgaagctgaacattactatcaagatttagtagacggtcaactaggatttggagaactgaacattgaagagtaatagtgcagtcacagaaaaaaagaagaaagaaaaaaaacaaaaaacatatcagcaatacatcttctacaaagtaattgttattattattttaattgtagtgttactcgccattacaatatttgcaatccatgcaggctcctcaggaatttctgtttgggacgttataaaaactatctttggcgcaggcacaaaacaaaccaactctattgtctttggtatacgtttgccccgtgttgtaaccgctttaattgcaggcatggcgcttggcatggtgggctgcgttatgcaaagtgtattgcgtaatccattggcagatgcttctacccttggcgtctcacaaggggcagcatttggtgccacagtagctattatctgttttggtgccggagcgcaaaatacagcttctgctgcaaatgcagttaacatcagcaatccctacttggttactttatgtgcttttattgggggcgctatttctacccttattattttaggactttcccgattcaaaaaaatttctcctcaatctatgattttagccggtgtggctttgagtgctttgttcagcggcggcactacattaattcaatattttgctgacgacgttgaagttgccgccgttgtattctggacatttggagatttggggcgtacaaattggatcgaaattctcattatcgcctgtgtcagcattgcagcttgtatctactttatgtttaaccgttggaactacaatgcatttgaaagtggaggtcaaaccgcaaaaagcttgggcgtcaatgtaaacgtggtcacttatgtgggtatggcagtgtgctctctggtagcttctgttgttgtagcatttgtaggtatcatcagttttgtggggcttttggctcctcacattatgcgcagatttatcggcaatgactaccgcttcttactgccaacctccgcattaaccggagctgtattgttgttaacggcagatacttttggtcgtttaattgttgcccctatcattttacccatcggcgccattacctcatttctgggcgcgcctctatttctttatttattatttaaaggagttggaaaagcatgatagaaatcaaggatatcgaattcgggtatcgctccaaaaacattttgcataacatctcttttgatatgaatgaaggacattgtattgcaatactgggagtaaacggagccggaaaaagcacgctgataaagtgtttaaatcgtattaatccggtacataaaggggctgttatgatagaaaacagcaatatattacagattcatttaaatgaagtagcaaaaaagatagcatatgtggcacaaaaaaatgaagtatccaagttaacggtatatgatgcaattctattgggcagaaaaccatacatcaaatgggatgttacaaagcaagataaagaaattgttgaccaagtaattgaacaactggaacttcaggattataaaatgcgttttttagatgaattaagcggcggagaattacaaaaagtaattgtggcccgcgcattggcacagcaacccaagctgttattattagacgaacccacttctgctttagacccaaagaatcagtacgaaatgttgtctttagtacagaaaattgcacagcagcatcagattgccgttgccattgtcatacatgatattaatttagctctgcgctactgcgaccgctttctttttattaaggatacggaaatatattcttatggtggtattgaaacaatgaccgcagacttaatcgaagaagtgtatcatatgccggtggcaattgaagaatatcatggcataaaaattatgattcctcacccaaatcaatttctttcacccactgttatgaaatcttgaagataaatcgtttgatagagaagcactattgtatcaataataaatgtttattttttctcaataaataaacaatgataaaaattaatcaataaatattatacaaattaaaataaatcctttatattataaatgagaggtaacttagtgataaaaacaggcaattcatatgtaaattgctgaaatcaacattataattcctcggataaattaatttcttttcc

SEQ ID NO: 2857 - DNA, 13455 bp, Unknown
  16S sequences of unknown bacteria
agtacacggaactcatcttcccaagttatggtgtgcgctttatcgccgtcaacgacggcgtggacagcctgtacgagtccaccaacgacttcacacccttccggaatctgatgaacgagttctatgccaaggactgcagcaaaaagggacgctccgtggttcgtctcaaggctgagactggtgccagagtctcctcccgtccccgctatgggtatatgaaagaccaggcggatcccaaacggcacatggtgcctgatcctgagactgctccggtggtgcgttacatctttgacctctgcgtttccggaaagggtcctgcccagatcgcaaagcagctcaagaaggacaaaatctccacgccagggcattcctactaccagaagcatggagtggagctgaccggagtggacatcactcagccatacaactggtccaccaacaccgtcgctggcattctggaggatgagacttacctgggtcacaccatcaatctgaaatccaccaccctgtccttcaagaacaagaagcgcattgaacgtccggagactgcgcagctccgctttgagaatacgcacgaggcgctggttacgcaacagacctgggagatcgtacaggatatccgtaagcacaaacggcgcagagcaaacatggccgagcaaaatatcttctctgggttggtttactgcctggactgcggaggcaccatggtactgcaccgggcgcacaccatggatgcggtgaaaaacaacttcatgtgctccacctacaagaagaaaggcaaagatgtttgctctgggcattacatcagagaacaggaactcggtgccatcctgttggatgatatccggcgtgtcacgcactttgctcgtcagaatgagctgcggtttgcagagcatatccgcaagaagcagggcaaggaggcgcagcaggagattgcagtgctccagaagaagatcgacaccatgcagaagcgccaggccgagctgaccaaactcttcaaacggctctacgaggacagcgtccttggccgcatcccggacgagcagtatcgtatcctctctcaggagtacactgccgagcagaaagagattcaagaacagctgcctgccatggaagtaaggcttcaggaactgaaagactccagctccaatattacccggttcattgagaacgccaaacggtatagcgagatcccggagctgaccgctgagatcctgcgcatcttcatcaagcgggtggaggtcggagagcgtgcggagaaatactcccgcacagcaccgcaggaggtacgcatctactaccgtgacattgggctggtggatgaactgcctgagaatgtagctgattctttgaaagaagaaatcccgaacgaggtcgcataagcagaaaagggaggctgtgcctaaacacagcctccctccacaggaacaaaaattaagttatatgggtaggttcacaaattgtccttatggaacgccggagaagtcgtctcgtttttattttatctaggtaaatcagccaaaaaagcatcgtgaattgcggcgaccgcacgggtagaatcctttgagtcaatcaaaaccgaaattttaatttcactggtagagatcatctgtatattaatatttgcatccatcagcgcttcaaacattttggccgcaacaccaggattgctctgcattcccgcccctacaaccgacacttttgaaatatcttcagaacactcaaccgactgaaaatgaagcacgtcctttaaagaattcaccacttttacagcctcttccaaattacctttggaaacggtaaagctaatatccttactgccggtcctgccgattgactgtaagataatatcaacatcgatttttttcgaggccagcgtggaaaacagccggaatgcaacgccagggctatctggcaccccaacaacagaaatacgggcaacgtcgttatctcttgctacacctttaattaacatcttttccacatctgttacctcctttaccttggtaccgggttttcgttccaagctggaaaccacttcaaggtttacattatacttctttgccatctcgaccgagcgattatgcagaacgttggcgcccaaactggccaattccagcatctcatcataggtaatttcgtctaatttctgcgcattggggacaatacgcgggtctgctgtataaacgccgtccacatccgtaaatatttggcacagatctgcatgaaacgctgctgccaatgccactgcactggtgtcagagcctccccgtccaagcgtagtaatattatcataacggttcatgccctgaaaacctgcaacgatgataatattgtgtttgttaatctcattttcaatccgttctttttcaatccggcgaatacgcgctttactgtaattggaatccgttacaaaacccgcttgggaacctgtaagagaaataacaggatatcccaatttttcaatcgccatcgccaacagcgcaatggaaatttgttctcctgtggaaagaagcatatccatttcccttttggaagggttggggttaatttccgctgcctttgcaatcaaatcatcggtggtatctccctgtgcggaaacgacaacaattacatcattgcctttatcataggtatccgtaatgatattcgcaacgttaaatactcgttgggcgttcgcaaccgatgatccgccaaatttctgaacaatcaaactcatcttatgtaccccctaatcttctaacactcgagcccccacattggtaacagacaactcatgaatctgccactggtttagccccatctcatcacagccgacgcgcatttgctgtgcaaaatctgttttttcactattgacaatcgccatcagagtagaaccggcaccactgatatacatggcatatgcgccgcactgataagccaggtcaaaaacttcgtgggcgccgtcaatcagcgaaaggcggtaaggctgatgcaatcgatcgtcacaggcgattttcagattgtgataattgccggaataaagagaaacggacatcaaagctgatcgggaaaggttaaaaactgcatctttatgagatacatcccgcggcagagcctgacgggcaaacgaagttttcagctcgaaattggggatgatggcaacaaaccgcaagtcctgggcgatggcctgtttcacataatagacttttcccttttctagaacggcggtgaccaatccgcccagcaacgccggcgtggaattatctggatgtccctccagcgtagccgcaatattaaccagctcacgctggcatagagggccgccaagaagatgatttgcacctacgataccacctacagtacaggcagaagaactgcccaacccacgagccatcgggattttgttggtctggcggattttcatgcccttcataggctttccgcacaaatcataaatatattttacactttggtataccaagttattttcatccacaggaatcggtatgccgtccaacgcttggatatccagacagtccgcttcttccatttcgattgtattatacattgtaacagccaaaccaagtgaatcaaagccggaaccgatattcgcgctggttgcaggaatctgcacttttatcatatgtcctttccccttctccggttcatccgagcagtcggatttttcccagaatttttatatcgccgagtttttgttctgccgctaatgcctgagactctttcattgtaccggtcaaaaatgctgtttcatcatcgggctgacctagccgggataagtaggatacctctccaaaaagggaggcgattttttctttcgatacgaaaccacataatctgtaataaaaagcattttcatacatagaaatatcttccactgtgtctgcattggaatcttcccaagtcaaagactggctggtattcggtgatttcgcgatatgtaccacatcagctatcactgcggaagctgtgggcagcttgccggctcctttaccataaaacataacatctccggtttcatcgcccttgaccagtacaccattaaatacatcgtcaacgctggaaagctgattttccaccggaacaaaaacggggcttaccattacctcgttttttctaccttccatccttttggcccggccaatcagtttgaccacatatcccccgctctgtgcatatgccacgtcttctaacgtaatggttgaaatgccttcggtatacacttccttaggataaacatgttttccaaatgccaatgatgccaaaatacaaatcttacggcaggcatccacaccatcaacatcggcagcaggatttttttccgcatagcctaactgctgcgctaaagcaagtgcttcctgaaaagtcatgcgttctttgatcatcttggtgagaataaaattagtggtaccgtttaaaatgccatagacttcatcaatccggttggccgcaagacacaaatgcattggacggataatagggatcccgccgccgacactggcctcaaaaaagaagtttacatttctttcttttgccaaagtcaacagttccgcacccttttcagccaccagttccttattagaagtgacaacgcttttcccctgctgcaaacagctcttcacaaattcataagccggatgcagccctcccattgcctctacgacaatttgaatagaatcgtctgcaacgatatcctcaaaattcttggtaaaccggtctgcataaacggtatccggaaaatcacgaagatccagaattttcgcacaatataggtcatcaccagccttttgacacagactggaagccttttcttctaaaatttccgctacaccggaaccgactacaccgtgtcccatcaatgctacttttatcataatgattccctacctccatcttttaaaggccattaatgaccggaaatgaacttgatatccaacacgccggggagtttttttgctttttccaacaactcctcttccgaacagttcatctggtttgtccgcagagaaatggatacaggagccaccgaatccaccggaatattctggtgaatggtaagaatgttcccgccactcgatgaaatttccgccattaacgccgacaaaacgcctgattcatctgccagagaagcagaaatcgtcataatactgtcactaagccgggtattgtattcgtgaataaaatctttgtacttataaaaagcactacgggaaatacctgcagatttcgccgcttccgatgcacttttggctttgccctgtgctaacagcttttttgccaatataacttttaaatacacttcgggcaagatctgagagtccaccaaaagatatttaggatgttctttcatattgtccgctcctaaaaaacgattgtctttgaacaagctacaatatatcaaaagcactgcaatatctcaatccggaaagatatggattttcaggattaaaaaacaaataacagctattttatgaaattatcttttattttagcaggatttttttgtttttcgtcggtttttatcatattttcataattttttgtactaattatcttttgtttcatatgacataaccgtattctttccttattgtcaaactttctctggcataaatggaagaaagaaatgcaaattaaaataaaaaagtccaaagaaaaacagatattttacagtggaagccgaaactgtattccatagcagtatcgacagatcggggggcttatgaacgcaagacagaaaaaagattttctcttatccgctgctttctgggctgtaatgctttttttaatctattttggcctaaaatttaccattcaactgttctggccgtttttagccggtttgttcctcgcttttctgcttcatcctgctgtaaattggattagccgcttttcttccgctaaaaagagcttctggtcagtagccgttcttttgcttttatattttacactgggtctttttctctggtttttatgctgtttagccctgaccggcattcaaaatctgctcaaatttctgcctcaggtgtatcaaaatcaaattgagccctttttactgttaatctcagaacattttccgccgtctaatggacgggccgcttcctccgcacaaagatctggtgaattgatgagccaaattcaaaaaacactggtagaatattctggagtagcactttccgccattagcagctggatttccaaagctcccgctgcctttaccgcatttctttttgcagttctttcatctttcatgatcgcaatggaatatcaaaatattacactatggatccagcgcaatatgccccgccctgtccatcgggcattattagacttaaaagaatttattttttccactttactccaaatgctgaaagcctatgctattctttttgtcattacctttttggaactgacgtttgggctttggttgttaaaaatcgaaaatttttggtctatggctcttttaatcgcagtggcggatgccttgcccgttgtcgggccagggattgtactggttccgtgggctattacctgttgtgtcagcggaaactattttcaagggttgggactattggcgttgttcggtattgttgcgctggtccgaacaattattgagcctaaaattatcggaaaacagtttgagcttcatccgctgacaacaatcaccgctatgtatgcaggggctcaactatggggaatatggggatttttactggcacctgtggctgttctttattttttacattggaaagaaaagcaaaattggaatttttctttcaaaaatctattttaattggcagatatatactgccgtattgcctgaataatttgtatatggaggagttgcttcatgaagaaaatcccaaaaagaagggaaaacaacagaatcttccagcgctttctcaattatatcgaaaaaatcgggaacagtcttcctcatccgattactttatttacgctgtttgctttcgctgtagtgattctttccgcaatctgtgcttttttggatgtttctgctgtcggtgaaaccattaacccctccactatggaactggaaaaacaggtagtttcagcagttagcctgctcactcgcgaaggtctttcttatatgctgactagtgcagtaagtaattttacctcttttgcgccattaggtgttgtcctcgtgaccatgttaggtgtggggttcgccgaaggaagcggatatctctccgctttgattcggcgggccattttgtcaactccccgaggaattgtcacaccaatgctggtttttttaggcgttatgtccaatattgcgtcagatgttggatatgtggttttgatccccataggtgcggtaatttttaaagcatacggccgtcatccgattgccggactagcctccgcttttgcaggtgtctccggaggattttcggccaacttactcattggcaccattgaccccatgttggcaggcatcagcacggaagcatcacatctggtaaatcctttctatactgtgcaagccactgataattggttttttatgattgtctccacttttctgatcgtagcaatcggcacttttgtcaccgaccgtattgtagaacctcgtttagcagcaccagataaaatagagccggacagtatttcccgggaaatgggagatctggaacgaaaagcacttcggtgggccaactggacgcttctcgcaattctgcttttcattgcagcttgctgtattcctgcaaattcttttttgagaaatcctcagacaggtagcctaacggaaaacgcacctttgataaacggtctgattccactgatcgctattatatttttggttccttccatcgtatttggactggttacccgtaaatataaaggcgaaaaagatgtttgttcccaaatgtcagaaaatatgtccgcaatggggagttatattgccctttccttttttgcagcacaattcataaactacttttcctacacaaaattgggaactattctcgcattaaaaggggcggaatggcttggctctgtcgcaatgccaggtcccgtcttaatggtactgttcatccttttttctgctctcatcaatctcgttatgggctcggcctctgccaaatggaccattctggcccctgtatttgtcccaatgtttatgctgctgggatattcccctcagctaacacaggtggcttatcggatcggagattcctgtaccaacctgatcactccgctgatggcatacttttccatgattgtcgtatttgccaaaaaatatgacaactcgtctggaattggcacaattatttccaccatgattccctattgtcttttctttttgctaggctggtccgctctactgattctttggatgctattggggctcccacttggacccggagcgggattactgctataacacagcttgattgccgcatattgttcctttataataaaaaaagaaaggagcgataccaaatggaacaaagtactgtgttaaaaacttttttggattacgttcaaatctccagtgaaagccgttcagaaaaaacctttgccaaacgtgtggagaacgacctgcgcagccttggactacgagttcaaacagatcatgcagctgaaaaagcttatgctaatactggaaatgtctgcgcctttttggatggcgattcttcctttgagcctattttatttagtgcacatttggatacggtaccgccgggaaaaaatatttgccccgttgtggaaaacggggtgatccacagcgctggagataccattttaggatctgacgataaatccggcgtcgctgcaatcatgcaagcattaaaatggattgtagaacaaaatattccccatcgaccgattgaagtcgcttttacgatcggcgaagaagtggggctattgggtgctaaatatttggattatacccagtttcaatcccatcatgcggtggtttttgacaatgagggcgatgttggcaccattgtcaatcaagcacccgggcatatggaaatcgcagcgaccatcaccggaaaagcagcccatgcgggtgttgctccggaagacggtatcagcgcaattatcgttgccgccgatgccgtaaccaatatgcagcttttgcgtattgatgaagaaactaccgcaaatattggaacatttttagccgaaggtcctaataatatcgtaccagaaactgtgcggatttcagcagaaattcgcagccacaatcctcaaaagctgcaaaagcactgtaatcaaatgattgaagctttagaaaatgcctgtcgaaagtaccacgccgctttgcagtatacaaccgaagtgtcatacgcgtcttaccatattccgcaaaatgatccgctcatcctgctacttcgggactgctgtgacactttgggtcttccggtatccatcgttcccaccggaggcggaagcgatgccaatatctttaacaccaacgggatccgttcggtggtggttggaaccggcatggaaaaaatccacagcgtgtccgaatatattacggttcaaaacttggaaaacacagcaaaacttgctttggaacttatgaaaatccgataatgtaagttttctaacatctttttattagtacgattccatataaaatggtcctgaccccaatggggtttcaggaccatttctatccatttatacaaagaattagaacagcggcaggaaaatgccatgataagtttcattgataaaggtttttatttccggactggtcaacacctcagacaatgccttgattgcatcgctgttttcattcccttcttttacaaccaacacattcgcgtaagtatctgcaacttcggaatttttatcttctgttgcaagcgcatcgttgagatccaagccggcctgcagcgcataatttccgttgattaccgccatatctacatcttgtaaagaacgagccagctgagcggcggccatttcagtgatttgaagatttttgggattttctgcaatgtccaaaatcgtcgcagtggttcccacaccatctttcagtgtaatcaatccgagggattccaacaaaagcaatgctctcgcttcattggttccatcattgggaatagcaatttgcgcattatctttcagattttccagtgatgtagtttttccgggatacagcccaaacggttcataatgaacaactgcaaccgaaaccaaatgggtatcgttttcctcattgaaattttctaaataaggacgatgctggaaaaaatttgcgtccagttctccgctttccacattcaaattcggcaggatataatcgtcaaattctacaatatccaactgatatcccttatcccgcaacagttcatcagccgcttttaaaatttcggaatggggcgtaatactggcgccaatccggatcgtgattggctcttcttgtgaacttttcacggagttttggtcattattttgtgtgtctgccgttgaggatacagaggtactgcatccggacagaataccacaaaacaatacagcagccagcaaaatagaaatcagttttttcatactttctcctcctacgataaaaaatctatcaaaccgcttttgcggtaagaaacaatatctaccgggaacgtttgtccccccgtgtggcaatacgccaaccaatttcctgaaagacctgaacaatcaccaccagcagcagtacagtgactaacataacatcactttgataacgataaaatccgtaattaatggaaatggttccaaggcccccgccccctacaaagccagacattgcagaatatcctaaaattgtagtcgtagcgatcgccgcattgagtatgagagagggtttagcctcaggcagcaaaacctttgtaacgatctgccacggacctgcacccatggactgcgcagcttcaaccacgccacgatccacctcctttaaagaggattctaccattcgggcgacaaagggtgctgacgccaacacaagcggtacaatcgttgcagtgcttccaactgatgttccaaccagaaaacgggtaaaaggaatgactgcgatcaataaaatcaaaaagggcactgacctgacaaaatttacaatgaaacccagcgccccatttaaaaatcgcataggacggatcccgttcttatcggtaagaatcaacagaattcccagcggcaggccgagcacatatgccagcaaagaagaaacaatcgtcatatagagcgtttcccaaataccttgtgccagcaagcggatcatctctggattaaacatcagcaacttcctccttaaaataaaggttccggctggatagataagcatatattcttctttttgccgtctcatcatccggcagctgcaaaagcatttgaccatatgctttcccatcaatgtctttggtgtctgcaaacaaaatgttgaccgctgcgccacaagtcaacaccatatttgatactaccggctcaaaagaagaacttccatcaaaaacaatacgcaagcatccccttttttgaaaaacagtttttcttctgccatgaggataaattaacctttttgcaatatcagaacgggggttgacaaaaatttcctctaccattccgcattccgctacacgactgttatccaaaatcgccactcggtgacaaattgcttcaatgaccctcatttcatgggtaatgataacaatcgtgacgccaagtttttgattgattttctgtaaaagcgaaaggatagactgtgttgttgtcgggtccagtgcactggtcgcctcatcgcacaaaaggacttgggggttagttgccagcgcacgtgcaatggctactcgctgtttctgtccaccggaaagctgtgctggataagcctgtgctttatccgagattcccaccagttctagcatttcctttgctttttctttcgcctctttttttggaacccctgcaatttccaatggaaaacacacattgctcagcgcgtctcgctgcatcagtagatgaaagccttgaaaaatcatactgatcgactgccgcgcctttcgcagttctttttcactcatgtttcccaattcttttccatcaaaaatgatggtccccgccgtaggcttttccagatagttcatacatcggaccagtgtacttttcccagcaccgcttaaaccgatgattccaaaaatttcccctttctcgatagaaaggtcgattccatccaatgcggttacagtattatgatcagatacaaatgtttttttgaggttttggattcggataatctcattcattctttttgccccttccgaaagaaaattagacaacaaaaagctcccgtcctttttcaaggacgagagcaaaacgcttcgtgttaccacctgaattcacctgccccttacgggaacaagcctctgcaagtacggactcttttagaatcgataccctgacgctgtcacgggcgcacccgtcgcagcctatgcgaaaaaacgcagtcggtgcgaagctccaagaccatgttcggcaatgctgtttgtaccctttcacaccaagcagggctctctgtgacgcctttcattgcttactcttcttttcaacgcttttttcctatgaaattgtattcaatatataacgattcatttgatttgtcaaccccctatggaaaatttcttcctaattctctccctgaactggtaattgaaatgagatttcttcctgctttctatcttttctttttttgtgtttaaaagagatcgcaatagaggacaaaatcggcacggcagcacaatacaatgcaatttctcccatttggcgccaggtcaatggtgcagtttgaaataacagattacaaattggaagatgaatgctcaacgctaaaatcaaagtggaaaatgcaactgctgcaaccagtttccagttatccagcaaatttattttaaaaatgcctacttcttctcttttacactcaaatacatggataagctgtgtaatcaccaatgttgccaatgcgccagttctggctactagcaagttttgactactgtggtaaaaagaagtaaatactgccaaagtggtcaatccaattaaaattcctcggaatacaatggtcgaaagtaaaccgtctgagaaaataccttcctgctttttgcgcggcggcttttgcataatatccttttccgctggttccaaccccaaagcgatggcaggcagcccatctgtgactaagttcacaatcagaatctgtatcggcagcaaaaccacaggcatccccatcagcatacccaaaaacatggttacgatttcaccaatattgcaagaaagcagatatcggataaatttacggatatttttgtaaataactcttccttcttcaatggcgctcaccagtgtggcaaaggagctgtccagtaataccaccgaagcggcctccttggtgacgtccgtcccgtttcccatggcgacaccgatatctgcttctttgatcgcagg

SEQ ID NO: 2858 - DNA, 9283 bp, Unknown
  16S sequences of unknown bacteria
tagtcgagcgggcattgcgcattttttgtttaccccctttcctctttgtaaatttttcgttataatcaatgtagcagtcctgcatgggcggcgacaaccaaacaccgaaaggggaagaagacgatgaagttcaccagttttctcaggcagagtggggaggagcgcacccgcaagatcctgacgggaggggtctatggcaccatgctctttttggccgtgccctctttccttatgctcatttcccaggcattggccaccaccttcgacaactggttcatcctgaactatgccgatctcagttccagcggcgccgtctcttacagcatgcaggctttcaatgtgatctacaacgccggcatcggcctttcggtggccggtaccgccatcctgggccgcttcaatggccagggggactgggaacaaagccgccactatacccggcagtttctggccctgatgttctgcctttccgtggccctgggcggtctgaccttcctgctttccggcttctatgccaatatggccctgcccgatctgcgccccggcgtgcgcctcgccatgcggctgtatgccttttccattcccttcgcctatttcaacaacgcctactacgctttgaaaaacgccgtgggcaaatcggaagtgccctttgccttcaccttcctcatggtgtttaccaaggtggtctgcaatgccatcttcgtggcaggcatgggcctgggggttatgggcatcggttttgccaccatctgctctcatctggtggtctccctggtgcttttgttcgatgtgttcttccgcaaaaatggcatgcacctgtccttccggcatttccgttttgacaaggacgccatccgtaccctgttgaccgtgggtatcccttcggtgatcaacaacatggccatgtcggtgggcttctggctcatcaacctggaagccatgaaattcggcaccaccctgctcaattccatcaatttggggaacaatatctccagcctgatgtataacctgaccagctgcttcggcaccaccgttaccaccgccgtcagcctgaacctgggcgccggtcagaacaagcgggccaaggcctcggccgtggcctcggtggtgatgagcaccatcggcggatttttgggcatcgccatcatctatctgttcggcgagcccatcacccatctgtttaccaatgcaaaccccgaggtgctggaaggggccctcaccacccagaagatcgccgttctgggcgcgcccacctttggcgtgtgcagtgtttactgcggcgtgtttatcggctttgcccgcaccaagctgcccattgccatcaatgtggcccgggtgtggctgctgcggtatgtgtttatccgggtggtggaaagccagctgttcctggagaccatcatgggaggccggattcatatcaattacaccgtcatcccctgggccacggtgttcagcaacacgatgaccgctattttcgcctatgtggtgtacaagaccctccgctgggagggccagcacaatttcattgtgaaaaagtcccatagagccaaagaaggagttaagaactgatttgaaagaactggaaaataacaacaaggccgggatgcccggcgaaagccgtccggagcgggcggcactggtggggctgcggtgtaccgccctcgccgattttgatcattccgatgaggacaccatggaagagctgtcccagctgttggagaccgccgggggagaatgcatcttcaaggccatgcagaaccggcccacccccgatccccgcacctttatcggggaaggaaaggcccaggagatcgcccagctggtgaaggccaacgatgtggaacttctggtgatggacaacgagctgtccccctcccaggcccgggccttggaggacatcatgggctgccgggtgatggaccgcagcggcctgattctggatattttcgcccagcgtgcccagacacgggaaggcaagctccaggtggagctggcccagtaccagtatttgctgcctcgtttgtcgggcatgtggacccacctggtgcgccagaccgctgggggcgggcgcagccccatcggtacccgcggccctggtgaaacccagctggaaaccgaccgccggcacatccgccagcgcattgcccggctccagcgggagatcgagaatgtgcggcagatccgctccacccagcgccgtcagcgggaaaagcgggaggtgcccttggtggctttggtggggtacaccaatgcgggaaaatccactttgctcaacgccctcacaggggcggaagtccatgccaacgaccggctgtttgacaccctggaccccaccacaaaaagcctgcgtctggaggacgggcggcagcttttgttttccgacaccgtaggattcattcgaaagctaccccatcatctggtggaggccttcaaggccaccctggaagagctggtctatgccgatgtgctcattcatgtggtggatgcctccagcgagatctgggagagtcaggcccaggtggtggaaagcctgattgctcagctgggcgcccaggagacccctcggattctggtgtttaataagtgcgacaagatcgccccggacctggagccccggcagacgggcgcgctgcatatttcggccaagaagggcattggcctggatcggctgcttagccggatcggggagaccctggacagtgcccagcggcaggtggagttcattttgccctatgaccgggcatcggtgctggatatgctctatcggaaggcccaggtgaagaaggccgattatgtgcccgagggcattgcggtcaccgtgctctgtgacgccgccgtgctgggacagctgaaagagtgggtccccgactggcggaagaaagaagaatgggaagagtgagccagagcactagagccagagcctttgctgcggcaaaggctcgcaaaagaaacaggcccagtggaaactttgtttccctgggcctgtttctttgctattggcggcgtgttattttgcccttcggcaaaataacgagaaggtcggaagcgggcgccgccgctggctctcggggaaaaactaagtttttccccgacccttttcgcgccccaggcgggggtccggcggccggacggccatactgcgctgccgcgctaagcaatagaaccaaggctggttgtatcgaatcaggcaaagagaggaatggctgtccggacaccggacctagagtttgatggattggatgcaggggatggagctgagcaggttgagcacctggggaagggagaagccggtggggaaggagacatacagctccaccagcaggaaatcctgctcctgacgggcaatggtgtagctgattacctggatatggttgctctccagagcgcgccacaaggtctccagcgcggcctcattccagatcagccgggcggtgagccgctgggccataggggttttcaccaggctggcgcttttggagggcagggcatacagcgcggtcatcagcagggcggcgaaaatgcccaccacatacatccccgcaccgatggccatgcctactcccaccgtggcccagatggccaccgccgtaggcaggcccaccaccgtttgcttgtgtacaaaaatcaggcttcccagaaaaccgatggcggtcatcagtccggcagctacccgggaggggtccagaccgatgccttcctggggcagcagatcaaaaaagccatatttggaaacgatcatcagcaaagaagcagaagcggcgatcatggccaggctccagccccctgccaccaccgggccgcgctggcggccgaagcgcagcagaaacccgcagcccatggccagcaggatccgcagcaggtattccccttgttccagccagaatgccatcatggacagccctcctttttcacaaaaaaggttgtgaaaaatacctatgtaacttgggagaattatagcacaatctggtgaaaataacaaggagagccagggaatttttccctcaggctaggaaaatgggccgggatgtggtatgctgagaaaaagagcaaagggaggaaatacctgtgagttatttggacaaggcaaaggcgctggaggaatacatggtcaccatgcggcggcattttcatcagcacccggaaaagagcatggaggaacgggaaaccaccgctttcatcatggctcggctcaatgagatgggcattccccatcggaagctgaacccctccggggtggtggccgagattccgggaggccgtccgggcaagacggtggccttgcgggccgatatggatgcgctgaccatccaggaggaaaccggcctgccctttgccagtaaggcggaagggctgatgcacgcctgcggccatgacctgcacatggcagggctgctgggagcggccaggctgttgtggcaggagcggcagagcctgggcggcaatgtgcgcctgatcttccagccgggcgaagaggtgggcaaaggcgccaaggccgtcatcgagcaaggcggtatggaaggggtggacatggtctttggcatgcacaatatgccctctctgcccgccggaacggtggccgggtccaaaggaccggtgttttccgccgccgactatttcaagattaccatccagggcaaggcgggccatggggccacgccggaggatgccattgacgccactgtggccgccagtgctctggtgatgaacctgcagcccctggtgagccgggagatcagctccctggaaagcctggtgatcaccgtgggccagcttcacagcggcacccggttcaatatcatctccggagaggccgtgctggaaggcaccgtgcgcagcttcgatcctgccatccacgacatggtgccgggagccatggagcgggtggtggagggcatcgcccgggcctaccgggtggaggccaaattggaatatgacaaggtggccaaggcctgcgtcaacgaggaaggctttaccgagctttgcctgaagagcgccgggaaggtggcccaggtggcccctgaaggccgtcagatgatcgccgaggacttttccgagtatatgcagctgtgcccgggggcctttttcctctatggctccggctgcgagtaccccctccacagcgatcattttgtcggggatgagcaggcgctgattacggcctgcgccatgtatgcccaggtggccgtggacgctctgagccagatttagcaaaagagtacagctgaaaggggacggtgtctttgaaagaggaactgacaattttgtggaccaacggcgacccggtgacggcggaatacatggttctgatgtatgcggtcaatagtatcaagaacagctggtgggaaaaggtagagatcgtcgtctggggcggcgcaacaaagctggtgcaggaaaaccggcacatccgggaaaagttgctggaggccatggacaaaggcgtcaaagtccgcttctgcaaaggatgtgcagaggaactgggcgctttggaagagttggaaagctgcggctttgagtgtgtctatatgggcgcccctttcacagagattctcaaaggggaaggccgggttatcaccatctgaccaaagggcggagtactcgcaagcaaacattcttggcctgggcacatataagccgccggagcaaaaaaacgggagaggcggctggccgctatacccttggaaaacaggaaaaagtggaaaatccgcttttccggcagacaaaaccattccccgggagaagatcttctcccggggaatggttttttgttttttggccagcgggcagagtgtggggatcgctgtggcggaaaaggactcctataagagataagggttaaggcctgtctgcctgatggccataggtccacggtttagacagaggtttcaacggatgctgttttttagctcatttgagagatgaggttgtataaaatacctaaaaataaaattaaaaaatgaaaaaaggtgtaaaaaggggagggaatatgcaaaaattcaatagatttcctctttaattattggaaataactcttggacaaaaaaagagaggtgtggcaaaatgtcccttggtgaaagccggtttttgtaaagaaaccggtctttttacggaaaaaaagggggagagccccaaaggaagtgcagaattgaaaaacaagatggaaaacgctccggcccttcagctggatggggatgccaagggtctgtcccggctcacccgagaacagctggccgagctggaggaccgggaaaaaacaccccgggagaagttgtttgacgggattattctggccttgcccatcctgacagggattttggctctgatggaatatctgcttttgcccagtatccatgataaccccatgccctatctctattccggtcttctgatcctttttctggcgtgctataccctcgcgctctttgtgggaatccctctgcatcgccaaggaagaaaaaaaatgctgcgttatctgcgctataaggctcccctttattcggcgctgctggtggtgggaacgctgtttgatatcggcgcactgaaaacagagtttttcacttaccctctggtgccttcggtgaacagcgtcctttatgccctggtcaccgactggaaaacactggcagtcagcgccctgcacactctgcggctgatgatgagcggttatgctttgggtgttatagtggggctggccaccggcatcacctgcgggtatagccgtaaagtgcgctactggatagatcctattatcaaattcatgggccccatccccatctcggcctgggtgcctattatcatggcctttgcggccaaatccctctctttgggcaatttgtttgtagtgttcatcggcgtttggttctcggtgacggtggccagcatggccggcgtttccaatgtggatcggtcctattttgacgccgccaaaattttgggggccagccagcggcagctgatcttccgggtggccattccccacgccatgcccaacatcatggcaggcatgacccagggcatgagcaccgcctgtaccgccattatggtggccgaaatgctgggtgtcaaggccggtctgggctggtatatgacctggcagaaggcatggagcctgtataacaatatgtttgcatcccttatcgtgatcttcctgatcttcaccgtggtcaccaagatcctcaacgcctttaaaaagcgcgtgctgcgctggcagattggagtgacgcagtaatatgtctctcattttgaaactggataaagtgacaaaaagcttcgcccgggtggagacccgggatgtgaccaccgcgctttcggagatcgatctggaaatgcatgacggagagttcatcagtctggtgggcacttccggctgcggaaaatccaccatgcttcggctgatcgccggactgatcgtccccaccaccggtaccctttcggtgaacggggaagagatccggggaacctcccccacccggggaatgatgtttcagaaagctacattgtttccctggctgacggtggagaaaaatatctctttcagcatgcgtatgcagggcacctataaacagcaggaaagccggcaggaggtggatcggctgctccaggttatcggcctggaacggttccggcgggattatccggcccagctctccggcggcatggcccagcgggtggctctggcccgtaccctgatctgcaagccggagatccttctcctggacgagcctctgggggctttggattccttcacccgcatgaatatgcaggatgagatcctcaagatatggcagaataaccgccagctggccatcatggtgacccatgatgtggatgaagcggtctatatgggaaccaaagtgctggtgatggagccccatcccggccgggttatgggagagattcccatcgatctggagtatccccgcaaccgcagcagcgccaaattcgtggagtatagaaaccagattctggatatgctccactttggatcccgggaaaaggattagttccgacgggaaaatatatgagaaaaggagaaaggaacgacatgaaccgactgaaaagactgctcagcctggggctgtgcaccgccatgcttctgaccctgatggcttgccagaaggatgagggccagaaggagaacaacaacgaccagcagcaggagcagcagaatgaccaggacaattcctccggcggcagcgagcaggaggcctgggagaaggagcccgcctacggcgagaccatccattattatatgtccgacggctgcacctctggtcctctggtggccgatctgctgggctattatgaagaagccggcctgaaggccgaaggctataagggcacttcctacaccgaggccctgggcgccaacgctgtccaggtggctgtgggacatatcgccaccatgctggtgccctgcaccaacaatgtggatctgacctttgtgggcggcgcccatattggctgcaaaactttgtatgtgctggccgacagcgaatatgagaccactgccgatctgaagggcaagaagatctctgtgcccaacggcatcggcgccagcgactacaacatcactgcccgcctgtttgacaaagacggcatcaatcccctggaagatgtagagctgatgcaggtggagaccagcgcttgcctgcccgctatggaatccggcgagatcgccgccgctctgctgtccgacacctatgcctacaacctggtgaaggaaggcaagctgcgggtggtgcgctccctgctggatgaggacttccagaccgagccctgctgcatcattgccatgaaccgctcttttgtggaagagaaccccatcaccgctcggaagatctccgattgcgtgaaaaaggcccacgactggatgcgggaaaatccggaagaggccactcagctgctcattgacgaaggcctgaacagcgatgacttcgacatgaatgtggagctgaaccagtccctccagttcgggcccaccaacgcctttaccggcgcaggcctggagaagatcgtggatgactacatccgcctgggtctgatcacttccactgacgacgccgcagaagtcatggagaaggcctggcatcctctgggagacgactccctgggcaagactccggaataccggcaggcctggtttgagaagatggcccagtaaagcccagtaaaatagaaaagccgaatatgaaaaaactgacggaaatttttccgtcagtttttttttcgttggtgcctttaggcttaataaaacccctggttctaccaggggtaaataaaatac

SEQ ID NO: 2859 - DNA, 8378 bp, Unknown
  16S sequences of unknown bacteria
cgtagaccagcgccgtcaccggaagcgccctgcgggcgaagcggcaaaaggcgtcgtaatacgcgccgcagcaggcacccaggaggaaatagcccatccaggaggcaaagaccagcgtcctgcgccggaagaagatcgcgcccagcaggccggggccgctgcagcggggcgttaggtacagataggccagccagagggccaggcatactgcgacgaaccaccgccggtccagccaccgccgcagctgcagcagcagcggcgcgaggacgacaaactgcagaatcatgacgacgtaccaaagatgatagttgccgtcgccaaagatcagactgcggaccaggttccccggcgtcagcgggacgcggcggtagagcaggtagaagactgtccagaggacatacggcagcgccagctggcccaggcgctttttcagatacctgccgtaggaaaagctgcggctgtgaaacagcccacaggcgaatagaaagacgaaaagcggcacggcaaagcgcagcggctcaaacagcgccgcgcaggccagccgcccggcctgtccgatctccggccgccgcgcccaactgccgaggatgtgctgcagtacgacggcggtaaaggcgcaggtgcgcaggatatcccattccgggatgcgctgcctggtgggaagggaagtaggtcgatccatggggtactccttgttgctgtttggggttctttttcattctaacgaatatcctgccccatcatacggggcagaaaaaacgagagactgctgcggcacagcaatctctcgtttgggttatcttcttctcgactttgttttgtggtcggagtattgcttgagcccggcgattttacggtcggattcggatagaaaagctttgagcttttcctcaaaggagagctccccagagcgctggggctggggggccgtgcggctgcgggggaccggcaggccgggccgtgtcaggctgtgcctgcttgatggagagactgatgcggtgcggcgcgtcgactgcgatcaccttgacctggacgctctgcccttcggagagaaaatcgtgtatatccttgacgaaggtacccgcaatctcggagatatgcactaggccggtctgcccgtcgggcagggtgatgaatgcgccgaatttggcgatggattggaccttgccttccagaatagagccgactgtgaaatccataggctgcttgtatcctctcttttttattcgccgttatcgtaaaagacaatctcaccgtctttgaccaagcccagcttgtttcgggcgatggcttcgatgcccgcgcttgtctgcaaattgtcgatgctttcctgcaggacgttgttgtcctgctgcagctgggcgacctgctcggacagggcggcggattcttcttttttttgcgtgacctgattctgcagggagaccagcgtgaccgttgcgtagacaagaacgatcagaatgactagtttgaccagcagagacgacttcttgaatttcaaacgctcccgcgcctcccttctggcgaagcttgcggcggggcagagccccacgtacatacttatttaaaattataacgcgttttttgctaaaagaaaagactttttttagaaaaaagtatatttttttcgaagaacgggacaaaatgtcaaaacaccatgccagcgcccggcgaacgacccggctgcagaggagaaaatagaggctgccgccacagaccgtccccaaaagcatgaaaagatggtactgcccctggcccagatacaggcagaacagacagcacagcgccaggctggataggccaaaccagagatcccagaggggcgtcagccggggcagggcgcggcgcagggggcgaatgaggtcatagtgcagaccgagcgccgcgccaaagagggcagagctgcacagctgcagcagctgcagcagaaccgggtattccatggctcagcccagaagccgggagaaaaagccaccgccggtgcgccgcgccgcctcgtagacgatggcgctgacctgaccgtcgacctcgaccttgccgctgtccagggcgcgcagatgcaggccttcgccgcggatgatgagggtgtcggcggctgtgtgcaggatgacggcggcctcatcgaagctttcgacctcggtgatgcccgtcaggtgcagctgctggcgattttccaggctcagccggtgggggagcgagagagcggtctcttctggcagttggttcatgctggttcctccgtcatgtttttggcgcgatacgaaaagcggatcctgtccttcgattcaggatcggcattactgcattgtatgcgccagggacttctgccatgcggcaaatttaactgataccataaaaatatttatttttgggactttttttaatatcagttttatgatataaccgagaggacggatcgaaagcaacaaaatttgccccgggacgcggggcgcggaaaagagatcctaccacaaggaggaacaaaacatgaaactggaaaagacactgaagctgacctacaccgcgatgctgaccgctatggtctgcgtggccacgatgcttatccgcatcccgacaatggtcggttatacgaatctgggcgacggctttatcctgctgagcgccttcctgttcgggccgttctacggtgccgtcgccgggggcatcggctccatgctggcggatatcatctccggctacgcgttttacgccccggcgacgctggtcatcaagggcctgatcgccgtcatcgcggcgctgctctggaaggccatgagtaagcgcggcggcgacaaggtctggaaaaagatccttgccagcctggtcgcagagatctggatggcagctggttactggacctttgagaccctcttcttgggcgaagcgaaggctgctttggcttccgtccccaataatattgcgcaggggcttgtcggcgtggtgcttggtatggtattatattatgcgttaagcaaactgccgatgtggaagaaggttcaattatatgcatgaggatttaacaagccaagcaaaaaaaatcattctcgaattgatcgacgcggcaaagctgcggcggggccagctgctggtcattggctgcagctccagcgagatcgccggggtgcggatcggcaagggcggcagcctggagttggcgcaggccgtgctggacgggatctatcccgagctgcagacccggggcatccagctggcggttcagtgctgtgagcacttaaaccgggcgctgatcgtggagcgggctgtcgcggagcagcgggggtatgagatcgtcaacgcggtaccccacgcccatgccggcgggtcctttgccacggtcacgtatgcggccatggaggaccctgtcgctgtggaagagatccgcgcggacgcgggcctggatattggcggcacgctcatcgggatgcacctgaagcatgtagcggtgccggtccggctgccagatgatcatctgggtgaggccattttactttgtgcgcggacgcggccgaagtatattggcggcgagcgggccaagtacttggcgttgtgagatccggtttcgcataaaagtgcaaaaagcaggcgtcttcactgcattttagcaggggacgcctgtttttttgcgggggattttgcaatttccaaattccgacttgcaatatctgggaaaatccggtatagtagataccgtggcagaatcgcggcatccttcctggggtgcccagtgccgcccaaggaggaatggaacatgtttacagacgattattttgataaatttgtgctgccgcaggacgtcagcgatgcgctgaaaaagtgccgctgtatcgcctacgccgaaacgcaggacgagctggacgagatggtctatggtccgacccacacggcccggtatgacgttgtctaccagatcggcggcagaacggtcaaagaggcggaggtcatccgctgcaagaacggcgcggccgtcaactttatggaagactatatgcgccgccgcgaccccaactgcatggtcatcggcgacgatctgccgacggacaagcccacctacaaagagcgcttcggcacggattttgcgcctgtgcgccaggagacgctggactggctctccacccagcaggtcattctgctgcccttccgggcgggtgaccgccgctatggctatgagagtctgatgatctgcccgggcaacgccgcattcttcgcttcggctctggccaatatgcagggctttatcagcgtgctggatattgccgagccatttaagccccgctccatcatctatgttgcaccgccgttccggcacacgcattttggcggcaagcaggttgtcgtccacaatcgcagcaaggacctgcacgaggtttttgcctataatctctaccccggcccctcggccaagaagggcgtcttctccattctgctggatatcggcgagcaggaaggctgggtctgctgtcacgcctcggccgccaaggttgaaacaccgtatgagagcgagacggtatttatgcacgagggtgcgtccggtggcggcaagagcgaaatgctggaggacccgcaccgggaggacgacggtcgaattctgatcggtacgcacgtgctcagcggcgagcagtattatatgacgctgaacgaaacgtcgaaaatttaccccattgccgacgatatggcccttgcctacagcaaataccaggacccggaggtcggtaagctgatgattaaggacgctgagaacggctggtttctgcggatggacggcatgacggcctacggcaacaaccccgtctatgaaaagatttccatccaccccaagcgcccgctggagttctttaatatggacgcgatgcccggtgcgacctgcctgatttgggagcacgccaaggaatccaatggcaagctgtgcacgaacccgcgagtcattatccccagaatgatgctggataatatcgtcccggatgacgagccccaggccgttgatgtccgcagcttcggcgtcagaatgccgccgtcgacccgagagaatccgaattacggtgtcatgggtatgctgcatgtcatcccccagagcttggcctggctgtggcgtctggtctcgcctcgcgggtttaaaaacccctccatcttggatggcggtggcatgaaatccgaaggtgtcggctcttattggccctttgccacgggtaaaaaggtcacccaagccaatttgctgctgcagcagattatgtccacgccgaagacgctgaacgtgctgatcccgaaccagcacatcggctgctataacatcggcttcatgggcgaatgggtcgtccgggagtacctggcgcggatgtccggcgtcgtgaaagagcgccatgtcaccccggctagatgcccgctgtttggctatgccatgcaggacctgaagctcaacaaccagtatatccgccccacgttcctgcgccccgagacccagtccaagctgggcgaggacggctatgatgccggcgccaagatcctgacggacttcttcaagcaggagattcgccagttcctgacggaggatctggacctgctgggccgccagatcatcgagtgctgcctaaacgatggcacgctggaagattacctggcgctgacgccgatgcgtctgcctaaataaaataggtcgacctgctgcactgcagcaaagcggtgcggcaggattgcattttgtacgacaattgcgaacgtaagcgctaataacggaataacaactgaacagtttggataatttcgtcatgaataacagatttttcgtcggcaaaactgtcaaaaattgtcaagcttaccctatggattccctattcgctttgtggtattatataactagctgagatgagaaatcgcagcggaggcgaatcacttctgccgtcggagatgttggccggtggggaacagaagtatatattttacaaatatggaggatgcaaagaatgaccggtaaagaattgatccaggccacttatcgccatgagaagaccgagcgcccgccttgggtgccctatgctggtatccatgccgcaaaattcaagggctacaccgcaacggagattctgaaggacgccgacaagctcgttgagtgcctaatggaagtccaccgcctgtaccgccccgatggccagcccatcgcattcgatctgcagctggaagctgagatcctgggctgtgaactaatctgggccgatgacaacccgcccagcgtcacgtcccaccccctggaaaacaccgaagagattcccgacaaggtcgtcggccccaacgatggccgtatcccggttgttatggaagcggcccgccgtatgtataaagcagtcggcgatgagacggcactgtatggcctgttctgcggcccgttcaccctggcttcccatctgcgcggcacgaagctcttcatggacatgaagaagaaccccgagcaggtcaagaagctgatggcattctgcgttaagcagggcaaggccatgatcgacatgtacgccgaagctggctgctgcatgatcgctccggtcgacccgctgatttcccagatctccccgaagcacttcaccacgtttatgtctgagccgtacaccgagctcttcgactacatccgcgccaagggcctgcagtctgcgttcttcgtctgcggcaacgcaatgcggaacctggaagtcatgtgccagacgcatcccgatggcatctccatcgacgagaacatcccgatgacagctggcaaggagatcaccgacaagtacaacatcaccatcggtggtaacatcccgctgacgacgacgatgctcttcggcaaccagcaggataacatgaagtatgttgtcgacatggtcgacagtgtcgatccccggaacctggtcatcgctccgggctgcgacatgccgtacgacgttcccatcgagaacggcatcgccgtcgcagaagccgcgagagacattccgaagttccgcgagatgctgaagaactacgaatctgttggtgacgacttcgaagttgagatgcccgactacgagcacctggagaagccgctgatcgaagccatgaccctcgactccgtccagtgcgccgcctgcggctacatgtgggcgaccgtcgaagacgccatcaaggaatatggcgacaagatcgagtgccacgagtacaagtactgcacccgcgaaggcattgcccgctgcaagaagatgggcgtcaagcagctgccgtccctgtacatgaatggcaagctgtactacgaatccatcatccccggccgcgacgaattcttcgccgagatcgacaagctgctgaagaagtaatttaatcagcaacacgataggacgctattgggcctgctccatttggagcaggcccttttttgcgtgcttttcgcttgtcaagcgggagaaagcatggtaagataacagaaaagagaacgatttgacgttcgccgtctgcgatgcagcatccagcggcgcggaatacggcgttggtcgccggtgggaggagacagcatggagtttgatgcaaaaaaagtgacatgcgagattgtcgcatggattcagcgttggtttgcagagaacgggccggactgcaatgcgattgtcggcatctccggtgggaaggacagctctgttgtcgcggcgctgtgcgtgaaggctctgggccgagagcgggtgctgggggtcttgatgcccaacggtacccaggcagatatcgacgtcgcccgggatctgtgccgggtgctggagatcgggcaggtggagatcaacattgcggacgcctatgcggcgatgtacggcacgctggatgcagcgatgcagggcgtgacggagcaggcccggtgcaatcttgccccgcggctgcggatgacggtcctgtacggcgtcgcgcagtgccgcaatggccgggtggccaacacctgcaacctctccgaggattgggttggctactcgacccgctacggcgacgccgccggggattttagcccgctctcccatttgacggtgcaggaggtccgcgccgtgggccgggcgctggggctgccggaccgctttgttgacaagacgcccatcgacggcctgtgcggtaagacggacgaggagaacctcggcttcacctacgctgtgctggaccggtatatccgcaccggcgtctgtgaggatacgcaggtccgcgccgagatcgaccggcggcatcgcctgaataaatttaagctggagatgttccccgcctatccgtacccggacggcgtggtacacaatttctgatggcggcggagcagaccgtcgcggcggcgctcggcattgagccggggttgtgcgcgatcatcggcagcggcggcaagacgtcgctgctgctgcgtcttgccgaggagctgcccgggcggg

SEQ ID NO: 2860 - DNA, 2574 bp, Unknown
  16S sequences of unknown bacteria
tgaaatacttttcatttaccatcatctgatctatatgtggtgcggtacagcagcaaatgtttctttagattgttaggcggatatcgatacaaccatcgcagagatgaccggttgtcagctccgccggcatcggatcattatagaaagactctgccccatatatcaggaaagaaagaggaaccagatggaagattaaaatcggctaaactcagataccgtcgccatgcttcgggccgacctgtatgagatccggctgatgcaaaatccatatgatgcggcggttgggtgagccaaagaaacaggattgggagtgattacacggaaaatgcgccataccacattgcgcaacagtggtacggcgcatttttttagttatcgggctgcatgactgtcagccgagtccgtaggtcagcaatgaaataccacaggcaagcagactgactgccgagccaatcaggagctgcggcagggtgtggcgtgacagcttcgaagaggatcgatagaccgctgcgatcagcagcacgggcggtataataaaaagcggatgcagcttccacgtcagcagaaacacaggtgccgtcgtgctgcaggcatggccgcttgcgtgcagcctgaaaacggcgttgagaatcagcagtgctgcgatggaaatgacataggagaggaatagaatgtggacgagccaggagcacggggtcagtattgaccagagaaacccgcacaggtatccgatggcactgcataccagcgccgtgctgcgctgtccctttctccgatcctttccaatgtgaaatatctcccgtataggatatgcagccatggggatgagcagcaaaaacaactcgcacaggagcagctcccgcagtgtcaaaagatttgccgggacatacatcaggagcactgttatgccaatgacgatgggtggtagggttagaatgcgcacgatcagatgaaagattccggcacatcttcccttttcgttggttgcgtctgctctcatgactcaaagcccagcataatcccgccgcgctcggcgtaatagctgcacagtccccgcagtggatagcttctcacgtctgcctctgggaatcgctgccggatctcggcgcaaagctccagcgcaagcgccgcattctgacaatgcccgatccgaaccttcccgcccttgtagccaagctccaccatttcgtccagcataaactgccgcactttacgaaccccacggcattttccaagcatctcaagcataccttcagcgctggcctgcccgatggcgcggatcccgaggacgcttgccatcgttgcggcgagcttgctgacacggccgttctgtgcaaggttgtgcatggattccagtgcaaaaagcaggtgcgtgtggggctgatatgtattcaatgcttcgcacgctttatcaaagtccgcatgagaacgcagctcatataaagccctttcaatgagaagggcgatttcgggcccggcggagagagagtccacaacatagatgcgccgggccgggttgcgttcctcacaatttttctttgccacgcaggcagcattataactgcctgaaagagcgctggtaatggtaaaggcaatcacattgccgctctcaccgaatgcgctttcccagtctgcaatgtttggacacgcactgtaggaacgccctttggtgtcgcggagcgtactgaccatcgcgtcaacatcaagattggcgtcatcgtaaaactcctcggcgtcagtgcgtattgagagcgggacactgacgaagtccgctccatccagtgtgagaaggtcgcagctggagtctgcaacgatacgaaactgattcatggtgtgtcctccgaataacaagaaacatttcaaccgactttgaaggccgacaccgaaattctatcaggtttttatcattccgtcaacggttttcagaaaaccgacaaaaagattttaaaaaccgttgaaagattgaagatacccgtgtataatggccgcatggaaaagggagtgaataatatgatagaggctattgagggctttcgcttaccgcggtatacacagattccggatgtcgggctttatctggagcaggtggtacgctatgtcaacacacaccttgcgccgttgggggagccggagctgacaagctccatggtgagcaattacgtgaagcaggggctgatctcatcccccataaagaagtcatacacagcggagcaccttgcgcggctcctgttcatcgccgtagtcaagcccattgtcccgttggaagggcttcgaatgatgttcagcatacagggggacaactataccctcccgaccgcatatgactatttttgtgacgagtttgagaatatgctcggcgcagcgttcggcttagctcccgcaagagagggcctcggcgagacacaatccgacgcaaaggatcttctccgcaacacgatcgtggccaccgtcaacaaggtctatctggatcgttatttggaagaatatcaaaagcagcgggaaaaagccccagatgaacagcaaacatgatcgagaatatttcgctacctcgttccgccaaaggagctacactac

SEQ ID NO: 2861 - DNA, 31163 bp, Unknown
  16S sequences of unknown bacteria
acatcatcggcggaaatctccctctccgccgcgctgtccgcgaacagctttccgcagagcctgcattcgtaatgttcaacgtgcccgtccccggtacacgacggcgcggcggcggtgaccaggcgaagatcgtgcgcaccgtccttcgacgggattataagcgaagaatactcgaccggggtcgttgtgtcatccgcatcgaagtatgctccgcattccgtgcagcggtagtgcgcacgcactccgtccgcgacgcaggtcgcgttcttccgaggtacaagctcaccgagcgtgtgcgcggcgggaatttttacatcatcggcggaaatctccctctccgccgcgctgtccgcgaacagctttccgcagagcctgcattcgtaatgttcaacgtgcccgtccccggtacacgacggcgcggcggcggtgaccaggcgaagatcgtgcgcaccgtccttcgacgggattataagcgaagaatactccaccggggtcgttgtgtcctccgcatcaaagtatgctccgcattccgtgcagcggtagtgcgcgcgcactccgtccgcgacgcaggtcgcgggaatcccttccgtcctctccaacttgtgcgtgtgcggcggcgtcacgtccccgatcccgcttatttcaaaccgaagtgcgccctcggacatttccgtgaccgttatgctgatctcatcggtaatatttatgctctcgccgggcgcgatcgcggcgtcggacttcgtcgaatatatgccgcccgacacaacgacatattcactcgtaccgttcagatttgacggaaatcttaccccgcttttcgctagataacagacaagcccgctcttcagcgtctgtccccttataagctcacccgtcgcgcatgagtaaagctcctttgatttcgtatcgtacctgtttgcgcttccctcaaagcggcggtattcgagatacagcgtcttcccgcgctccggaagttcaagcttatatcccaccgtccccgacgagtgcggcgaggacacatcaagcgaatacgagccgtcgcacgaaagagtgaggatatcgtcccccgaaaggaacccgagggcttcgcgctccttcaccgaaataaactgtacggcaggcgaaagaggcttgcccatagcagacatgaaatagacctcgctcgataaatcggaacggtacagatccttcaagccgaacacatgaagcgtctcatggcatattttaccgagagatgcgatcggaagagcatccgcacctttatacagtgccgatcttccgtcggcagtcatatacgataaagtcagttgaacatattcgctgcttatcagctcgcctccgtctgtcgaaatgccgacaaaaggactgtaataatgataatcccaaagaggggagctccatcctacactgatattttgtacggtaggcttgtatatcaccgtaatacagtcgattttgccgtctccgtttttgtcaagttctcccgcatcatagacctttccgcttatgtcggtcggcaggtttccggcggcgattgcatcattgaccgcgtccgcccaatcctcacgaagctccgcaattcgcaaattctcatatcccgcttcgtatccgtcggggttaaaatcgtctttttccgcataataccctcgcggtcgagacagggtgaccgatcccccgttgtcaagcagaaacagcgtccgcatcttcagttttccgttggatatcgcgccgaaataatccctcaccgaatatccggcgcggttgtatgtgttgtctatgatctgagcgacagtcgcgccctgatacacgtcgtttgcgaattcttcctcaccgctgaatttcgcaagtaccacaaggttcgtgaaattgtactccgtatcgtcctcgtcggggagcgcatcaattaacgaggtaagagccttgatccgcccgacgtagtttccgatcttcgtaaagccgcccgatgtgcccgcatatgacagatttctgccgtttttttctcccagacggatcttggcatttccgtccgttattcggacaattaccgaaaaccactctccctttgaaagttcaaccggagtgtcgagagaaacggtaacatatcctccgaaatcaaagctctgagttttctttgccgcggattttcccccgtccgtcggcggatttgctgagccgaaaggatcggaaagccctgtaaaaacctcaacttcaactgtataggagtttccgctgattcctatatttacggctttcagcacctctgtttttccttcggcttcgcttcccgcggctcggtatacgtttgcgacaactctgtcgtttctgagcggaaagtcgttgattgcgccgtcgtagcagtagttgcggtcgtacttctccctcagcgagtacgaaaaggcatatgtatatgaacttgtattgtcatatgaaatataaaaatacggatatccgtccggaagagaggaatagctgttttttatcagccagccgccgttccgggacgcgccccccggcgcaaagctgtccgcgggaatagtgtcgtcccagccgatgatcgtacaggcatgaggatacgactgactgccggtctcgtttttcggattgtagtaatatatgttcgacgcattattgtactggaaggtaaccgctccgtatttcgctatcgcccgctttattgtttcaatacgcagctcggggttgtccttgttttcgggaatgttaacggcgctttcaagcctgtattcggaattttcaaagggatcgacggcagcggattttccgctgacggggccccaccagagagaaaagagggttgctatcttcgacggattccccgtcgccgcggtgaaatctcccgcgatgtattcgccatcggtgtttccgagagggtccgatgcgcggtttgaaatgcggtaagcggcagcctgcggattcagattcagattctcgggcgttgccgacgggttgattccggaacgcagaatcgaagtctccgatgccgcaaccgaagaatacgcccagcagagatttgtcgatccctgatccttaacgggagtaacaattccgtaatctcgtccgtcaaatttcgacatcgaagcaatcgcgtcctcggaaggaagcgcgcgatattcgcctccccgttgaccggctctctccggggcagccgtaacgaccgacggcaacagcgtgccgacagccaaaataacacagagtgataacgaaaggattcttctgcagtttttcataagaccctccttaacggcattgccgcgcgctgaccgtaccgaccgcacgccgaacaaaccgacagtaaatcttccgattagattatacaaaattccgacggaaaagtcaacaggacacggtatgacgttatgtttgaacttgcacgttatcttaccgtgtccgcgagaatggcacggagtgtcattctccgaagtataactaaatccgagcgcggtatgacgttatggctgtaactgtatgttatcttaccgtgtccgcgagtttagcgcacagcgctaaactccaaagtgaaatcgatgttgagcacggtatgacgttatgtttgaacttgtacgtctgcttaccgtgtccgcgagaatggcacggagtgccattctccgaagtataactaaatccgagcgcggtatgacgttatggctgtaattgtacgtcaaattaccgtgtccgcgagtttagcgcacagcgctaaacaccaaagtgggactgagatttaacacggcgttcttccgaatgccgtgtaggagcattatatgttggggttttaccccaaaccccagcgggggtttcacccccacacccctgagcggggacgcccccgcgggcaaaaggacacggattacagaactcgcaactgcacgtttgcttaccgtactcgggctccgttttcggggacacggtaagtaaacgtacaattactatttaacgttataccgtgtcctgtcaacctcggttttactttggagaatgatgctctgcatcattctcggggacacggtaagataacatacaattacaaacttaacgttataccgtgtcctgcattgcgttttccgtcggaatgtggtatactttatcggtaaagtaacatgaacggtacaaaggaagtgtgtctctcagatgaaaaacagctttgacgtaatcgtcgtcggcgcgggtcacgccggaatcgaggcggctctcgcctgcgctcgccgcgggctctcgtgcgcggtgttcacaatatcgctcgacgcggtcggaaatatgccgtgcaatccctccgtcgggggaagcggaaagggtcacctcgtcttcgagctcgacgcgctcggcggcgaaatgggctacgcggcggaccgcgtgaccatgcagagccgcacgctcaacaccggacgcggcgcggcggtgcgctcgaagcgggtgcaggcggaccgcgccgcataccgcctccttatgaagcacacgctcgaaactcaggaaaatctcacccttgtgcaggcggaggtcacctccgtcgaggtcgaacgctcctccggcggcagaatgcgcgtgtgcggcgtaacgtgccgccccggcggatacatgagcgcgcgcgccgtgataatctccaccggaacgtacctcggcggactctgccacatcggagacatacacacccgctccggtccggacggaatgctccccgccgaagggctgaccgcgtccctcgcggagctcggcgtatcgctgatgcgattcaagacgggcacgccgccgcgcattctccgctccaccatagatttctccgtgctcgagcttcagccgggcgaggactgcatcacccccttctccgcgcgcaccgacgccgccgagctgaactcgcgtgagagcgtgccgtgccacatcgcatatacaaacgagcgcacgcatgagataattcggagcagcatagaccgatctccgctcttctccggcgtgatccacggcacgggtccgcgctactgcccgtcgattgaggacaaggtcatccgcttcgccgacaagacgagacaccagctcttcgtcgagccgatgggacgcgacactgaggaaatatatcttcagggcttttcttcaagtatgcccgatgacgttcagtacagaatgctcacctcgatccgcggcttcgagaccgcacagatcatgcgttttgcctacgcgatcgagtacgactgcgtgaatccgctcgagcttcgccacacactcgaattcaagaacatcgccgggctgtacggcgcggggcagttcaacggttcgtcgggctatgaggaggcggcggtgcaggggcttgtcgccgggatcaacgcatcgtgcgcgatcctcggcgaggaagagcttgttctcccccgccattcgtcctacatcggcacgctgatcgacgatctcgtgaccaaaggcaccgccgagccgtaccgcatcatgacctcgcgctccgaataccgcctgctgctcaggcaggacaatgccgacgtgcgcctgacgccgatcggacggcgcgtcgggctgatctccgacgaacggtgggagagattccgcgaaaagagagcgcgcatcgaggcggagaaaacgcgccttgcgaaaactacggtcgcgccgtcccccgctctctcggagatcatgagcgccgcgggaacatcgccgatcaccacgggaatcaagctgtccgagcttgtgcgccgccccgagctttcatacgaagcgctcgcgcccgtcgatcacgaccgtcccgctctcagccgggatgagtgcgcctgcgtccagaccgagataaagtacgaagggtatgtgaaccgtcaggagcgcgtcgcgctccgcacgtcgaagctcgattcacgcgcgatccccgaggatatcgactacgacgcgatcggcgggctgcgcatcgaagcgcgcgagaagctcaagaaacaccgccccgaaagcatcgggcaggcgtcgcgcatatccggcgtgaatcccgcggacatttcggtgctgctcatctatctgaaaaaataaaatcttacggcagggtgcgtccatgaacatacagaaattccagaaatattctcatgagatatctccgctttaccccgcgcttgcggacaaggcggaggcaatttcgcgcgcgatcgagaattcgccgatcaacgtgaccgcgatatcggacggagacgggatccttgtgaagcacatcatagattctctctgctgcgccgaggcggtcgcaagatacgccgatgccgcgcgcggcgaaggcgcggacggcgattcttccggcgcggagcgaaggctcacgctctgcgacgtcggaagcggcggaggctttcccgctctccccatcgcagcggcgctcggtgatatctcggtgtgcgcgctcgattccacggcgaagaagtgccgttttatcgaggaaagcgccgcgagcgcgggaatcaccaacctcacctcggtatgcgcccgagccgaggaggcgaaggggcttttcggcacgttcgatttcgtgacggcgcgtgccgtggcggctctgcccgtgctgatcgagatatgcgcgccgcttctcaaagtcggcggatactttttcgcaatgaaggggaagaacgcggacgcggagcttgcctcgtcggagcgcgccgcgcgcgagctcgggctgacgctcgcggacagcgtgaggtacgagctgccggaggacagcggcagccgtgcgatattcgtttaccgaaagacatcgccgacacccgcgcgctacccgcgcggatacagaaagatcgtgaaagcgccgctttaagcggtgcttttgttttgccgggaaggaggcgaaggacacggtatgacgtgaatttgcaactgcacgtcaacttaccgtgtccccgagaaatgggcaatgcccatttctccaacgtcaagtcggaaacttaacacagtatggcgtttaaccgaatttgtacgtcagtttaccgtatttacgttatttgcatggcattcggaagaatgctatgcgggaagcatcatatgttggggtttcacccccaatcccctgagcggggacgcccccgcaggcgttttgaacacggtattacgttttacttgaatctgtatgtcaacttaccgtgtccgcgagaaatgggcaacgcccatttctccaacgtaaagcctatgcctgtcaagtacagcgataacttacacgctgccttccgagagaaagacttacaccaatacccttcagtttaaaagtttttgggggtgccgggaccttttttcaaaaaggtcccgcgtcgttccccgcaagcatggggtcacggggaagcccctttgtcaaaaggggttcccccggtatcatcttcttccgtcatccccgttcccccgtttccccgcatcgttctctccgcgccgacagaagcagacggatttttccaccgtgcttttgccgttttcgcaccgtccgcgatgtataatatccgcaaaagaccgcgcgctcccttctccgcgcgaaaaaaagaaaggacgtacccgaaaatgagcagaaagtacttcgtcgaagccgaacccatggagcttgagcttccgcctccgctacccgcgccgaccgccgatccttccctgcgcggtgtcgaaagcattaagatatccgctatccgcccgaacccctcacagccgcgcgtgaccttcgaaccagcctcgctctccgcactcgccgattcgatcgcgcagcacggtatcattcagccgctgacggtgcggcgcacggaccgcctcggcgaatatgagcttgtagccggggagcgccgtctccgcgcggcatcgatcgccgggctttccgaggtgccgtgcatcgtgtgcgagatcgaccgccgccgctcggcgtatcttgcgataatcgaaaacatacagcgctccgacctcgatatgttcgaggaagcggcggcgattttctcgctttcctccgagcacggaatgacacagggcgaaatcgcgcggattctgtcgtgcagccagtcgagcgtggcgaataagcttcggcttctccgcctgagcgacgccgagcgaaagctcatcacggaaaattccctcaccgagcgccacgcgcgtgcgttccttcgcctctccgatcccgaacgccgccttcacgcgatctcgcttgccgttcgcggcaagatgaacgtcgcggcgaccgaggagcttgtcgaagcgatgctcagagaggatgagatcagacttgcgctgcaggaaatcccggaggataaaccgcacggcaagcgccgcttcgtgctcaaggacatccgcctgttctataactcgattgagcacgcgatggacatcgtccgcctcgccgggatcaaaattcaatcgcgcaggatcgagacagacgaatgcacggagctgcggatcctgatacacaaaggctcgtgacgcgcgctttacttcgatggagccgcacaccttgcgttttgccgccgcgcagattatcgtttgccgcacttcaccgccggacttctcccgcactcgacctgtacataaaactgcaagcccgctcgctcctcccccgttctctccggagaacgggattttcttttgcgcaccgctctttcccgtgtgccgtgtctcgcgcctgcagcaactgctcgatcgaccgttccgctttctcccgtgtccgcctcctttgcatcatttcgccctcgaaaatgtttcacgtgaaacacttcttgattccctccgtgattttgtttcacgtgaaacatttttgtgaatctcccccgttctattgacttgcggctctccgtgagatataatatatgtaacctttcgccgcgtttttgcgcggcggataagacagaaaaaggagcgcccatgccatacatcatagcatttgcaaatcaaaaaggcggagtcgggaaaacgacctcagcagtcaatatagcagcctgcaccgcggcgctcggcaaacgggtgctgctcgtcgatgccgacccccagggaaacgcgacgagcgcgtgcggaatcaacaagcgcgacgtccacatctcggtctatgacgcgattatcgggcaggcagacacggctcgcgccgtgataaagacgaagtacgacaatctgtccgtgcttccctccacgatctcacttgcgggagcggaattcgatttgataggcatggacgaacgcgaaaaggcgttccgccgtatgcttgcgccgatcgccgacggttacgatgtgataatgatcgactgcccgccgtcgctcgggcttctgacagtcaacgcgctgagcagtgccgacggcgtactgatcccgatgcagtgcgaatacttcgctcttgagggactgacgcagctgatgtacacgatccgcaaggtcaagcagctgtacaatccgtcgcttgtcatcacgggaatccttgtgacgatgtacaacggcaggctgaatctttcgacgcaggtcatggacgagctgaagaagtactacgcggacaagctgttttcgacggtcattacgcggaatgttcgcctgaccgaagcgccgagcttcgggattccggcgtactactacgacaagtattcaaaaggaagtcaggcataccttgaggtttcaaaggagcttgtatcccgaatcggatgaattgcgccgcaatcataatgcggacggagctttcccgcgccgcggatgcggcgatgcgccgtgaggaaaacggcacgcggaaaaatcgtattatatacggaaattataattatacggcaaggacaggaacggagaataataatatggcaaagataagcggcctcgggcgggggcttgaaaatatattcagcgacaacgccgtcgaggaaagaaacgatataacaaagctgaaaataacgcagatcgagccgcgctcggatcagccgagaaaggatttcgatcccgaatcgctcgcgcagcttgcggattcgatcgcggcgcacggcgtgctccagccccttcttgtaagggagagcggcgacggattctatgagatcatcgcgggcgaacgccgctggagagcgtcgaagcttgcggggctgaccgaagtccccgtgatcgtgatcgaggcggacgagctgaaggcggcgcaggtggcgctgatcgaaaacatacagcgcgaggatctgaaccccattgaagaagcgatggcatatgcggagctgatacgctcctacggaatgaggcaggaggacgcggcgcggcagctcggcaaatcccgctcggcggtcgcgaacgcgatgcgtctgctcgatcttcccgacgaggttctcgacatgataaagtcgggcgagctttcggcgggacacgggcgcacgcttcttgcgctgaacgataagagccgcatgggaccgcttgtacagaagatcgtgaagaggcatctttcggtacgcgaagcggaggcggcggtgcgccgcgagaacagagccgcggcgggcgaacgcgagggtgacaacatgacgtatccgctgaaggtcgattacttcgccgatctcgagcggcgcgcgacttcgctctgcggcaggcaggtgaagatcatgacgtcaaagaatcgccaccgaattgaagtggaatactcggacaatgaggatctcgaggagcttctccgcaaaatctgcggcgacggcatatcggaaaactgaaaggacgccgcacactcgccgaacgacaggcggaagagcagcgggcgaaatcaagtgaacagtcccgcacaggtttaagcggagaacaaacccgcgcgcagtcccgcgtttctccgcggtcagccgaagataccgccgagccgaatcaggcagagcgcaattcataccaaacgcggcgcacgaatgcaccgccgcttcaccgacaataataaaaaacgaacaacctcaaagaaaggcttaattatgatagacattaaatttttgcgcgaaaatccggacatcgtcaaggagaacatcaagaagaagtttcaggatcgcaagcttgagcttgtcgatcgcgtgatcgagctcgacgtcgagagccgccgtgcacagaccgaggcgaacgagcttcgcgcggaccgcaaccgcctctcgaaggagatcggcgcgctgatgaagcagggcaagaaggatgaggcagaggcgacaaaagcaaaggtcaatgccgctgccgagcgtcttgccgagcttgaggcgaaggaaaccgagcttgccgcatcgatccgcgaaattatgctcacgatcccgaatataatagatgacagcgtgcccgtcggcagggacgacagcgaaaacgtcgagatcgagcgtttcggcgagcccgtcgtgccggatttcgagataccgtatcacaccgacatcatggagcgcctgagcggcatcgatctcgacagcgcgcgccgcgtcgccggaaacggattctactacctcatgggagacatcgcgcggcttcattcgtcgatcctcacctacgcacgggatttcatgatcgagcgcggcttcacctactgcgtgccgccgttcatgatccgttcggacgttgtgacgggcgtcatgagctttgacgagatgagcgcgatgatgtacaagatcgagggagaggatctctacctgatcggcacgagcgagcattcgatgatcggcaaattcatcggacagaccgtcgccgaggaggagcttccctacactctcacgagctattcgccctgcttccgaaaggaaaagggcgcgcacggcatcgaggagcgcggagtttaccgaatccaccaattcgagaagcaggagatggtcgtcatctgccgccccgaggagtcgatggattggttccgcaagatgtgggaatacacggtcgagctgttccgctcgatggacattccggtgcgcacgatcgagtgctgctcgggagacctcgccgatctcaaggtgaaatcgtacgacgttgaggcgtggtctccccgtcagcagaagtatttcgaggtcggaagctgctcgaacctcggcgatgcgcaggctcgccgcctcggcatccgcgtaaagggagcggacggatcgaagtatttcgcgcacacgctgaacaacacggtcgtcgcgccgccgcgtatgcttatagcgttcctcgagaacaatctcagcgaggacggctcggtgaaaatccccgaggtgctccgccgctatatgggctgcgacgtgatcggaaagtaagcgggacattataatattaggggtttcaccccaaacccctgagcgggcagtgcccgcagccgacaaggacacggcattacaaaaaccgtggctgcacgttcacttgcggtgtttacgttatttgcatggcattcttccgaatgccatgcgggaaacatgagatattgggggtttcacccccaagcccctgagcggggacgcccccgcgggcagtctatagagttcggctaaatctgtgcgctatctttcgaatctaagtgatcttccgagagaacgacacacaccaatacaattcagttttaaaatttttgaggaaggggtccggggaaatcccctttttgtaaaaaggggtttccccgggtacttcctaaccacccgtcccccccgaaaggatacgaaatgaagattttttcgtcactgccgctcttgtccctcaacattgtaatatgggggatctacatcggcattgttgccgcgatgatcgcatcggcggtcacaaagcgcataacagggcgcacggtgcgcgcgctgatcgacgcgggtgcgttctcccccgagagcgccgccggcgcatctgcgctcgggctgaaaggcgcgagcgcgcgtgttctccgcggtcagctttacggaaagctcatcttctgtccgaacgaatattacgcgcgcacggttccctacgatcccgagaaggagaatccgtacaaaacccccgcgctcgatatggataaagccgtattctatatcccggaggaaaagaaattcgaagcggaggagcgcttctgctcccgcacatcccccgtatggagcataattctctacgcgctgctcctcggagcggcattcgccgcactgagctttgccgcaccgaagctgatcggcgctttcacttccgttttcaaccgataggaggtctgcgatatgtacgataagaaaagaaaccataagaaaataaagaagcgccgctcgttccgcgcggtgttcctgaccgcgctcatctgcgccgccgtgtcggtgctcgtcatcgtcggcgcgctgtggttcgtcggtctgcgatatgtatcgctcaataccgccgacggcacgaagatcaaattcttcggcatggtcgattccgacggcacgccgatgcgcggaaagatcgtctattcgatcggacttatcgccgacgtcgaccgcgaccgcgacacgatatcctattccgacggctcgagctactcgggcgggcttgacggactgctcaaatccggtcagggcaagatgtactacgcgaacggcgatatctacgagggcgagtggtcgggcgacatgatcaacggacacggcgtctactcgtatgtgaacggcgacgtctacgaaggcagtttcgtcaattccgagaagagcggcgagggcaaatacacctggcaggacggctccgtctatgagggcacgttcgacgcgaacctgcgccacggtcacggcgtactcaccacggcgggaggcgactcctacgacggcggctttgagcgggataagaaatccggcgagggcaaatacacctgggcaaacggcgactcctatgagggaacgtatctcgacgatatgtgctccggcaagggtaagatgacgtggtcgaacggagagacctatgagggagagttcagattcaatacgctgaacggcgaaggcacctatacatggccgagcggaagagtgtatcagggcgtgttcgaaaacggactcattatccgcgtggactacgacaacgggatcggcgaggaccccgacgtgatcggcgacacgaaataacaccgaagcagacaacgtacaaacgccggagatcaccggctgtaaaataaaggagaaaacatgatctacacaaaaaccgacgaaaagatccgggtagaagccggaacctatacgctcgaggtcacggcggagaatatcgccgttatcctcgcaggcgaacgtgtggcgcttcttcgcccgggctccgcggtcaacgtgcttaaagcagacggcgagatcggcgaggacaaagccgaaggcgctctcacctgcagctttgccgataaaagagatgcagacggaagctacgtcttcacatggacgggaaagagcgcaaattgggagaagaaggaatacgtcgtccgcgcgaaggaaaactgctttgaatacttcgtccgcgtcaccggaaagggcgatgtcgattcggtgaaatacttcatcggcgactgcggcgactggctctgcggaagcgaatacgacttcgacaccggatatatgcccatccccacggtcaacggcgcatcgcagtgcgaattttccgcgcagtgctcctacgacgagttctcgtacctgaccgttccgccgatgttctgctacacgttcgacatccgcggcatgatcccgaagcttgcgttcggtctcgttgccgaccgcggcgagcacaacttcaccaagttcgcatatcagacgcgccgcgaaaattcccttgcgcgcttctggctctggaccgatcagtccggacacacccgcgttgacggaacgtggcagaccccctcggtgatcgtttacggcgcagacagccgcagcgattcactcaagtattattccgattactatttcgcaaccggacgcgccgacgcgaaggatcccttcgagagaaagccgcgcttctggtacggtccgatggcgtgcggctggatcgagcagaccgcgtaccgcatcaaggcgaacatcgcccgcgcggactgcgacatggcatatcagcctacatatgaccatatgctgtcagagctgcgccgccgcgatcttcatccgcagatcatcataatcgacgataagtggcagaccggctacggctccgcagtcgtcaataccgagaagtggcccgatctgcgcggctggatcgacgcgaccctccgcgattacaactgccgcaccatgctttggtacaagctttgggaccgcgaggagctcccggacgacatgaccatggacaacggtcagggcggacgctgcgtcgatccctccaaccccaagtacagagagtacatccgcgagacgatgcaccgcctgctttcctccgatgagggatgctgcaacgcatacggtctcaagctcgactatgcgttcactcagccggtcggcaaggatgcgaggtcctactccggcaagttcggcgtagagctgttcctcgattacatcgcactcatccacgactgcgcaaaggcggcaaagcccgaggcgatcatctccgcttccccctgccacccgctcttcacgaattatgttgatcacgcgcgcctccacgactactatccggatctccgccgctgctatgaggagttcacgttccgccgcgagatctacgatatcgcaatgcccggcgtgctgttcgacaccgacggaagcgcgtacaacacccgccgcgacacgatgagatatatgcgcctcgcaccgaagatcggcattcccgatctgtactgcatcacggaattcccctcgctcaccctttcagacgacgattgggagagcgttgcggacatctggcgcgagtacggcgagcttatcgaccgcaccgtaggcaaggagtaaggaaaatcccccgccgccgtacggcgcgcggaaacaaaaaaacaggagcctccggctcctgttttttgtattggggggcactgcgagatcagcgcaacgcgctaatctccaacgtgaggctgacaggacacggtatgacaaaaaccgtggatgtatgtttacttaccatgtccccgaaaacggagcggcgctccgttttccaacgtaaggactgacttttcacgagcatcattctccgacgtgaaactgaataaaacacggcattcttacgaatgccgtgttaaagttttatatgttggggtttcaccccaaaccccattgggggcgtcgcccccaatcccccgggcgcggaagcccgcgcaggcagtctatagagttcggctaaatctgtgcgctatctttcggatttaagtgttctttcgagagaaagaccaacaccaatcccatttagttcaaaagttttagggagggggcccgggggaatcccctttgtcaaaaggggtttccccagtactctcctaatccctctcactcaagcacgttgcccttggaatcgaagagcgggagcttttcgaggtagattatatcgtgtctgtcctgtgcgtcgccctcggcgaggatcgccatttttccggcgatctttccgcctgcttcggcgacaagctcctcgagcgcacgaaggctgtcgcccgtcgagatcacgtcatcgacgatcagtatccgcttgccctttatcatttcggcatcggatttatccatataaagcttctgctcgccgctcgtcgtgatcgagcgcacggtcacctcgaaaactccgtccatgtaaagcttcggcgccttgcgcgcgaggaaatacttccggttccccgcaaggcgggacatctcgtgcgcaagcgggattcccttcgactctgcggttatgatgtaatcatattcgggcgcgcgcgcaagaagctccttcgccgccgcggtcgtgagctcgggatcgccgaatatcacgaaagcggcgatgtaaacatcgtcgttcagagggcagagaggaagcgacctctcgagccccgcaatcttcattgtatacttcatacgaaatcctccttcgtccgcttacgagcggagcgtaatgccgaactttccagcgagatttttcagtatcttcttgaccgcgcggtcggcctcctcatcgttcatcgtgtgatcgggcgaacggagcttgaccgcaaaggatacgctcttctgaccctctccgatctgcgctccgcggtaaacgtcgaacagcttgaccgactctaccgacggcgacgcggagacgatctcatcctcgatcgcacctacctcgagctcctcgccgcagacaaacgagaaatctctctcgagcgcgggatgcttcggcagtgcggtgaacgcgaaatcggtggagtaaagctccgccatcgcgtcgaaatcaagctcggcagcggcggttcggtgcatgaagccgtagctttcggcgacatccgggtgaacctcgccgaatacgccgagtacacggccgccggcgctgaccgccgcgcagcgtcccggatggaacgtgggattgtcgctttcggcggtgtacctgacctcaatgcccgacgcgcgcatgagcgcgtcaacgatccccttcattctgtagaacaccgcttcgtccttccggtcggtgtcgtagaagccgagcacgatgcgcttaggctcgtcggggagcacgttctccgtcgggatgtagacggtcgccatctcgtagaggtacgccgcgtgattcttcacgctctggttgtaggcgagcacattaagcatcgacgggatcgccgtcgtgcgcataaccgaggtgtcctcgccgagaggattggagattacaacgctctttctcttatcctcgggcagacgtatcttgtcgtagaacttcggtgagatgaacgagaacgtctcgatctcgttcatgcccattccgcagagcgcattctcgcagaagagcgcgtacgactgattcttcgtccgtccgccgagcgtaactccgccggaggtgagcgtctcggtgagcgcctcgtatccgtatatgcggatgacctcctccgcaacatcgttcatgcacgcgacgtccgcgcggaacgacggcgggatcaccgtggaatcgccgacggtgaattcgagcgaacggagagtctccttcatgaattcctccgaaatgtcggtgccgaggaagcggtttatcacatccgcgtcgagctttatctcgggaaggggtctcggattcgggtaaatgtcgatcacgtcggatacgacatcgccagcgccgagcatctctacaagctcgagcgcgcggtaaagcgcagggatcgtctgctcgggatcgagacccttttcgaatctcgaggagctttcggtgcgcatgccgagcttgcgcgcggtgatacgcacgttcgaaccgcagaacgccgcgctctcgaatacgaccgtctcagtggaatcggagattccggagtttgcgccgcccattacgccggcaagcgcgaccggcttgtgatcatccgcaatgacgagcatcgaggaatcgagcgtgtgctcgatattgtcaagcgtaacgtacttttcgccgtcggcggcgcggcgcacgttgatgtcgcttccgtcgaggcaggcgtagtcgaatgcatgcatcggctgaccgtactcgagcatgacgtagtttgttatatcgacgatgttgttgatcgggcgcactccggcggcgcggaggcggcggcgcatccacatcggggagggcgcgatccgcacgttcttcacgacggctgcgctgtagcggtagcaaagatcgacggcatcgtccttaacggagagaagggacgatatcccgtttccgatgccgcggaactcgggcttctttatgcggagcggagcctcgtgcgaaactgcgctctcgcgcgcaagtccgatcacggagaggcagtcgggacggttcggcgtgatctcgaactcaacaacggtgtcggtgagatcgagaacctcctttacgttctcgcccggcttggggagcgtgtcgagaccgcagtccgacagaatgagtatcccgtcctcgacagcctgcggcatatcgtgcagcgtaagcccgagctcggcgatggagcagagcattccctccgaaaccgcgccgcggagcttgcctttctttatcttgacatctccggggagatggcttccgtcggttgcgacggggacgagcgcaccctcggtcacgttggtcgcgccggtgacaatctgcaggggatccgccgctccgacgtcgattttgcatattacaagtttgtcggcatccggatggggagctacctcaagcacacggccgacgacaactccggagatatcgtctccgagctcctcccagccctcgaccttcgagccggtggcggtcatgcggtcgcagtattccttcgtcgaatactcggaaacgtccgtgtagtcggcgagccacttcattgaaagcttcatttatattatcctttcggttgttatttcggtgtgcgtcagaactgtccgaggaaacggacgtcgttctcgtagagcagacgcatgtcgtcgatgtggtatttcagaagggcgacgcgctcgacgccgagaccgaacgcaaagccggagtactcttcgggatcgatgctgcagccggagaggacgttcggatgaaccatgcccgcgccgaggatctcgatccagccctcgcccttgcagaagcggcatcccttgccgccgcaggcgaagcaggatacatcgacctcagccgacggctcggtgaacgggaagtggtgcggacggaagcggatcttcgtgtccgaaccgaacatcctgcgtgcgaacatcgcaagagttcccttaagatcgcccatcgtaacgccgcgatcgaccacaaggccctcgatctggtggaagagaggcgaatgcgttgcatcaaccgcgtcggagcggtacacacgtccgggggagaggatgcggatcggcgggcgctccttctccattacatgaacctgaacgggggaggtctgcgagcgaagcagcacgttgtccgttatatagaaggtgtcctgcgtatcgcgtgccggatgctccgggggaatgttcagcgcctggaagttgtagtagtcaagctcgacttcgggaccctcggcgatggagtatcccattccgatgaagatgtcctcgatctcgtgctgaacgcggctgagcggatggatgtgaccgaagggcacgtcctcgccgggtacggtgacgtcaagcttttccgcacggagcgcacggtcgcgcatcgcggatttcatttcggtctggcggcgttcgatctccgcctcgatctgtgcgcggacctcgttggcgcgctgaccgaacgcgggacgctcctcgggggagagtgagcccatgctgcgaagcacggcggtcagctcgccttttttgccgagatatttcacgcggatctcggaaagatcggcgtcgacccgcgaaagctgctccatggcgctttggcggatccgttcaagtaaatctttcattatattttctccttagggattattaacttgtttacgcggtgcgcgggagaaagtcccgcagacaaaatctcaagggacgttcggacggctcggcgggtgcagcagcacggcggcaaaaaaaataaaatccgtcccgacatgaacgggacggatcgaaaacgattcgcggtaccacccggcttccggctttcgccgacaccttgatctccttaacgcggaaacgacgtgcgcggctacaaggggttcaccgcacctgctccgaagcgaaaggcaaaagacgcgcccgaaaggattctcacagcagccgaatccctctctggtccggagcatcgccgcgccgacttcatcactgctttactccattataatactccggcgggcgttttgtcaagggcttttgcgattttgcacggatgcagcggagacttcgtctcctaacacagcattgcgttcaaccgaatttgtacgttcacttactgtgtccgcgagaataggacatggtataacgtcagaccgaacctgtacgttcatttaccatgttcccgaaaacggagcgccgctcagttttccaacgtgagaacaacttgtacgagtgccattctccaacgtgaagctaaaactaaacatggcgttcttccgaacgccatgtaagatcattatatgttggggcgttgccccaaagccccattggggatttcatccccaaacccctgagcggggacgcccccgcgggcaaaaggacacggattacataaatctgtaattgtacgtcaacttaccgtgtccgcgagaataggacatggtataacgtcaaaccaaatctgcacgtttatttaccatgtccgcgaaaacggagcgccgctccgttttccaacgtgagaacaacttgtacgagcgtcaaactccgacgtgaagcctatatctgcaagcgcaacaaaaaatctcagctgtcttccgaaaggacaatactcaccaatacaattcagtttaaaggttttagggaaggggtccgggggaatcccctttgtcaaaaggggttcccccgtcatcctgcctccgtccccggcatcctactacttctctccgccgtttttcgtcctgcgataaattataaaaacaataaacgcggcgataagcacgagcgtaacggttatcattatgtcgagagcccccgtcgtcggggacatccgaagatgcggctcggtcacgaaacggtaaagcaccgcagataccgccgcaagaaccaaagccgcaagtataacgatctgcctgatcatcctgacatagcctcctcccgatatttctgtacatctattgtaccacagtcgagacggatttgtcaacagtttattaatattttttcaacacaatcattaattattttttacaaaatccctcaaattccgacttatcccacccgccgcgcgcaagatttatcacgggaatatgcttctcctccgcgcgtcgtacggtgtaagccgttccgccggaattgcgcagacagtacgcaacgcaggcgtcggcgcgcccgaccatgtatcggtttctcttcagcatgcagtccgaagtgtagaaagcatccgaataatgaacctcgtccgcgtgggaaaagagcatcttgtacgcacgcagcgaatcgtaatccgtccagcgcgcggtctgatcccggcacggcagcgcaagcacaagccgaacgccgtcgttctccgcgcgaaagcgcgccgtgcggcatgccgcgatcagatcgaacccgagcgcaccgcctgaaatgaaggtgtccgcgccgagcgaatacagctccgctatcacgcggtcaagctcatttgcgagcgaggcgcgcgcctcttcgggaatgctgcgatgccccgtgaaacatacggtatagcccatagctcctccttttgatatccgatacggtcggtctttcctgcatctatgcccgctgtactcggtacacgcctgcgcgccgaatgcccgcgcagaccgtgccgcaccgtgccgtcgagccggcgcagatcacaccaacaccgcccgcacccgcacaacggattcttgcggcgggaagctgctttatgtgccccggcggcaatcccaccgatcgacgggagttttcccgtatatcttccgctgcaatacgcgatgcccgccgtgctcttcccgcatataccgaaaatcagccgaaatcagcgcatctctcaccgcgaaggggtgttttcgacttttcgattttcaattacgttgttttaacaacggaattcggcgcaaattcgccgaattcaccctcgcgccgattcttcccaagcattcccgtaagttctgcccggtcgcgcacccgtgtagccgtgacccaacgccacggctgcccggcggacaccctccgcgcatcgctcgccgatgacaggtgttttcgacttttcgattttcaaattacgttgttttaacaacggaattcagcgcaaattcgccgaattccccctcgcgccgcgcacgtcagcaccgaaaccttaaattccgttgttttaacaacgtaaataattttgcaaaacgcaaatgcacccatatttccggcagtgcagcttcaaacagaggcacgcacccgcaggcatgccgaatcacgtccgatcccgctttggtcagcctctcctgccttcacgccaacgcaagtacgtttttcctcgcgccgtcaaaccgcacacctccgaaccgcataccgctcaaaccgagcgctccgccttcgccgctgcgcgccgagccgccgagccggcacaaatcacacccaacaccgtaactgtgcacatgcccgtccgttccggaacacattccgccgctccggaaaaagaaaagtgcctgaccgaagcagacacgattccgtaccgtattgaatttacgcgcgctcgatcttgccggaacgaaggcagcgggagcaaacgcttacggtcttgtgagttccgttgaccacagccttgacctttctgatgttcggcttccatgcgcggttggttctgcgatgtgaatgggaaacgctctgtccgaagacaacgcccttgccgcaaatactgcactttgccatttatatatacctccgttagtagttttcataaaatgagcagttaatagtatagcacataaaaatctcaattgcaaggcttttttcaatattatattatcttttttcggaaaaattttttctccgacaaaaatcatgttgcatacggcgcgaaaatgtgataaaatataggcacaccgcagggttttaacacgcctgcacggtgcagcgcacacgcatcgccgcggcggcggagaagcgtttgcctcgccgatcacggggaaaggagaaggtcatgccgaaagaaagcggaaaaaagcttatctcgcaaaacagaaaagcgcgtcacgactattttgtcgatgaaacgtacgaagcgggcatcgccctctccggcaccgaagtcaaaagcatccgcgccggcgcggtcaatctgaaggattcgtactgccgtgtcgaggacggagagctgtgggcatcggggatccacgtcagtccctacgaaaagggcagcatcttcaacgtcgatccgctcagagaccgcaagctcctcatgcacaagcgtgagataatgaagctcggcgggctttgcgcgcgcgacggttacacgctcgttccgctgtcggtgtatctgtccggctcacacgtcaaggtggagctcggcttgtgccgcggaaagaagctgtacgacaagcgcgaggcagacgcgaagaagcaggcgggacgcgagatcgagcgcgagatgaaggaaaggtcaaggtgatttacgggggcgtaatggtttcgacggggatcatgaagtgcgataagcgggcagagaccgggcaatctctataatacggcccattttaaaattaaacgctgataacaataagttagcagtagccgcctaagtgcggctcgtccggcgcgaagtaccgcgatcgcgtgcagggcgtcatgaagcggtaaatgtgaacggcccgtttcccttgaagccgtcataaattaaagggataccgagaggaacgcggcgtccggcgccgcctcctccgggaataaaaaacgccggactgcgcccggagaaagttgcgcggagcggttttcggacaggagttcgattctcctcgcctccaccaaaaagaaacgacaattttctttcggaagattgtcgtttctttttgttctcttcacttttatcttttcacttttctctcttctcttaaattgtcgtttccagagaaaagataagagtgaaaagagaagagaaaaggtagctttgcttcgcaaagcgttgaattatataataatttgtggtataattcaatcagaggtgatgacgaatgaacagtcctttgctcgataaatctcttgattttgcaacacaggtagtattgttttacgaggatttttctaaaacaaaaaaagatacaacaatcgcaaaacagttacttcgttctgctacaagtgttggtgcaaatataaacgaagccatatacggtaacagcaaagcggattttatatcaaagcttcatatttcacttaaggaaaccggtgaaagcatatattggctcacgcttctgaaaagaacaaatctgatagaatataactttgatgaactcctttctcttgcagaagaaattaagaggatgctgattgcatcacttaataccgcaaaggaaaataaatgaagattctttttactgcattcaaaggcgtgcacaacacttcttttcagttagtggatcaaacggcagcgaatcatattttattaaccaatagttttcaaggattggaaaaagacatttcatttatcagtagcgattatagcatagtgtatatgtttggagtcgataagaaactgatagataaagtcagaatcgaaacgtgtgcaaagtacaatgatgaaacggtttgtacagattttaatgtacattatttagaaacaatgcttagaagcgcagacatctcttacaccatatcaattaaaccgacccgttatctatgtaatgcggcgtattatcatatgctaaagaaaaatcctaatacagttttcattcatattccatcattaaaaggtatgaggattgaactgatggataaactgatcgcatttttcaacgatatatgttccaactaaaaaactgcgagagttcgaattcatacgcaaaagtgccgaaaatatctttttcgtagcgcattgccaaacaggtatcggacgaacacaaacttcttcagcggcggtttcgccgtaaagtgttcgctctgatccacaacagaaaagcgccgtcttgggagtgatcccgagacggcgcttttttgccattcatacattcgatttccgctattcctcctgctgcaatgattgcggaaaggaacaggagcctatacgaatggaaagatttatcacggatgaacgcacagggctgaaatatgagctggtcggcgactgctgcctgatcgccggggatcggtatgccggatatgccggcttcttcgtgcggacaatgcttttggtattttgaacaattattcgacaaaatattattttttgtttgacatgttttctcatttgtgttaaaatgaaagcagtacgttgtcttgtgtgccgatatataatgaaagaggacacgacatgaaaaaaagcatatctttcagtggcaaactgctctctgcctttttagctatcctcctcgcactttacgtttatccgttcacatctgctgcggcagacgatgaagagcggacatctgaaatcgactcggaactcgaactcggtgaatattttccggaagaaatattcgagccggctgaagacacatctgacgaagaaactgccgaaagtgtcgccgaagttacaggcgaagtcgagtccatgcgaagcgaaaccgtcaagcattaccgcctgtcagacggacgttacgcagccgtggattacggagctcccgttcattacacggacggagacggaaaatggacggacttcgacaacacgatgatatccgacgattccgtattgaaagacgatcccgacgattttgccggatacgagccgaagaaaaacaaagcggatatcaaatttgcaaaaaacacaaactcatcgaatcttctgaaaataaagtacgaagactgcaaaatatccttcggaattcagggcgcaaacaattccaagccgatcatgacttccggcagttttgccgacggggatcctttcgcgcttccgaaggtcaaatccgaagtacgctatccgaatatattcagcggagtggatcttgtctacattctcaacggcgaagacataaaagaatattttgtactctccgaaaatgcctccgtctttgaatacaaatttgaaataaaagtcaacaacgtcactccgtcaatcgacgaaagcggaaacgttgtttttgcaaaagccgacggaaccgttgtattcacagttcccaaaggatatatgtacgactcctcggatgagtattcttccgaaaacacatcggaaggggttacttattccctcgagcagacaaaggataaaaaataccttctcaccgtcacggtcgattccgattgggtgagcgacgaggacagagtattccccgtttatgttgatccgtccgtcatcctgaacaagtactccggaagcttcagcggaaacatacacaccgaatatctgaacacctctgtcggaacgctggacggaaccgatcacatttacatcggacatgacgggtccggaggttccgatctttatgcgcacatgaaggtcaacactctgccggcactgcccgacaactgtatcgtatgtgacgcaagttttctcgtatataatatgaggtacagcgcacttgccctgcccgagctttatgtcggactgtatgagtcatcctcttcggatgcctacaccgccgcgtcctcggtaatgtacgattatgccgtttattccgcttcaaacgaaaacgatttttctcaatacggagtaaccgaacttgcgcgcaagtggtactcggattcttcaagcaatcacggtatcctcttaaaagccgaaaacaacacggcatcctcatatgccaatgtccgccttgcaggctgctatgccgcggacagtgtcctcacaacgtaccagccgcgcttcatcgtcacataccgacacaccgcaggacttgaaggatattatgcatatgaaagtgcggacgttgaccgcgcaggcactctttacctcaacgcaaacacaggacagacggttcttgtgaacgaccttttcacatccgacaaccttgctctgccttataccgtcagtctgatatataattccacatacagcaaaaccgcgttcagcaacaatgccgccgcaaatatacataccgccgactatacaaaaatgaagttgggatacggatggaagctgaactctcagacgagtgtaaaggaaatcactcttccgtcttatataaacggaagtgactcacggtatctgatctactgcgatgcagacggtaccgagcattattttgcgcagtccgccgccggaagcggcatctacaaggatgaagacggcctcggactgcaaatcgaagttctgagcgacataacgtacggaaaatataagatgaccgatgacaagggcagtgtcactgtgttttcccactacggatacattatatcctccgccgacgcaaacggaaacaaaatcacctacaattacgacaccgcagccgatgtccgccgacttgaaagcatcggcgtgtcaaccgacggcggcagttacgccgtcgcagcttcattcatctattcaagcgacggatatctgaccggcatcacggatcgcttcggaagaaaaacgacactgtcatacagctcgtcacgccttgttaaaataacataccccgacaaccaatacgcctcatacgattattccgacctttcgggaagcagcaactctcaaggcaagcttgccgtaatacgcgataatgaaagctcatcatccgtcggaattgattatgagccgtccggcaaacgagtctcggcaatcaaagaaaatgtctccggcagtaccgtaaacggcagccgcctcagtgtttcatatgccggaagcgaaaaaacgactgtccgcttcagcggaaatgacggagcaatcggaaactcggacgatatatcaaacatatatcttttcgactatgccggcagatgcgtaaaccttcacaccgcagagtccgcaagcgaccgcattctcggctccgccgccgccgtctacacttccccgtcacagaaaacggacaaacgcacaaaccgaatcggaatcgccgcctccaccggcgcgcagccggtgaatctgctgctcaacacaagtgccgaaaccgtcaaatcaagcgattcaacgcttgccgaatatttctaccgctcatccctcgcctcgggtcagacggttgaaatgagcactgcgtacagccacagcggaagcgcctcaatgaaggtcagctcaagtgctgcggtctcatcggaagcatacacatggatgcagatttcccgccttacagtcggagcaaactacaccctgtcagcatacgccaaagcctcttccctgtccgcctcggacaccggaggctattatctccgcgcctgcaccacatcgggtcaaagccccgtatacagcgaaaatttctctaaatccggaagcagcgacggcggctggataaggatatccgtcaatttcaccgctgtcgaatcgacgatgaacctctgcgccggaatccggaacgcctccgggacggtctgcttcgacgatttccagcttgtcctttccgacagctgcgactcaccggtcagcctcattccgaacggcggattcgaaaacacaagaactacaaacaattggacgatgacctccggcgcggagtactcctcaaccggcggaatcggaaattcgcgctgcatcaaggtaactgcttcgccgcttgcgtcccggggcgcaaactatacggtaccgatcaacgctgcgggtcagaacacctacatttattccggttgggcaaaagcagcaagcgtccccctcacacgcggagttaagccctcgctctcccccgagttcgagcttgtcgcacacataacatattccgacggcacaacggaatggcacagcaaagcgttcagcgcggactgccgcgaatggcagttcctctcaatgcccatcgtgcctaaaaagccctctaaaaccgtatctcagatcagactctatgtttcatacagccaaaacggaaacacagcatatttcgataacgtctctctcgtcgcggacaactgcaccgcctacgagtacgactcaaacggaaacgtgaccgcggtcaaccgcacaaaggaatcccccgtttccgcaacctacagcggcgccgacctgacccgctacgcatccggcaccggcgcaacattcaattatacatacgactccgcacataacgtaacaaaggtcacatgggacggcatgacgaactccctgacctataacgccgcgggacttcccgcctcaagcacgctcagcggcggcggtcaaacgatctccaccaccgcgacatatgactcctacggcagacttacagccgaaacaaatcagctcggaaaccaaaccaaatacagctataacaccctcgacggaacgctgcgcctgaccgagcatcccgacggctccaaaaccgtccgtgatacaatcacgtcaaacggcaggctcaaactcctgtacaccgccgattcggcttcggcatttgaatcaaacgcaaacctgtcatattccgccggaagactttccgaaataagacagggcgtcgccgccttgcagaccgataccgtaaaaaatcagtattaccgcttcacatacaataattggggcgatcttacaaaagtacgcgtgggcgacataatccttgccgaaaatacgtacaatcagtacaccggagcgccgatcacctcgaaaacacccggcggtacaatcctgtaccgcaattacgacaacctcggcagagtcaccgacatacgccacagcatctcaaacggcacgcgcctcttcgaaaatttctacaccgcatcgggagagatcggaaagaccgttgacttcacagccggaggaaacgccgtaaccgtaaatacgttcgactccctcggcagactgtcgaatgtgtccgtccgaaacagaacggacggcgcactgcgtcagaacagcagctatgtctacgatacggcgggtcggctcaagagcagcgtcacctccttccccttcaccgtcggaaagccgtattcgaattccttcacatacagcgcatcgaacggacttctcacgtcggtcactgccaccaacacggacacgctcaccccgacgtacaacgggctgaagcaggtcacaagcgtcaagatcgaccacaacgacaagccgttctgcaaaaattattcctacgtcgaggtctcctcggggcgcacgtcaagtctccccgacaagcttgaatacacggcgtcggacacgaccgcgctctatctgcgcaacacctacggctacgacgcgggcaaccgcatctcaacggtaatggaaaccgccggcacaggctctcccgagatcgcgggaatgtaccgctatgacggattcggaaagctgaccatcgccaggaccgccgccggaacgggcagatacacctacgatgcgacgggaaacatcacgcagatcacaaacacaaaggacggcacgacggagaccgtaactctcgagtacgacacctcctccggttggaaggaccgcctcatgaaggtgaacggctcaagcctgcagtactacggcagctcgcccggacttccctccgtatatcagaacgg

SEQ ID NO: 2862 - DNA, 4403 bp, Unknown
  16S sequences of unknown bacteria
ctgcggcgcatttacccggacgtcctacgctacgccccagagcgtcaaaaacgcgctgggccatgtggcgtatctgctggccgggatcaaggatattgccaatattcgcaagatccacctccgggtggagacggatgaccaggtgctggaggatgactatatcttcggagcggtcagcaattcgacctccgtcggcggcgtgttgacgctggacccgcatctggtcaatatgagcgacggcgtctttgaagtgctgctgattcgctcaccgtcgaatcttctggaactcaatgagtgcatcgtggcgttgagcacgcagaattataactccggcgcgatcacgttctgcaatacgaaaaaggtgaagattaccgctcctgcctccgtcgactggacactggacggcgaaatggccgagggcagcgagacaatcgaggtcgagaatctgcacaatgccattgcgatcatctgcaaagaggatactgctctgcgaggaaagtaaatgaaaaacacaacgctttgttatctggagcaaaacggctgctatctgatgctgcaccgcgtgaaaaagaaacaagacgagaacgccgggaaatggatcggcatcggcggcaagcttgaggagaacgagagcccggaggagtgctgctgccgggaattcctggaggagacgggcctgacgctgacggactaccgctaccggggcatcattacctttgtctccgaccagtgggaaggggagtatatgcacctgttttccgccacggcggcggcggggaccctccgcgattgcccggagggggacttggcctgggtgccattgggagaggtgccccagctgccccagtgggagggcgaccggttgtttttacagcagctgcgccagaatgacgcctttttcaccatgaagctgtgctacaccggcgaccaactcaccggcgcctggaaaaacggccagccgctcccgctggacattgcgcgaaagggaaacgatctatgagatttgcagatggcctgccggggcggctttggcttgcgccgatggcaggcgtgacggattatgcctaccgtactatttgcgccgggctcggcgcggaggtcacggtgacggagatggtctcatcccgcgccctggtctatcaggataaaaaaagccggacgctgctgcgcaaaaatgcgggcagcgcctgcggcgtgcagatcttcggcaatgacccggccattatggccgaggcggccgggctggcgctagaggccagcggctgtgattttattgatatcaatatgggctgccccatgccgaaggtcgcggggaccggcgacggctccggcttaatgcgcacgccggagctggcgggccgcatcgtccgggccgtgacagacgctgtgcccgtcccggtgacggttaaaatgcgtaccgggtgggacaagggcagcatcaactgcgtggagctggcaaaaatttgccaggataacggcgcggctgccgtcgccgtccatggtcggactcgtacgatgctctattccgggacggcggattgggatatcatccgctgcgtaaaagaggcgctgaccatcccggtcatcgccaacggcgatatcatctccccgcaggcggcgacacgctgcctggcgcgcaccggcgcggatgggctgatggtcggccgcggctgcttcggcgacccgtggttatttgcccagctgcgagcggcgctggcgggggaggagaacccggcccgggcgccgctggcggtgcgcattggcgtggcggaggagcagtttgctctggccatggcggacaagggcgagcatatcgcctgcctggaggccaggaagtatttctcctggtatctgcggggcgtaccatatagtaattactacaaggagcggatctcaaagatcagttccgcagaggaggtccggcgcattgccgccgggatccggagggatctgcatgatgcgggagagtgaatggatccgggctgcggcggcgggcgatccgcacgcctttgcccaactggtggccaggtatcaaaaaccggtctataatctggtactgcggacggtcggcaacgagcaggacgcgctggacctgacccaggagacatttgtccgggcttggcggggcctgccgggcttccgggctgcggcgaaattttccacctggctctaccggctggccagcaatgtcagcattgattttctccgggcgcagaagaaccggaggaccgtctccctctctgcacaggaggagtcggaccaggcttgggaaatgccggacccggctcccggtccggaggcgacggtcctgcagcgggagcaggcggcgcagctgcgccgcgcattagagcagctgcgcccggagcagcgccagatcttgacgctgcgctccatgcaggggctttcgtatgaggagatcggccagtgcctgggcctgcgggcggggacggtaaaatcccgtctggccagagcccgggaacagctgcgccgcgcgctggaagaggccgggaacaaaacgccgtcagcgccgtctaagaaagcagaaagggggtaatgccgatgcgatgcaaaaaagcgaaccggctgctgagcgaaaagctggacgggatgctctcgccgcgggaaaacgcagcgcttgccaagcatctggaccagtgccccgcctgccgcaggcggctgaccgattatatgcagctggatgcggcgcttgctgatttagagaaagaaccgcctgcggcgctgcagcagaatattatggcggagatcgccgcgaaccagccccagtgggctccgcggcagccgcgccgcttcctctgggggccggggactgcggtcgcagcggcagcggcggtattgctgctgctcctcggcagcggcaagctgatgctgcccgccggaaatgagaccgccgtcgcctccggcgtgcaagacagcgctgcagcggatgaggccaccctgcaggatgccgggggagaagcgctgcaaagcgcgaccgccgcgccggaccagccgtcgccggatctcaagcagggcagtgtcctgccggagctgtccggttcggatggcgcttcgggcgataccacagacacggcctctccgttcgagcaggcaggtgagaatgccgcgacagaaatgggcggcggggatgatgcattcgacttggataccttcctggcctggcaggagctgccggtcctggtcctgtacggccgccagacggcggagtttgcgcagatcacagcctgggacgagatcgccgagggcgtctgggaggccaaagccccgctggcgcagctgctgcagctgcacgaggccgagggcggtacctggcacggcgaggtgaccggtcagacgggaatcctgctcctgtgcccataatgggctcggaaacaaaaaaagagcgcggaaaaagccagcttgtttggctttctccgcgctttttccggtgtgccttgctagcagcagtgggcgaagatattgaaatagtaggccttttccatctggggcagatgctcgaccagggcgataagctctgcgcaggtcgatcgcagctcgcccagatcctgggcggcggcgtttccgccgagttgggcgaagtggacgttaatgtcgtccatctccgcatggtataaaatagagccgaggaagccgctgtagcgctgccagaggtccatggccttcctggcgtagtccgaggctagctccggcgcgtcctgatccagcgcctgttcggccagacgcagctcctggacgatttgcccggcccggttttccagcaggctgaccgcgccgatggcggcagccagcagcagggcgaggatgacaagaccgatcacaaggtacttcatgaggatgtattctcctccttccgggcaagatagatctttcccgccccgtcgacggtcatcagcaggacctggcggggctgcagattgcgtttttctagctgacggcgcagccagtggtggttatagcccgccagatgcaggttctgcggcagcagatgtccgtcagagatcagcgtatagggcaaaaatgcgtccttgacggtgatcccggcgtcttttgccgtggcgggggcgtccttggggtacaagaaggtggagatcagaccgttggtctctaaaatcgcgtatttgacggtcgttaggtccagaatgccctgctcccgcaggtgctcggtcagttcgtccagatgaatccgcgtccgggccagattccgctggcagatcgtcccgttttcgacgaggatgaccggcttaccgcagagcagacgccgcatacggatgctctggtaagccagcacggagagaatcagcgaaatgcccagcacggtcagcatggggacgaggccggaggccaggggaatgccattgtcctgcatcggtacggcggccagattg

SEQ ID NO: 2863 - DNA, 17339 bp, Unknown
  16S sequences of unknown bacteria
gattgactcccaccactgatactgatttgttgctcgccacctacagaggtgggagcaatttagaaaataatctaattagatgaatttcgaaatataaattaacacgcggatgaaagaaagtcaataggaaacggttataaaacaggaaaataaattgtcaataaaaaatacttgacagatctcggcttttcggttaagatagcaaaggtgatgcgaatggaacagtttttgcagcagacgctgctctatgatttctacggtgagctgctcactgagcaccagagaagggtgtatgaggaagtcgtgctgaacgatatttcctgttcagaggcggcagaggaattcggcgtgagccgacagggtatacatgagctggtgaagcgctgcaataagattctggaagagtatgagtcaaaactgcatctcgtggagcggtttttactgatccgggagaatgtgaagcagattcagcagcttgcatcacaggttgattcgattgacaaggaagcgctggcagaacaggtgcgtgagctttccggaaggattctggaggagctgtagtacagccgcacttcatctgatggaggagttcagagtatggcatttgagagcttatcagaaaagcttcagaatgtatttaaaaatctgcgtggtaagggtcgcctgacggaggcggatgtaaagactgcactgaaggaagtcaagatggcacttctcgaggcagacgtcagcttcaaggtggtaaagcagttcgtaaaggctgttcaggaaaaggccgtcggagcagatgttatgaacggtctgaatccgggtcagatggtgatcaagattgtaaacgaggagctcatttctttgatgggttccgagacgacggagattgcactccgcccggcctcggaagtgaccgttatactgatggcgggtcttcagggagccggaaagacgacaacgactgcaaagctcgcagcgaagttcaagtccaaaggacgcaagccgttgctggcggcctgcgacgtatatcgaccggcggcaatcaaacagctgcaggtaaacggagagaaggtcggtgtggaggtatttacactcggcgataaggaaagcccggtatacatagcagagcaggcagtggcatatgcgaagacgaatggcttcaatcttgtattccttgataccgcaggacggctgcatgttgatgaagatatgatgcaggagctgcagcagatcaaggaagcggtttccgtagatcagaccgtacttgtcgtagatgcgatgaccggtcaggatgcggtgaatgttgcgaccatgtttgaggaaaagatcggaattgacggtgtcattctgacaaagcttgacggtgatacgagaggcggtgcggcgctttctattaaagcgacctgcggaaagccgattttgtatgctggcatgggagaaaagctttccgaccttgaacagttctatccggatcgtatggcttcccggatccttggaatgggtgatgtactttctctgattgagaaggcgcaggatacgatcgatgagagcaaggcaaaggaaatggagcagaagctccgcaaggcacagttcggatttgacgattatcttgagagtatgaatcagatgaagaatatgggcggtatttccaagatcctgagcatgatgcccggtatgggcggcgcgcagatgaagcagattgaggatgccattgatgaaaagcagatggcacggatcgaggcgatgatcctttcgatgactccgaaggagcgtgcgaatccggacatcctgaatccgtcccgcaagcgcagaattgcagatggcgcaggcgtggacatcagcgaggtgaacaagctggtgaagcagtttgaacagagcaggaagatgatgaagcagtattccggaatgctcggcagtaaagcagggaaaagaggtaagttcaaacttcctttttaaccatagagattgaaaatttcaaggaggtgaaatgaaatggcagtaaagatcagattaagaagaatgggacagaagaaggctcctttctatagaatcgtagtagcagattccagatccccgagagacggaagatgtatcgaggagatcggtacttacaatccgaatacagatccgagcgagttcaagatcaatgaggagcttgcaaagaagtggcttgcaaacggtgctcagccgacagaagtagttggaaagctcttcaaggcagctggtatcgaaaaataagccgggattagaggtgagcaaaaatgaaagagttagtcgaagtgattgcaaagtctctagtcgataatccggacgaggtcgttgtcactgaaaaggacaccggaaaagcactcgttctggagctgaaggtggcttcttccgatatgggaaaggtcattggtaagcaggggagaatcgcgaaagcgattcgctccgttgtaaaagctgcagcatcgaaagaagataaaaaggtgattgtagatattttacagtaataggcaggaatcaggtctgtcccgaaagtgtaagaaacgcttttgaggcagactttattatatatgtgaaacagttttataaatgaaggagaagaggtatgaacaatatcctgcaggtaggagccgttacttccacacacggattggccggtgaagtaaaggtgttcccgacgacggatgatccaaagcgcttcaagaagctgaaacaggtgcttctggataccggaaaggacatgcttccgcttggggttgagcatgtgaaatttttcaaaaacatggtaattttgaaatttaagggctatgatcggattgaagatatcatgggctttaaagggaaaaatctgtatgtgacacgggaaaatgcggtaaggctcaaaaaggatgagtacttcattgcggacctgatcgggatgaaggtatataccgaggataaggcatatttaggtgaactgaccgaggtgatcacaacaggagcgaatgatgtttacaccgtccgcatggaaaatggaaaggatgtcctgatcccggcaattggacagtgtattttgaatgtagatgtggagcatgaaacgatgcaggtgcatctgctggagggacttctggaatgaactattatgtcatgactttgtttccggagatgatcgagaacgggatgcatacgagcattatcggacgcgcgatggcgaaagggctgcttacgctccagacgatcaatatcagggacttttcaacacgcggagacggacgtatcgatgactatccgtatggcggcggagccggaatggtgatgcaggcagaaccggtctaccgggcgtatacggaccttgcagcgcgcataggacatcggccacggctggtttatctgacacctcagggaaagacctttacccagcagatggcgaaggaactggcactggaagaggatctggtgttcctctgcggtcactatgaggggattgatgagcgtgtgctcgatgagatcgcgacggactatatttccattggcgattatgtgcttacaggcggtgagctgccatcgatggtactcatggattcgatttcccgcatggtaccgggcgtgctcagcaatcaggagtccggcgagactgagagcttttccggaagcctgctggaatatccgcagtacagccgcccggaggtctggcatgacacagcgacgcctccggtgctcatgtccggacatcatgcaaatgtggaacgttggcggagggatcagtctttgtatcgaacgttgaagcatcgcccggatttgctggatggtgtggagctggataaaaaggatcgaaaatttctctgtgagctgcttgaaaaggagccggtggaacagctgccgtttacatccggcacagctgcgtggtccggagaaaaaggcgtggcagatccatatccggtgcgtgacaccgagcagaaagttttacggaaattacttgcaatttcaaataaagcatgataaaataaaaatgttgtgagaaaatagatggtcctctattacaggaacagcacatatgtaagtggccgacaataagcgtcgtaccacgcaagtgcataggaatacgtaataagaacatccaatgattaaggaggaacaacacgatgaacgacattattaaaaacattgaagctgctcagatgaaggctgaggtaccgcagttttctgtaggtgacaccgttaaggtttacggcaagatcaaagagggaaaccgcgagagaattcaggtattcgagggtatcgtaattaagaagcagggcggaagcgtaagagctaccttcactgttcgtaagaattccaacggtatcggcgttgagaaaacctggccgctgcattccccgtctgttgagaaagtagaagtcatcagacacggtaaagtaagacgtgctaaactgaactacttaagaggccgcgtaggaaagagcgcaaaggtaaaagagcttgtaaaataatggatcgttcagggacaagtacattatgtatattgtccctgtttacgttttgccggaaaggggaaccggatgagagaaaaaagacgtgcgaagcattcgattataaagaatattctgctctggacgtttcagattcttgttgtgattttgtttgcatatgtgctcgtttacttttttgggcagtccaggacaaatatcggacagtcaatggatgtgacactttccggtggggataccgtcttaatggacacacttatttatcaagtgggatcgccgaaaaggggcgatgtgatcgcgtttaagccaaacggaagcggcaccgggcattcgagtatcaagcgtgtcatcggtctgccgggtgagaccatacagattaaggatggaatgatctatatcgatggcgaggtgtatctggaaaaaaagagctatccggttatcacaaacccggggatggcatccgatggaatcacacttggaaatcaggagtattttgtgctcggagataatcgcaataacagcgtagacagccgctttgcggatgtggggacggtaaaagcttcctatatagaaggaaaagtatggtttgtgctttctccgtcggagcatcgcgggctggtcaaataatggaggtagattatgaattatcagtggtatcccggccatatgatgaaagcgaagcgcatgatgcaggaggatatccggctcattgaccttgtgattgaaatcattgacgccagagttccgctttccagccgcaatccggatatcgatgagctgggaaaaaataaggcgcgtctgatcgtgctcaacaaggcggatctggccgatgagcggcaaaatgacgcatgggcggctttctttcaggagaaaggctattttactgcaaaggtgaatgcgcgcagcggcgccgggatgaaaaagattcaggagacgattcaggaagcctgtaaagaaaagatcgaacgagatcggagacgcggtattatgaaccgcccggtacgtgcgatggtcgtcgggattccaaatgccggaaagtccacatttattaatacgctcgcaggcaaagccagtgcaaagaccggaaataaaccgggtgtgacgaagggcaaacagtggatccggctgaacaagagcattgagctgttggatacgccgggcattctgtggccaaagttcgaggatcagatggtggggctgcggctggcagtcgtcggctcgatcaaggatgagctgctgcaggcagaagaactcgcactgtggctgcttggctatacgcgagaccattatccgggacttttgcaggcgcgttatcagattccggaagaaggcagcgagctggagctgcttggcggcattgcaaatgcgcgtggctgtaagttaaagggggatatcccggattatccgaaggcagcagtgctgtttatcgatgatttccggagcggacgcctgggacgtttgacattagaacagccgcctgtccgctcaacggtgtaactcgtgaattgacagcaattgatacgggcgttacaataagtactggcagacacctgccaaaaaatcagaaagtggtgatgagatgggcgaagaaaagaagccgaacacggatgacctggaaaaaggagccggacaaaaggtggatatgaagaaagaaattctcagctgggtattttacattgcatttgtgcttgtactgacctgggtaatcattaccttcgtcggacagcgtacgagagtagacggacgttctatgatgaacacgctgcatgacggggataatctgatcgtagagaagctttcttatcggttcagcgacccgaaacggtttgatattatcgtatttccgccgaccggcaagaaggaatattatatcaaacggatcatcggtttgccgggagagacggtacagattgatgagaatggcaatatttacatcaatggtgagttgctggaagaaaattatggtgcagagacgattcagaatccgggacgtgcggcaaaaccgatcacgctgggtgatgatgaatattttgtgatgggcgacaaccgaaacaacagcaaggacagccgctctgaggaggtcggaaacgtcaagcggtcccagatcatcggacgcgcatggctgcgtatctggccgctcaataagtttggacttttgaagcatcagtagaactgttcgtttggcagggtccggaaagtaagtggtggaaggcttggaacagaagaaaaagaaaaaaagtgctgtaaaagaagtggtgagctggttggtttacctgattatttttgcggctgtggcattttttttgattcattatgtaggcgaacgtacggtagtgagtggtgactccatgttgccgacgttgcagaatggggacaatctgattgtagataagctttcctatcgctttcgggatccgaaacggtttgaaatcgttgtgtttccgtttcggtatcaggaggatacctactatatcaagcggatcatcggtctgccgggtgagaccgttcagatccatgatgggaatatttacatcaacggtaaacagctcaaagaggactacggaagagaaacgatccggaatccgggcctggcttccgaggctgtgacgctaggtgaggatgaatattttgttctcggggataacagaaataacagcgcagacagtcgtgagccaagtgttggaaacattcagaaaaaggatattctcggacgtgcatggctgcgtatctggccatttgaccagtttgggctgctagtacatcatactgcaaataacggtaccacataacctgcctgaatgttcattacgcgttattagttcggttaatttttgtatgctgtaccagacatgtgaacagcaggaggatgcgatgaaatcaatttcagagataaaacgggaatttgaacagacaggcgagctggagcttcctgcgctgtttgctcagtatgagtcagatgcccgcaacggggtgacagcgttgattgtgcgttaccggaagcagcttgcaaagctgtctgcagagcgggaacgccttgagaagatgcgttgctatgagcatcagtatgagcagcagggactggtgtgcggaattgatgaagcgggccgaggtcctctggcaggtccggttgtggcggctgcagtgattcttccgaaaaactgtgagattttgtatctgaacgattcaaagcagctgacggaaaagcgcagagaggctatgtttgatgagatcaaagataaggcagttgcttatggcatcggaatggcaagtccggcacggattgatgagatcaatatcctgcaggcaacctatgaggcgatgcggcaggcgattgctcagctgaatccgcagccacaggtgttgctcaatgatgcggtgcggattcctggggttgcattacagcaggtaccgatcatcaaaggagacgcgaagagtctttcgatcgcggcggcgagcgtgcttgccaaggtgacgagagatcgattgatgcgggaatatgatgcactcatgccggaatatgggtttgcatccaataagggctatggcagtgcggcgcatattgaggctttgcagcagtacgggccgacgccgattcaccgcagaagctttataggaaattttataccacagtaattcggtggggagagagccggaatgagctgtgaatagacgaaaaacaggaacattttatgaaaaacaggcagcgagatatctggagagccggggatatgagattctgtggcacagttaccgctgccgttttggcgagatagacctggtagcacgcgacggcgcctatctggtttttgtagaggtgaagtaccggagcggacgcgcgatgggagaaggaagctgtgcggtagatgcacgaaagcagcgcaggatttgctctactgcagcctggtatcttatggaatatcatttgccggcgacgacaccgtgtcggtttgacgtggtgtctgtggatggagaagagatttcgctgattcaggatgcatttgcatacagaaattgaacgcaggaggaatataaatggaatggaaacggaagccgggaacatggcagatgacggagcatacaaagaagggtgtgtgctatgtgtcgttcccgttgctggatgcagagcggggctttgtgcatggcttcagcacccggatcggcggtgtcagcgagggggatttatcgtcgatgaacctcagttttacaaggggagatgatccggaacgtgtgcgggagaactaccggaggatcgcagcggcggtcgggtttgagacggatcggcttgtgctcacgcatcagacgcatacgaaccatgtgcgtgttgtgacagaggcagatgcaggaaaaggcttcgtgcgggaacgggattataccgatgtggacggccttgtgacagatgtaccgcagctggtgcttacgactttttatgcagactgtgtgccgctgttttttatagacccggtacacagggcaatcggtctgtctcattcaggctggcgcggcacggtcagtgatatcgctgcggccacagtgaggacgatgcagggggaatacggcagcagaccggaagagctgcttgtcgggatcggtccgtcaatttgtcaggactgctatgaggtgagtgaggatgtgatcgaagaattccgggcatcctatgaagagaagctctggatgcgcctgtaccgggaaaagggaaatgggaaatatgagttaaatttgtgggaagcctgccgtcagaatctgctgcgcgccggagtgcttccggatcggattgaggtgacagatttgtgtacctgttgcaaccctcagatatttttctcgcatcgtgcttccggcggaaaacgcggaaaccttgccggatttttgatgatcagggaataatttacgacattttcagccaattttcttgacgtggattttacaaaatgttataaaagagaagaataaaacagaacggaggacacctagtctatgtctgagtatgataatctggaaaatattttgccggttggaccgctgaaaatcgcggcgctggagggctgccgtgaatttggaaagacggtagacggatacctgacgaagtcccgtcaggacgcagtgaagaaacacccgtcgcttgcaaagcttccgggctatgtggaagattcttatcttttgagctgcagctgcccgcgctttggtaccggtgagggaaaaggacagatccatgattccgttcgtggcgcggatctgtatattctcgtggatgtgtgcaattacagcctgacctataaggtttgcggctttgagaaccatatgtccccggacaaccattttcaggatttgaagcgtatcatttctgcggcgaccggaaaggcaaaacggatcagcgttgtgatgccgttcctttatgaaggccgtcagcacaagcgcacgaagcgtgagtctctggattgctcgctggcactgcaggagcttgtcgatatgggtgtgtcgaatatcatcacgtttgatgcacatgacccaagagtccagaatgcaatcccactgagcggtttcgattcctttatgccgacgtaccagtttttaaaagcgctggtcgataccgtgccggatttcaggatagataatgatcatttgatggtcatcagcccggacgagggcgcgatgagcagagcagtctatttttccagtattcttggtgtggatatgggtatgttctacaagcgcagagactattcgacagtcataaacggccgaaatccgattgtggcacatgaattcctcggtgattctgtggaaggtaaagatgtcattatcgtagatgatatgatttcctccggggatagcatgctggatgtggcaaagcaggtcaaaagccgtggggcgaaaagggtatttgtatgtacgaccttcggcctgtttacagacgggctggagaagttcgacgagtactatgagaagggctacattacgaaggtactgacgacgaatctgaactaccgggatccggagctgctttccagaccatattatgcggaggcagatatgacccgcttccttgcaatgattctggagcatttgaatcatgacgttactttaagtacactggagtctccgacaaataagatcaatgatctgctcgggacgatgcgtgtgcttcattcgggcaaaaactgatacatggaagctgccgtaaaaggaatgtgcggcagcttcctttttaaccgaatgcagaacgtctgaaaaagaacagaaatggatttaaagatataaatatgaagaaaaattttgaacataaaatcagccgtgtgcttccggaaagcattgcggaggagctggagattgagccgggagatgtgcttcttgcggtaaatgaccagccgattgaagatgtatttgactatcattattatacgaatgaagagtatctgactgtgctcatccgaaagccggatggggaagagtgggagctggagattgaaaaggaatttgaggaggatctcgggattgagtttgagagctcactcatggatgagtatcgatcctgccggaataagtgtattttctgctttattgaccagatgccgcctggaatgcgtaagaccctctactttaaagatgacgattccagattgtctttcctgcaggggaattatgtgacgctgacaaatatgagtgaccacgatattgatcgtatcatccgttatcatctcgggccgatcaatatctcctttcagacgacgaatccaaagctgcgctgtaaaatgctcaacaaccgctttgcgggtgatgtgtttccgaagattcggcggctggcagatgcggggatcgagatgaacggacagatcgtgctctgccgtggggtcaatgacaaagaggagctggagcgctcaatccgggatatggcaacctatctgccaagccttaggtcggtctctgtcgtgccggtcggtctttcgaagtacagggatggcttatatccgctggaaccgtttgatgcggcttcggctgcagaagtgatcgatacgattgaagcatggcagaaaaagatttatccggttcatggtgtacatttcatccatgcatcggatgaatggtatttgctggcaaatcgcccgcttccggaagaagaacggtatgacggttatctgcagctggaaaacggcgttggtatgttgcgcctgctctatgaggaagtaaaggcggaagtagagacgatggagatggatgcatccttgcatcgcgtcctgtctttggcaaccggaagactcgctgcaccgtatatggaaaagcttggcgcgatgattcgggagaagctgccaaatctgacgcttcaggtgtacgagatcaggaacgattttttcggagaacgcattacagtatccggactcatcaccgcacgggatctgattgcccagctgaagggacaagaactcggcgaagagctgcttcttccgtgcaatatgctgcgcagtggtgaggatgtatttttggatgatctcactgtggcggatgtggaaaaggctttacaaacgaaacttcgtattgtagaatcagacggatgtgattttgtccgcgcagtgagcggaaggtaagaggtgcgcccggatcaattccgggcgtatgggaaatggaaaaggaggacatgagatagatgagtagaccgattgtagcgattgtggggcgtccgaatgtcggaaagtcgacattgtttaatgcgctcgcaggcgagaacatttcgattgtaaaagatactccgggcgtgacacgcgaccggatctatgccgatgtcgagtggctgaatgtcaattttaccctgatcgataccggtggaattgagccggacagcagcgatatcattttatcccagatgcgggaccaggcacagatcgcgatcgatacagcagatgttattatgtttatggtagactgcaagcagggattggtcgatgcagatgcgaaggtggcggacatgctgcggcggtcccataagccggttgtacttgttgttaataaagtagacaattttgagaagagcatggcagatgtctatgaattttataacctcggtatcggtgatccgtatccgatctccgcgagcaacaagcttggcatcggtgatatgctcgaccatgtgattgcctgctttgatgagggcatgggcgaggaagcagaagatgagcgtccgcggatcgcgatcgtcggaaagccgaatgtcggaaaatcttctctgatcaataagattctcggagagaagcggctgatcgtttctgatattgcgggaacgacccgtgatgcggtcgatacggtcgtaaagtggaatggcagcgaatatgtatttattgatacagcaggtctgcgccgcaagagtaagatcaaagaggagctggaacgctacagtatcatccgtaccgtttcagcggtagaccgggctgatgtcgtagtgctgctgattgatgcaatcgagggcgtgaccgagcaggatgcaaagatcgccggtatcgcacatgacagaggaaaaggtatcgtcattgcagtgaataaatgggatgcaatcgaaaaggacgacaagacgatctacaagtatacgcaggatgtgcgccagacgctctcctatatgccatatgctgagatcctttttatttccgcagagaccggacagcgtgtgccaaagctctttgagacgattgatatggttatccagaaccagtcgatgcgcgtggcgaccggtgtgctgaatgaaattatggcagaggctgtggctctgcagcagccgccttccgataagggtaagcgtctgaggctttactatattacgcaggtagcggtgaagccgccgacatttgtcattttcgttaacgacaaggaactgatgcatttctcctacacaagatatctggaaaataagatccgggatacgttcggctttaagggaacctctttgaaatttatcattcgggagcggaaggagaaagacgcgaagtagcatggaacggttaatttgtattatcataggctatgtatttggtctgtttcagaccagctatatttacggaaggctgcatgggatcgacatccgtaaatgcgggagcggcaatgcggggacgacgaacatgctccgtacgctcggaacgaaggcaggagcaatcacgctgctcggcgatgcgtttaagtgcgtgatcgctgtacttgttgtacgtatgctttttgccggaaaatatccggatatgctgccgctgctgtcgatctatacggcagctggtgtcgtgcttgggcacaatttcccgttttacatgaatttcaagggtggaaaaggtatcgcagcgaccgcaggattgattctttctatgagctggcagatgacattgctcggtatactcacattcgggacagcagtggcactgacccactatgtgtcgcttggctcactgcttgtttatatcggctttctgatcgagctgattgtgtttgggcagaatggaatgttcggtatgtcacaggcatatttaaatgagatgtatgttgtggcggttttactgacagcgcttgcattttttatgcatcgggccaatattgtccggctggtacatgggacagaacgaaagacgtatctgtttcgccataagaaataaccggcattatgcaggtgcagacggcctttgagattttgatcttttgaccctggtatcatcattattacattatggagggcggagaagaatggaaaaaataggtgtaatcggagcgggcagctggggaactgcgcttgcaatcctgttaaatgaaaatggaaatgatgtaaccttgtggtcgcaccgtgcagaagaggctgcgaaggttcagaaggaccgggagatttccaagcttccggggattcatattccggagagcattgcagtgaccgcagaccttgcagagacggtgcgtgggaaaaaggtgcttgtgctcgtcgtgccgtcaaaggcagtgcgtgagacggcggaaaaaatgcgtgcgtatgtggagccgggaacagtgattgtcagcgctgtgaagggcattgaagagggaacgctttttacaatgaccgatatcatagaagaagtgattccgcaggcggagacagcggcactttccggcccgagccatgcagaggaggtcgcacgtctcttgccgacggcatgtgtcatcggtgcgcatacagaagagacggcacgttttctgcagaagctctttatgagcgcggtgtttcgtgtgtacatcagcgcggacatgctcggcattgagcttggcggcgccctgaaaaatgtcattgcactggcggccggaattgcagatggcatggggtatggcgacaatgcgaaggcggctctcattacgcgcggaatcgtagaaattgcgcggcttggcatgaaaatgggcgggcggctcgagacattttccggtctgaccggcattggagatctgatcgtgacgtgtgcgagcatgcacagccgcaaccgcagagccggcatcctgatgggacagggcaagacgatggaagaggccatgcaggaggttaatatggtcgtcgagggcgtctattccgcaaaggcggcgatggagctggcaaagaaatatgatacagagctgccgatcattgagcaggtcaatcagattctctttgaggggaaagacccgaaggaagcagtcagcaatctgatgctgagggactcgaataccgagaattccctcattccgtggccgggacagagaaattaaatgatgatgattgcgagagcatgaaatgcgaagcaatccgtgtatcataggggacaaaataccttgggattcgtaggcatcagtagtgttaaaccgaaaaaaatataagctgcaggcgcagcggagctttgctgaaatatgtaaaatcaggcaaaaatccgttgtgcctgtagcttttttaacaaacggtgctttttatgcacaatgcgggaaaagcatctttttcgaaaagagagactgttaaaattgcaaaatggcatccggagtgaaaatgtcgaagaagcgaaaaaaagttctcaaaaaagtacaacggacttgttgtgaagaaaatcgaagtatggtataatatgaccaaatgcaaaagaatgcattggtatgtcaaaaaattaacaaaacagtgcacggttttgcgaatacaggaagggagataggatatgcatatcatttacgatgaaaacgggaatccggtttctcacggacatgagcatgagcatcaccacgatcatgagcatcatcatgagcatgaccatgctgcctgcgatgcacagaactgtgagagcggctgcggcggctgccaggataagaccgcagcgctgattgattacatgctcaagcataatgagcatcatgctgctgagctggatcagctcgcggacaagcttcatgcagagggcaaggatgctgctgcagatcagatccgcaaggcggtagatgagttcaaaaaagggaatctgtatctgggacttgcgcttgctaccgtaaaggagcagtaaggactgaagttttgatatggcagactggaggtggacaatatgtgtctgtcgactgcatataaaacagacgagccggacagtatcatcatggaatacgtcagcaagatcgaagtagacggaagtctcattacactgacggatgtactcggtgatacaaagacggtggagggtacgatcaagatggttgacctcaccggaggagtcgtcaaaatcaactgttaggagcagaagctcccatatacttatgatcgacaacaactgcattgtgttttcggcggttgtgcgcgatagaaaaattatgatgtggaggtaacacaactatggcaaaagtaaagttaacagaactgatgaaagaaaaacagcttctttcgttcgaagttttcccgccgaagacggacaagggaatggagaatcttccgggaacgattgaaaagctctgcgagttcaatccggagtacatctcctgtacatatggagcaggcggcggaaatgtaggacgtaaccgtgaggtatgtcaggagatcatcaaggcaggcaccacaccggtaacgcacttcaccgttatcaaaaatacaaaggaaggcatcaagcagcagctggagcagtatctggcagagggggtagaccatatgctggcactgcgcggcgatattccgcttggcgagaccacgacctgtggtgattttgattacgcaaccgatctggtggcatttacacgtaaagagttcggcgacaagttcgagatcgcagtagcaggatctccggagggacacatctcctgccgtagccttgatgctgatatcgcagttctgaaaatgaaacaggacaacggcgcagactacatcatgactcagctctgctgggatatggagcagttcaaggtatggctggacaagatccgttccgctggtgttaccatgccggtagatgtaggtatcatgccgattctggatcaggcagcaacgatcaacatggcactgtcccgcaatggctgtgtaatggagcgtgagcttgcaagactgatctccaaatactggctgttcccgaatccgtttgctgcaaaggatgcagagggcaagccgttcgatatgttctatgagcagaaggtaagagatttcaaggaagctggtatcgagtacacgatcaagcagatcgacgcataccgcgcacttggcgtagatggcatccatctgtatgcactgaacaagtggcaggatgtatcccgcatcatcaaagagtccggaatgcgcacgctcgtttaattattctatttactgtaagacttgattacggcttttgcggcgaagctgcaaaggccgggtgaaataaaattgcggaagaagcaacaggaggaaactatggcacacgtaatagcaattgccggcaagggaggcgtaggaaa

SEQ ID NO: 2864 - DNA, 2451 bp, Unknown
  16S sequences of unknown bacteria
gcaacagcagacttccagcagaaaattacatattcaaaaagcgggcagatagacgatcttgtttcggaaataaacgagcgggtggagcgaaaggaacgggtgcttgtcacgacgctgaccaaaaaaatggccgaggatctgactgaatatctcacgggtgtgggtataaaggtcagatatatgcaccatgatattgataccatagagcgcatggagataataagggatctgcggctcggggaattcgacgtgcttgtgggtataaatctgctcagagagggacttgacattcccgaggtttcccttgtggctattctcgacgccgataaagagggctttctgcgaagcgaaagctcacttgtgcagacggtgggacgtgccgcccgaaacgccaacggcgccgtaataatgtatgccgacagcgtaactccgtccatggaaaaggcgataaaggaaaccttccgccgccgcactattcagcaaaaatataacgaagagcacggcatagttcccaagaccatagtcaaagaggttagagacgtgcttgaaatttcgggaaaggttcccgacaagggagcagtcaaacgcctttccgacaaggaaaaggaacagcttataaagaaactgaccaaggaaatgcaggtcgcctcaaaaatgcttgaatttgagcacgccgcctttttgagggacagaattaaagagataagagagggtaaagaaaatgccgagagaccaaatcgtaataaaaggcgcaagagcaaacaatcttaaaaatatcgacgtgacaatcccgcgggacaagctggtcgtttttaccggagtgtcgggctcgggaaaatcctcccttgccttcgacaccctttatgccgagggacaaaggcggtatatcgagtctctttcttcctatgcgagaatgtttttgggacaaatggaaaagcccgacgtggacagcatagacggcctttctcccgccatttctatcgaccagaaaaccacctccaaaaacccccgctcgacggtgggaacggtcaccgagatacacgattatatgcgtctgctttttgcccgcataggaattccccattgcccggtatgcggcagggaaataaagcagcagacggtggatcagatggtcgaccaaattctcgctcttcccgaaagaacgaaaattcagattatggctcccattgtccgcggacgaaagggagagcacgtaaaagaactcgaatcggcccgcaaaagcggttttgtcagggttcgtgtcgacggcagtatgtatgaccttaccgaggagataaagcttgacaaaaacaaaaagcacaacatcgaaatagtggtcgaccgtcttgtcgtcaagcccgaaatacgcagccgtcttgccgattccatagaaacggcctttgagcacggcagtcttatgatcgtcgacgtcatagacggggaggaaatgatgttttcgcaggattatgcctgccccgagcacggaataagcatcgaggagctgtctccgagaatgttttccttcaacaatcccttcggagcctgtaaaaaatgcgacggtctcggcgtttttatgaaaatcgaccccgacgccattgtgcccaacaaacttctttcgataaatcagggggcaatcaagggcagcggttggagcatgagcggggaatacggctcgattgcaagaatgtatttcgagggtatcgcaaattactacggcttttcccttgacattcccttcggcgaaattccccaggagggcagcccacattgtatgcctgaattggcttatcgcctacacaaaaaaattcccctgacccgcaaattcggcggccgcacaacctcctacgaaggcgcctttgagggagttataaacaatctcgagcgcaggtataaggaaaccgacagctcctattcgagagacgacatcgaaagctatatgacggcgctgccctgtcccgagtgccacggcgctcggctcaacgaaaaatcccttgccgtaacggtgggaggaaaaaatatagacgagctttcccgtatgtcggttgtcgagctgcttgattttatagaaaatcttaagctgaccgaccgcgagcttatgataggaaatctcatattgaaggaaattaaaaaccgtctcggctttttgaaggacgtgggactgggttatctgacactttcccgttcgtcgggcaccctttcgggcggagaaagccagcgaatccgccttgcaacccaaatcggttcctctcttcagggtgtgctctatattttcgatgagcccagtatcggtctgcataaaagggataatacaaagctcatcgccacccttaaaaagctccgcgatctcggcaacacccttgtggttgtcgagcacgacgacgaaaccatgctcaatgccgactatatctgcgacatcggcccgggagcgggcgtgcacgggggaaatctcgt

SEQ ID NO: 2865 - DNA, 28314 bp, Unknown
  16S sequences of unknown bacteria
aacgaggatttggcacggcagtgccaaagacgacgattgaggttgcggaacggagcccctaagtcttacgctgcagcattttttccgcgaaccagcttaagggtgcgcaacaccgaggacgaggacagccctgaaagggctaccgcagtccgaagcccgcgccccgtaggggagcgggccgcagagcgctgttcgcgggcgatggcggccaatcagggtttttcgaccgatcaatactcggcgctgccggtggtacgggggaagggcagaacgtcgcggatgttggtgatgcccgtcaggtacatcaccagacgctcgaagcccagaccgaagcccgcatggggatgcgtgccgtagcggcgggtgtccagatagaaggagtactcctcctcgttcatgcccagctcatggatacgccgggtcagcacgtccaaacgctcctcacgctggctgccgccgatcagctcgccgatgccgggcaccagcatatcggtggcggccacggtcttgccgtcgtcgttcaggcgcatatagaaggccttgatgtccttgggatagtcatagacgaacacgggcttctggaagtgcttctcggtcagatagcgctcgtgctcagtctgcaggtcgatgccccagctgacggggtattcgaacttctggccgctcttttgcagaatgtcgatggcctcggtgtaggtgcagcgggcgaaatcgcttccggcaatggcggtcagcttgtcgatcagtcccttttccacaaagctgtccaggaaggccatttcctcgggcgcttcggccagaatgtgggtgatgacgtacttgagcatatcctcggccagcaccatgtcgtcaaacaggtcggcgaaggcgatctccggttccaccatccagaactcggcggcgtgacggggcgtgttgctcttttcggcccggaaggtgggaccaaaggtgtacacgttgcggaaggcctggcagaaggtctccacgttcagctggccgctgacggtcaggttggcgggcttgcagaagaaatcctgcgaatagtccacttcgccgctttcggtcttgggcacgttttccagaggcagggtggtcacctggaacatttcgcccgcgccttcgcagtcgctggtggtgatgaggggcgtatgcacgtacacaaaaccccgctccgcaaagaaggcgtggagcagctgggctgccagcgaacggatgcggaacacggcgtagaaggtgttcgtccggggacgcaggtgggcgatggtgcgcaggtattcgaaggagtggcgctttttctgcaggggatagtcgggggagcacaggcccaccacttcgatctccttggccttgagttcaaagggctgcttcatgccgggggtgggcaccaaatctcccttggcccggatggcgctgcccagtgtcaccttcagggcgttggcaaagtccgccgttttgccgtcctccagcacgatctgcaggtttttgaagtaggtgccgtcgttcagctcgataaagccgaaggccttgctgtcgcgcacggtgcgcacccaaccggaaacggaaacgtcggtcagggtctcggtgggcggctgatgaaacagctcgcggatgctcgtgtctttctctttcatggaagttcttcctcctcagcgttttgggaaaatcaggcctgcctgcccagcatggccgcgccgatcatgccggcgtccgcgcccagacgggccagctcgatgcgggaatagggcagcgttttgaacagcaggtacttgggcacccgggcgcgcaccgcgtccagcaggaaggaaccggccttgctcacgccgccgcccagcacgatgacctcgggatcgaggaacgcaatgatggtgtaacaggccttggccagatagtccacataggtggtgaaaaccttcatggccgcgttgtccagctcccgcgccgcgtcgaacacaatcttggcagtgagcttctccgggtcgccgcccaccatttccatcatcatgctttcggggtgctgctgcagaatctgcttgcccatacggatgatggccgtggcgctgcagtagcgctccaggcagccttcgttgccgcaggtgcagggcacgccaccgatgtccatgggaatgtggccgatctcgctgcccacgccgtggaagccgctccacggacggccgttgatgacgatgccgccgcccacgccggtgcccagcgtcaggaacacgctggaagaagtgcccttgctcacgcctgccacgctctcggcaaagccggccacggtggcgtcgttgtcaataaagacgggcttgttgatgtatttctgcagttcgctgcgcaggggaacgtccttccagcccatgttggtgcagaagatgacgttgccggtcttcgcgtccgcaatgccgggaatgccgatgcccacggagtgaacgtcgtccaccgtcagcttggcctcgtccagcaccttcagggcgcagcggcccatgtccgcgatgatctcctgataggggcggcccaccagcgtgggggtctcgccctgatggatgagctgaccttcttcgttcaccagaccgatcttaatgccggttccgcctacgtcaataccgatgtataccatgattccatcctcccgtactgcccatattttagaaaatgattgatttatgaattcgcactgtccccgttggaggagttttgcgcgatcatctcgttcagccgccggtccagctcgtgggcggcactgtagcccatgcgcttcaggctcagattccgggcggctacctcgatgatgatggccaggttccggcccggcttcacgggcatgacctgatagggcacctttacgcccaaaatgctgaccgtttcctccgtcaggcccagccggtcgtactccttggtggagtcccacttttccatgtggatgaccatgtcgatggacttggacagaatgacggagccgacgccgtacatggcgcggatgtcaatgatgccgatgccgcgaatctccatgaagtggcgcaccatttcgggcgcttcgcccaccagccggtcgtcggacacccggcagatgtccaccacgtcgtccgccgccagctgatggccccgcttgaccagctccagcgcggcctcgctcttgcccacgccgctttcgccggtcaggagaacgcctacgccgtaaacgtccaccagcacgccgtgacgggtcacgtggggagccagcacccggttgaggtacatgatggcctgcagggtgaatttggtggttttcacccggctcataaagacgggaatatcccgctccgtggcgatctgcaacagctccttgggcggggtcatgccccagcagcagacgatgcagggcaggtcgtagctcatgtagcgccgcagcaccttttcccgcacggtgggttcgatggattccagataggtcatctccaccttgccgatgacctgaggccgctcggcggcgaaaaactcataaaagccgcagaactgcattccgggccggttcaggtcggtgacgttgatgtccatttccttccgggtggtttgcgtcagcggttccagattcagggcctgacaaaattcctcgatggcgatcatgccggttcctcctttgcggtttgggtcaggtgctgggaaggccgagcacatgctcggctacgaaatgagccacgccgtcttcctgattgctccggcagacgaagcgggcggcctgtttggtctccgcccgggcgttgcccatggctacgctgttgtgggaaaaattcagcatactgatgtcgttcaggctgtcgccgaagaccatggtgttctccggggtcaggtccagccgtttcgccagccgccgcagggcgttgcccttggaaacgttgggggcgatgccttcgatgaagaagggcttggacatggtgaagtctgcctgtccccggaaagcctccttgatgagcggcatcacccgctgcacctcgctggggtcggtgacgctgagaattttcggcaccgggtagtcaatgaagcccagcagatcgcccacggcctgccctttcatgccggaggaatgccggtatttttcggagggaccgcactctttggcgtagtagaagtactcgcctcggtagacctgcacgtagaagccctcgttctgcaggtaacggacgatggcccgggcggtttccgggggaatggtctcttcctccagcacctgatggtcggaggagataagctgcgcgccgttgcaggcgatgtaggggcagtccacgccgatctgggcggcgtagggggctacgctggtctgggtgcggccgctggcgggaatgacgtggatgccccggcggatgcactcgcgcagggtggcgacggtgtagtcggacagcttgccctcgtcgttcagcagggtgtcgtccatatcggagataatggctttgatctcagtgttcatgatgcttgtctcctgtacggcgttttgcaaaaaaatcttgaagaagtgtttgggcttcttcctccatcaggccgcccacgcagggcacccggtggtaaaaggcggggtcctgtgtcagcgccagcacgctttcacagcagccctgccgctgatctcgggcggcgaagaagcagcgctccagctgggccatcaccatggctcctgcacacatggggcagggctccagcgtgacgtaaagggtgagaccgttcagccgccgggtgtgcaaaagctctgctgcctgacggatgcacagaagctccgcgtgggcggtggggtcgttccgctgctcccgcaggttgtgggcccgggcgatcacctgaccctgccgggccagcaccgcgcccacgggcacttcgccctcccgggcagcctgcccggcttcctccagcgccagccgcatcagttcttcgtggctcatgcgctgacgctttctgcggcttccgcgtggttctgattgacctgctggggttcccggaaggtgggtaccagctcatgcagacaggcgcgcatatcgccgccttcctcaatgcactggcgcagggtatccagcatggcttccagcctgtctacactgatctgttccggtttggcaatgaagatcttccgattctccgtccgggaaatgccctcgccgtccagcagcagctcctcgtagagcttttcaccggggcgcagaccggtgtagacgatctcgatcttctgcccgttttccggcgcgtagagctggatcatacgttcggccagctcccgaatcttcaccgggcggcccatgtccagcacgaacaactcgccgccccgggcaatgctggccgcctgcagcaccagactggcggcttcgggaatggtcatgaagtagcggatgatctccgggtgggtcagggtgatgggcccgccggagcggatctgctgctcaaacttgggcaccacgctgccgtgggaacccaatacgttgccgaagcggacggcggtaaactcggtggtggactgggcgttgcgggcctcgatgaccatttccgccagccgcttggtggcccccatcacgttggtggggttgacggccttgtcggtggaaatgagcacgaagcgcttgaccccgtggcggatggcggccagcgccgtcaggttggtgccgaatacgttgtttttcactgcctgatcggggcagtcctccatcaggggcacgtgcttatgagccgcagcgtggaggacgatctccggcttgtagcagccgaaaacttcatccagccgctgctcgtcccggatggaacccacgcacaggatcagcttttgagaaagatcctgccggtattcccgttccagatcggaatacaggtcgtacatatagttttcgctgatgtcgtataggacgatccgtttgggctgcaggggaaagagctgacgacacagctcgctgccgatgcttccgccgccgccggtgatgaggatggtcttatcccgcacaaaggcagccacctgcgtcatatccagctgttcctccgggcggcccagcagatcgccgatgttcaattcccgcagggccccggcgctgggccggctcccttccagattctgcaggggcgtgacccgcttgacccggcagccggtagcaaggcatttttcgatcaccgggttcaggtcggccttgggggtggaaatggcgatgatgatgtcgtcgacggaataatcgctggccagcttgagaatattgccgctgccgcgcaccacgggcacgccgctcaggctggagccggtgcgctgctggtcgtcatccaccacgatgacgggcacacagctgccatagtttccgtgctgcatctcatgcaccacattggcccccagccaaccggcccccacgatcatggtgcggcgctgaccgacagtgcgacgagggaagaaaggaaagtgccgccgggtgacggcatagcggtagatcagccgggatgcgcccaccagcgccatgctgatgagccagaaaagcgggtagatcagccggtgcagccggaaaagattctggggccgcacaaaataattggcgatgacggaatacagataggtacaaaccgccagcgccagcgtggacagtaccacccgcagcaggtcttccgccgaagcgtactgccacatggtgcggtaaaggccgaaaacggcaaacaaaatcagccccatcaaagtcatagccggggcgatacggaaataaatctgaaagaaagaataagaaatggtggtggtatagcgcagaacctgcgaaaggatcatggccagattgatcaaaaccgcgtccagcagaagccacagccccgtgcggacggctttctgcgttttgggtttaagcgtcacgacgtttcctccccctgcctcaggaactaaggtgcagaatcctgcacagttcttcattatagcacagaatcgggaaaatgcataggtttgacggtagtatggagaaaaaggcgttttgcggcagaaaacaggaatccggcagcccggggaagaaacttttcatagcgaaacggaaacaggttgggaggaaaaaacatgaggaaactggcgggatggatggcggcgctgctgctttgggcggcccttgtcccctgtgcggccgcggaaagcaaacggtacgaaaccagctttctggacgtgttcgacacgttttcacaggtggtggtctatgcggatacgcaggaggctgcgcaggaaattttgcagaccgtccatgacgaactgaaggtttaccaccggctgttcgatatttatcaggcttacgagggcgtgaataatctttataccgtgaaccaaaacgctgggatcgcgccggtggcggtggaacagcccctgtacgacctgcttactttcggtaaggaaatctatgctcaaaccggcggcaaaaccaatatcgcactgggcagcgtgctttccatctggcacgaataccgggaactggggctggccgatccggaacacgcggcggttccctcggcggaggagctgtaccgggcgggcgaacatacggatattgaccagatggtgctggacccgaacgccagtaccgtttatctggccgacccggaaatgtcgctggacgtgggagccatcgccaagggctatgcggtggagttgacagcgcggaaaatggaagcgcagggcgtggacagcctgctcatgagcatcggcggcaatctgcgctccatcgggcgaaagggcgacggaacgccctggcgggcgggagtgcagaatcccgatttatcggcgcagcagcagaaccttgcggtgatcgacctgacggacgcttcgctggtgaccagcggcagctatcagcgctactacacggtggacggccagcagtaccaccacattatcgacccggagaccctttacccggcggagcaccactgggccgtttccgtatggacggcggattccgggctggcggacgcgctgtccaccgctttgttcgtgatgtcgctggatgaaggcaaggcgctggtggaaggctggccgggcgtggaagccctttgggtacaaaaagacggaacgctggaatacagcagcggatgacctgatcgggcacggtgaacaaaaaacgtacgaaaaatcgccccggcattgccggggcggtctgctgtaataataaagatcagtctttgcagcaggcgcagtacagcgcgtagctcaggaaaccggcacaggtggcgaaggcttcaccggtctcacaaaggccggtatcttcgttgacactttcacaggcaacgccgttatccagcggcgtgcggctcaggtgcagcagagcgctgtccgcgtggccgctgagcaggctgttgcagatggaaaggatccacggatggggcgcgtgcttgcagccgatctccgcaatggggtgtccggcgaaggacagcggatagctctcgtcccggatcatggccgccgtggtttgccagatggggtcattttcttcacagaaaccgtagaaggggagcagcagcaggcttcccggcggctcgtcgtaaatgtcaaagtggccgttcaggtcgaccgaccacgcgaagaagggccgcccgttctgctccttgacgcagtgttcgtaaactgcccggcgggtgcgttccgcttcttccgccagctctggacggttcagcagcttcgccagcgcccgcagcgcatagcacaccagtgcgttgtcgtaggtcaggtaaatatggttatgcatatcgtccgtgggctgcaggaaggtctcatacattgggacggaaggatgctttttggcctccattctgcgtaaaatttcttcgagaccgtcccgcacaaagggccgggccgcaaaagcggtatcgccggtcttttccacgtagcggtccagggcgatgaccggcgcgcaaagctcgtccagctcgaagccgggttccagcatggttccgtcgataaagcggctgtgaacgccgaaattccgggcctgacgggtgaacacataggtcaggatctcccgggcgtaggctgcgtccaccgtcagaatggccgggaaggcccacagcagactgtcccgatcccagtacgcggcggagacgtagtagcgcgggcttcggctggtcatcaggcacaattcctccgtgtcgacggtgcggccggaagcgtagaaaaaggcgaagaacagattggtgttcagaagctcgtgaagcttcgggtcggcaagaggcttttcccgggcggacagccagcggacggtgcggtcgtaaaccgcgtcaaagccctgccgcagcagctccttggcgctggtggaggcggcaacgccctcatagcccacgccccacgggatatccagcacggcggtctcgccgggctgcagcacggtctcccggtagatgtcgtaggcaaaatccgaccgattccaccgggcctgctggtcgatctccgcaaattgctgcggatcggccacacagggcgcaaaggcgaacagcggaagccccggcttctggctgaaaatgaacatatggttccagccggatccataggcttcccggccctcagtcagttccgtggtctcgttgacctcgtgcagcgtctgatcccactgaccgtccgtgccgaaacggacggtgcggggttcggcactctgattctgaacggacagccggagaaccagcgcccgttcacccacgggggtgagataggtgcaggtgaagcggagagcctgttcctccgagacgaagcaggggatccagcagtgctcacggctccatacggggtgaaggggcagacgctggccgtccagctccacatagggacggatcagcccgtcctttccgcggatttccaaaagtcccttgacctgcatgtacaggaaggtgacgccctcgacggcaccgtcgttttcccggatggtgggcagggacagatattcgttgccagtgagctgataagccataaaggggctcctttctatgaccctgcgccgggttcgggctcggcgggttccagacggcggacgctttgccgctccaccagacaggtgcccagcagcgtccgttcgggggcaaggccccgttggcggatgtgtcgcagcagcatttccaccaccagatgggccttttgggaaatgtcctgcgacagggtggtcagcgccggctgcaccatggtggccagcggcagatcgtcaaagccgactacggaaacgtcctccgggacgcgcagccccagccgagaaagcgcctgcatcagctggaccgccgcctgatcggaggtgcagaaaaacgcggtgggatgatcgggacgtgccatcaactgccggagcgaatccggcgggaacagttcttcccggcgatgaaggataaattcctcccgcagctctatgccgccttcggcaagcccggttcggaaaccgtccagacggtgacggtctacgtcgctttcgtccacgttgttgcccagaaagcccacgtgccggtgtcccatgtgaatcagatattcgcccgcgatctgcccgcccgcgtcgtcatccatgccgacatggttggctccgggaatacgcacgtagcagtccgtgaaaacggtggggatatcggtcagggatttcagcgtgtgcagatgccggttgtacgcgccgctgaagatcacgcccgccacgttccatccccgcagatccgcatcgatctccttgtagttgtcggaaaagcggatcaggggatagtagccgttctgctgaagctccacggtcagcgcgcccacatactccgccgtgtaggggttgcggaagatattttcccccggcgaggcctgaacgatgacggcgatgacgtgggactcccgctgggccaacgaccgggcggcctgattgggcacgtagccggatcgtttcataatggtctgaatgcgctctgccgtgtcggcggagacacggctggaatttccattgagcacattggagacggtggtcgtgctgacgccggcctcctgtgcgatttccttgagggtgatcaacgtgccgcctccttttcaaagtgctttccatcaatataacacaaccgtaaatgctttgcaatgggttgaacgataaactttgcaatgatgaataaaacgggaattttttttccttacgacgcattgagagggtcaagcgatagtttcagctccaaaagaaaaataaaaacaaaaatctaatattttcaacactttcaacgattctttgcatgaaaacaaaaaaagtatcttgacaagggaatttttcggtgatagagtaaaagcaagttaagcggtaaatcaaaaaaacgaaatgggagggacgccgtatggatcgctctggaacgtggaagcggatcagccggaactggggactgtatctgctgctattgcccgcgctggtgctgctgattttgttcgcctacaagcccatgtacggcgtggtgatcgcgttcaagaactacaaaaattcgctgggcattctgggaagcccgtgggtggacccgctgtttaagaattttcagcgcttcttcaactcctatcagtgcggaaccaccatccgcaacacccttcggctgagcctgtacagtctggcggtggggttccccatccccatcattctggcgctgatgatcaaccagatcaccgccatgcgcttccgccgggcctttcagaccattctgtacctgccccacttcatctccacggtggtcatggtgggccttttgctgatctggctgtccccctccagcgggctggtgggcgcgttttaccggctgctgggcaaggaagcccccaacgtgatgaccagcgcctccggctttcccagcatctacgtctggtcggacatatggcagcacgcaggttgggactccatcgtgtttctggccgccctgtcctccatcgaccccaccctctacgaggccgccacggtggacggcgcgacccgctggcagaagatgcgctacatcgacctgccgctgctcatggccaccgcctgcatcatgctgattctccgggcgggcaatctgatgaacgtgggctttgaaaaggtcttcctgatgcagaacgacctgaacatgtccaccagcgagatcatcgccacctacgtgtacaagatgggcctgcgcaacagccagtacgcggtatccaccgccgttaacctgttcaataatctgatcaatttcggactgctgcttctggtgaactgtatcacccggaagctgggcgaaaccagcctgtggtaaggagggacggaggatgactacgacgaccgggaaacagacgctccatgcgtcccacggacgaaaccgcgtgcgccgccagcccaaggacgtggcctttgacgtggtgctctacctgatctgcgccgttttgctgatcctgatcctgtatcccctgtggtttatcgtcatcgcttccttttccgacccgtcggccgtggcgggcgggcacgtctggttcgtgccggtaggcttcacgctggacggctacgaggaactgctcaaccagcccaacgtctgggtgggctaccgcaacaccatcctgtacaccgtggtcggcaccctcgtcggccttgcggtcaatattccggcggcctacgccctgtcccggagggatctctggggccggaaggcgctgatggggctgttcgtgttcaccatgttcttctccggcggcctgatccccatcttcctgacggtgcaggaattggggctgtacaattccttctgggtgatggtggttcccttttcggtcagcgcctacaacgtcatcgtagcccgcaccttctttgagaccagcctgccgcccgatttgtgggacgcggcccagatcgacggctgcggcaacctgcggttcttcttcaccatcgccctgcccctttccaaggcggtggtctccgtcatcgccctgtggacggcggtgggccagtggaattgctacttcaacgccctgatctacatccgggacgagaggctgtacccgctggcgctgatcatgcgcaacattctggtcacccagcagattcagtcggcgctgggcaccggcgaggccgcgctgatcgccctgcgcaaggcaaacctgatgcgctatgccatgattatcgtcgccaccgtgcccatcatgtgcgtctatcccttcgtgcagaagtatttcgatcagggcgtgatgatcggcgcggtcaagggatgacgatccgtatcccaacgatggaaaaccaaacggcgcacgccgtttaggaaataaggaggtaacctcaatgaagaaactggtgtctctgcttctggccatcgcgatgcttctggcctgcgcctccgctctggcggagattcccgaaggcttccacgccgagggaatgcccatcgtggatgaacccatcaccattaacgtgctgacgatgcgctggggttccatgggcgattccttcaagaccaaccccttcctggtgaatctggaaaacgaatccaatgtgaaggtcaactggcagatcgtttcctccaacgactgggctgacaaccagaagcccgtgatgctggccggcggcgaaagcgcgctgcccgaggtggtactgggcttccagaccttcagcgagtccgacatcatcaacaacgtggaatacttcctgccgctggaagacctgattgagcagtatatgcccaacctgaccaaggccttcgaagaaatgcccgcgttgaaggccatctccacctccgcggacggccacatctactccctgccctcccggatgcccaagcgccccgtggcctgcaacgtgccggtcatcaacgtgaagtggctggaaaatctgggtctggaagtgcccaccaccatcgacgagctggaaaacgtgctgcgcgccttcaaggagcaggacgcgaacggcaacggcgaccccaacgatgaaatccccttcaccggcatcggcctgggcatggacttcctgtctcccttcggcatgaccgacgtgtacggccagcgctatctggtcaacgacgacggcaccgtgcgctatgcctacaccaccgaagaatacaaagagggcatcaagtgggcccacaaactctatcaggacggcctgatcgacaacgagctcttcactcagaacgaccagatccgcgacgccaagtgcgacgaccccaacgtctcccgcgtgggtttctgctacgcctggagctacgacgctatcttccgcaactggaaggatgaatacaaggtcatcgcgcccatcgccggccccgacggtcagcgctatcagcagggcgacctgaacggcctgtattccctcaagtccaaccagctgtccatcaccactgtgtgcaagcatcccgaagtggtgctgcgctgggcggatcagttctacaccggcgaagccagcatccagaacttctggggcggcctgggcgaagtgaccaccgccaacgcggacggcacctacaccctgaacaacccgccggagggcaccagcgccgacgcgtggtactgggatcgctccctgcgcgacttcggccccaagtactgctccgtcgagtttgacaagaagatcattctggatcccaccgagggcgacggcctgaaggtagctatggatgcggagaccgcccagtatgtgcgcccctgcttcccggaattgaagtacacctctgacgaatacaacgagctgtccttcctgcaggcggacatcgatacctacgtggataccacccgcgcccactgggtcgccgacggcggcatcgacgaggagtgggacgcctatgtggaacagctgaaaaccatgggtctggaagacatgaacaagatctatgaaggcgcttacgcccgttatctggcggcgcaggactgatcgaacgttctgacccttccacgagccggaggggcgcgccgggtacgccccctctgcgccctgaaacgccgcccggcggaaaaccgggcggttcttttctgtacttcatctatatttcacctaacatttcccaattttccgccgaagcagggaatgctccccggttttgcaaaaggagggtcgctcatgaccaccacccaatggacgggcaaaaattatcgcatcacctttctgacggaacgactggttcggctggaatatcagtccgaggggcgctttgaggatcggcccaccacggccgtccaatgccgaaatttcccgccggtggaggtgcaggtgcagcggcttcccggccgggtggagatggataccgccttccttcatctttcttatgatgaaaagcctttttccccggaggggctgtgcctttcggttaagggcgggctcagcgcctatatgagcgactggcgctacgggcagcccctgtccacgctgggcggaacggcccggacgctggatcaggcggatggggaaattcccgtgggggacgggctgatctcccgaaacgggttttccgtgctggacgacagccgctccatggttctgcgggaggacggcgcgcttcgcccccgggactatgcggaggaggacctgtacttcttcggctacggccacgactacgccgcctgcctgcgggatttttaccgcctgtccggcgccgccccgctgctgccccgctgggcgctgggcaactggtggagccgctttttccgctacaccgagcatagctatctggcgctgatggaacagtttgccgaaaagaacgttcccctgtcggtcgcggtgatcgacatggactggcatctgaccgacgtgccctacggcagcggatggacgggctacacctggaaccgggagctgttccccgacccgcctcgtttcctgcgggcgctgcacgaccggggcatgcatgtgacgctgaatctgcatcccgccgggggcgttcagccccacgaagcggcctacgaaagcgtctgccgggcgctgggccgggacgcttctgaaaagcagtgcgtggattttgacgcggcggatgaaacgttcctgcgggcctatctggagtgcctgcatcatccgctggaagaagaaggcgtggatttctggtggatcgactggcagcaggggaataccagcgccattcccgggctggatcctctctgggtgctcaatgagcttcattatcgggataactgccgggacggcaaacggggactgatcctgtcccggtacgccggtccgggaagtcagcgctgcccggtgggcttttccggcgattccatcatgagctggaaatcgctggccttccagccccggtttaccgccatggcggccaacgcgggctacccgtggtggagccacgatattggcggacacatgaacggcgttcgggacgacgagctgtccgtccgttggctgcagctgggggttttttcgcccatcctgcggcttcattccagctgcagcccctttaccggcaaggagccgtggagctatgggctggaggcggagctggccatggaggatgcgctgcgcctgcgccaccggctgctgccctatctgtacacggccatggagcgcaccttccggctgggggaggcgctggtgcggcccctttattaccgctggcccgaaagcccggaggcctactccgcgcccgaacagtacctcttcggcccatcgctgatggtctgtgctgtcacccggcccatggacgcccggctgaaaagggcctctgtcaccgcgtggctgccggagggacgctggtttgactttgccaccggacaaagctataccggcgggcggcttttgaagctgtggcgcgcgctggacgaatacccggtgctggccccggccggggcgatcgttcccctgagcgaagagccccgggcggacgtgctgcctgcggaaatgaccctgcggatttttgccggggcggacggggtcttcgacctgtacgaggacgacggcgagagcgtggagggcgagacggtgcgcacggcccttcggttctcgtggaaaaccggagagctgaccctgcgggcggagggcgcgctgcatctgctgccccccgccagaatctggcatgtggaggccgtcggctttgccaaaacggcggtcagccttgaggaaaaagcgctggaaacggcctgcgatccggctcgaaacgccctctgctggacggtggagctgcctgtggacgacgcgcttcacacccttcggctggaacgctgcgccgtggcggaggacgactggaagcgccgggcggaaaaacggctgcaggccatgcagacggccaacgatgagaaagaggcggtctggcggctgttgaatcagaaaaaacgcggcgcttccctgctgggcacgctgcggctgacggcgaaaacgccgggcttggccgaatgcctggaggaatgcgtttttgcgcaggatgaaccgggccttgagccgcggggggaggaaaaatcatgatacgtcatttgccggaaggactggtaccctttgaggactgcggctatgcccgtcagcccctgcacccgctggagggacaggaaattcggctgggctgcctgtgcgacggcgcggccccggtatgggagagcgcggacggacgaagcattccgggccgcccgggaacccgggagcattgctatacatgggcgcttccggcggagaagggaaccctgcggtatcgctttgtcagcggagcggaaagcaccccgtggttcgaaacggacattcttcgccccgtttccgtgacccggccccttcggacagggctaggctgggccgagctggttcccggcgtatatctgtgcgccgagggtgagaagggcggcgcggcgctgaccctgagaagcgcgccccgggaggcggaaagccccctgcgctttggcggagacgcgctctggtcgctggggacgctttcctgcacggaaatcaccctccttctgcggccggacggaacgcccgcccggatggaaacgacgctgcggggcggtcagcgccatgtgtacggcaccggcgagcgatttgacggcccagaccagcagggccggggaagctgcggacaggtggtggagcatttcacacagcagggcccgtggagctatctgccgatgcccatgttcctgacggacggcgggttcggctggttccgggacgcgggagaaaacgtccgccttgcctttggaacggaggttcatattgagtctgccgcaggggaaaagatcaccgaccatctgctgctgggaacgcccgccgaacagcttcgggcctatctgaatctgaccggcgaatgcatgctgccgccggagtgggccttcggactgtggatcagcgccaacggctggcactgcgacgcggacgtggatgagcagctctccatgctgaaaaagtacgattgcccggcctccgtcatggtgctggaagcgtggagcgatgaaagcaccttctaccgctggaatgccgtctggcccgacccggcggggacggtgcggcgcgtccgggaacggggcctgcatctggtgctgtggcagattcccgtgctgaaagcgctgcacgactgtccggaggtggagcccgtccaaagggactgggaggaagccattgccaaaggctatgtggtgcgccgcgagaatggttcgccctatgtggttccggacaaatggttcgccgggagccttctgccggatttcaccaacccggaagcctgccgctggtggtttgacaagcgtcagcctctgctggaaatgggcgtggaaggattcaagaccgacggcggcgaattcctgtttggcagcaatatccgtctggcggacggcacgccgggcggcgaggcccacaaccgctatcccatgcagtatgtgaaggcctatcaccgctggatgaaggaaaacggcgtggagggcgtgacgttcagccgggccggatacacgggcgcccagactgtgcccattcactgggccggagatcagctcagcacgtgggaggagctgcggggccagctcagcgcgggcctcagcgccgggctttccggcgtgctgttctggagcttcgacgtgggcggcttcgccggggagattccggatcgggaactgtatctgcgggccacggccatgggctgcttctgcccggtgatgcagtggcacgcggagccgcgaaacggccagttcttcgccaccggcgatccggaatggaacaacgaccgctccccgtggaatctggccagccgctggaacgacccctccatcgcggagattgcctgcgccttcgcccgcctgcgggagcggctgcggcccatgctctatgaggaagcgaaggcctgcgtgaaggagggccgccccatgatggcccatctctgtctggactttccggacgatgaacaggcgctggcctgcagggacgaatacctgctgggccgccgtctgctggtcgcgcccatcgtctacccgggcgcggagggacgaaaggtctatctgccccaaggccgctggaagcatttctttaacggcagggtctacgagggcgggcgaacggtggaactgccctgtcccctgaacgaagcgctggtttttgagcgggaggaggaagaaacatggaactgcgcaatatgacgatctattccatctttgtgcgcaatcacggtggaaactttgctgccgtggaaaaggatattccgcgcattcgggcgctgggggcggactcggtgtggctgctgcccattcacccgatcggccagaaggaacgcaagggcgcactggggtcgccctatgccattgcggattaccgggccgtcaacccggaatacggcacgatggaggactttcgccatctggcggataccgtccaccgcagcgggatgaagctgatgatcgacgtggtatacaaccacacgtccccggactcgtggctggcgcagcatcacccggaatggttctaccataagccggacggcagcttcggcaaccggatcggcgaatggtcggatatcattgatctggactacggcaatcccggcctgtgggattatcagatcgagacgctgaaaggctgggcggagatcgtggacggcttccgctgcgacgtggcccctctggtgccgcttgagttctggctgcgggcccgccgagaggtggaaacagtgcgtcccggctgcctgtggctggcagaatccgtggagccggaatttatacgggataaccgaaaccgcggtatggtcagccatagcgacggcgaactctatcaggccttcgacctttgctacgactatgatatttacggcgattttctatcctatgtgcagggcaaaaccgaactgacggactatgtcagggctttggagcggcaggagagtatttatcctgcggactacgccaagctgcgctttctggaaaaccatgaccggccccggatggcgcacttgttccccgagcgccgtaccaggctgaactggctttgctggatgtttttccagaagggcacggctttgctgtacagcggtcaggagtgggagaacgatcaccggcccgacctgtttgacgcagatcccattcccatggagggtcccgccccgttagaggggctgattcggcggctgaccgcgctaaagaaggacccgctttttgaaattggagcctattcccttcgggcctgcccgggcgacgtgctgacggcggtctggcaggagcgccgggaaaacggaaagcgcctgaccggatgcttctgccttcgggggaaccctgcgctggtgccggtggaactgtcggacggccggtatgaaaacctgctgaagccgggaacgttcctgcgggtggaaagcggcctgctttcgctggatggaaacccggcagtattgcagagttgaaaacgccgccggttgacagggccgaaacagggggctataatctgcctatacccttgaacggatggaggcggcagatatgaagcaatgtatggattcccagaacctgcaccgcaggctgaaaaagatcatcgggcaggtacaggccatcgaccgcatggtggacgagggcgttccctgcgaagacgtgctttccctgatcaacgccgccaagtccgccctgaacggctgcggcaaggtggtgctggaagggcatatcaagcactgcgtccgggacggcatcgagcatggcgacgcggaaaaaaccatcgagggcttcactaaggctgtggagcgcttcgccaatatgcaatagacgaaaaaagccggcagactgtgtcggcttttttatttgttctattggcaacatatacccctatatgtataataagcatatacataccggggtatagaaaggggcttcattcatgaaacggctcatggagaaactggaacacttgctggaactgggcggcattcgtaaggacgtgacgctactggtcatttccggggcggcggttatctgcagcctgttgaaatttcagccttttccctttgatatggcgtggatcgccattgtgctatgcggtctgcccatcattctggaagcggtcgtcgggctggtgacggcctttgacatcaaggcggacgtgctggtatcgctggcgctgatcgcctcgatctgcatcggggagaaatttgccgccggcgaggtggcgttcattatgcagctgggcgccttgctggaagaactgaccgtggcgaaggcccgggccgggatcgagaagctggttcatctgaccccgcagacggcgcgggtgctgcgggagggccgggaggagatcgtccccgccgagcaggtgcgggtaggcgaccgcattcgtgtgctgcccggtgaaagcattcccgtggacggcgtgatcgtttccggtcagacttccatcaatcaggccgtgatgaccggcgaatccctgccggcggataagaccgtgggggacttcgtgtccagcggtacggtcaaccagttcggcacgtttgaaatggaagcctccaaggtggaggaggacagctccatccagcggatgatccggctggtgcagtcggcggatgcgggcaaggcgaagatcgtcggcattgccgaccgctgggccacgtggatcgtggtcatcgccctgagcgccgcagcgctgacgtggctcctcaccgggcaaatcatccgcgcagtgacgatcctggtcgtgttttgcccctgcgcgctggtgctggctacgcccaccgctatcatggcggctatcggcaacgccacgaagcacggcttcctcgtgcgggagggcgacgcgctggaacggttggccggggtgaaggtaattgcctttgacaagaccggcaccctgacctacggcacgccggaggtcgtgaaggcggccagtgtgtcggaggcgttctccaaggaggacgtgtaccggctggcagcttctgccgagcagctttccgagcacccgctgggcaaagccatcgcagcgggcttccgaaagacgggtaagggcagcgcggccccggcggaggcgttttggatgattcccgggcgcggcgtgtgcgcgcaggtggagggcaaggccgttctggcgggcaacccggagctgctgcgggaacagggcgtgccgatgacggtaccggcagaggcggaagaagcgtttcagcagggctgcacggtgatctatgtggcggtagacggcgcactggccggttatctggtcctttcagacacgctgcgtcaggagagcgccgccacgattgaggcgctttcccagctgggcgttcagcccgtgctgctgaccagcgaccatgaaaacgccgccgcggccattgctgccaaatggaagattcgtcaggtgcgggccaactgcctgccggaggataagctgaccgccattggagagtatcaggagcagggacagccggtgtgcatgatcggcgacggggtcaacgacgcgcctgccctgaaaaaagcggacgtgggcatcgccatgggcggcgtaggcagcgatattgccgtggacgcggcggatatcgcgctggtggatgacgaggtgaaggagcttccgcacctgatcgccctgtcgaagcggatgatgaccaccatcaagctgaacatgaccttctccatggcgctgaattttgccgccatcgtgctggcgattgtgggcacgctgaatcccgtggtgggcgcgctggtgcataatgcaggttcggtgttggtgattaccaactcggcattcttactgaaatggaggaaaaagaaatgacggtcaaaatcatcggtctgatcgtggggttgctggttcttggagcggggctctattatctggtgaaggagaaaaaagacccggaatcccgcaagatctacggcgtggtcagcgcggtgggcggcgtgctcttgaacggctgcattttgtcgctgatcctctaaaagggcggcttactagaacagaaaagcaacgggcgcggtcaacttggccgcgcccgttggctgttcattttttccaatgcttcaaattcggcacgacggcctccatgtgggcgcgcacctgatccgggggccactgctcgctggccatgtgctccacgcaaaaatcgatcagctgctctgtgctggtgtatttgaactggccgcctgagtagcaccacttgcagtagtcctcgttgaacgaatcgtccggctccttgctggtggtggaatcgtccagcggcatcccgcagcactggcacaccagctgccgaggggagcccagcaaagtattgatggacacgtcgaaaaactttgaaagcagcttcagcgtgtccacattggggacggtttctccgttttcccagcgggacactgcctgccttgtgacaaaaattttctccgccagctcgtcctgcgacagaccacgtctggttctcaattcatggatgatttcctttgtttccaattgaatccctccttgatgagactgtagcacacaaaggcgctgcaggcaaacaacgggcagttgcgcttgggagaatcagaagacacaaaaacagccgcgcagaaaaatccggcggctgtttctgattagggagaaccgcgccctttggagcacggttcattttgttcttcttcaggcttcggtggaagcggcttccacggtgacgctctgatcctgcatttccttttcggcgatcaggtcttcgatggtttccttggtgcgcatcaggtcttccacggacatggtctcgaaaccggcggcgggagacttcacgttcacgccgtggcggcgcaggaaatcgtccaccttgtcttcgttgtgcttataggcgcagaaaccgaccacgctcacgcccacaccgatcagaatgcccttgaccaacggattgttattcaacatacaaccttatcctccttgtcgtttgtttctttcgggaaagttagcctttgtgcgccatcatttccatgccctgacggaacatgctgcctgcaaaggccagttcgctttcgctgcccgccatgggcgtgagagtgagctgatctttgccgcgcttgatcaggtagggctgctcccggggagcccgggggatcagatgacgaccaaaggtgataatccacgccagcaggctggcgcgcaccgcgccgggcttgccgacggaattgatgagatagaccacggacatgacctccgggtcgaagctgccgcgcacatggagctcctgatagccatgctccaccacggcggccagcgttgcgcccgtggacagccagcgggtgaactgggtcagcgccgagcccgtcagggacagcgcgccgtccagcccgatgaagaaaagcgccagatagccgctgggggccatcgaaaagcccttttcctcgcaatgcttgatgtgcagaagccccgcgtccgtctgggcggcataggccgcgccgaggcggacgatgagcttttcttcactgatcgcgtcagggtcgtattcgcacagcagggtgcggatacgcgggttataccggcagcttaagacccccgggacgcgccggaagggttcgtccgatgcgactgccgtttcaaactgcagccggagccgtccccggatggcggacagcacttccatatgagaggttccctgttcgatatgcattatgccctcccatccccgggcttcatgaacatcagccgcagggagttggccaccaccagaatggtggaggaattgtgcagaagcgcgctcatcatgacggaaataccgctggccgcgcccagaatcaggcccacagagttaatggcgatgaccagcgcaaagttctgatgcacgatgcgcatggtggcgcgggacagccgccgcagagcggggatcatcatggggtcgtcccggttgatgatgacgtcgctggtttccatggcaatgtccgtggacttgctgcccatggagatgcccacgtcggcgtaggccagcgctggagcgtcgttgatgccgtcgcccaccatgaccacaccgttgccctgcacctgcagcttcagcacggcctcggccttctgctccggcagcagctgggcgcgatagccatccgcgccgacctgctcggccaccgtccgggcctgcgactccatgtcgccggtcagcagctcgatgtcgcccacgccgtcgtagcgcaggctgttgatggcccggcgcacgttctcccgggggctgtccatggcgtaaagcacggccacgatctcgctccccacgcccacatagttggggatagcgcccgtttcaccgggcaggggagcggcggccttcacgccgttttcccgcatgtattcgatattgcctacgcggacggtctttttgcccgccaacgtgcggctgccgcgggacacctccgtcaccacgtcgccgtgcgccttgggggacgcgcccagctcccgaccgtagcgcatgatagctccggccaacggatgggtgctggtctcttccgccgccatggcgtaggagagcacttctttctcgctcatgccctctttgaggacaacggcggaaacgatcctcggccggccctcggtaatggtgccggtcttgtccagcagcacggtgttggcgctgctcatctgctcgatgaacgtgccgcccttgatgagcacgccctgcttcaccgccgtgttgatggccgcggagaaggccgttgccgtggacagcttgatgccgcaggagtagtcgatgaccagcatcttcagcgccttctgggggttcttcgtcaccagccacaccgacaggcagagcagaaagttcagcggcaccagatagttggagaatttgtccgcgtagcgctggatgggcgcttttttcagttcgctggcctccaccatgcccacgatgcgggaaatgacggtctggtcgccgaccttggcggcctgcacgtgaatgttgccgctcttgaccaccgtgccggcgaatacttcgtcgccttcccgcttctccacgggcacaaattcgcccgtaatggggctctggtctaccactgccgcgccgtagacgactttgccgtctaccgagatcttttcgcccgtgtgaaccgccaccgtgtcgccgaggctaatctggttcatgggcttgcgctccagcttgccgtcaggcatgaccttccacgcgtcgccctcgtcggcggagagcatctttttgatggaggaacgggtacgctcgatggtgtaggaggtcatcagttccgccagatcggacagcgccaggatcatcagcgccgagtgagcgttgcccagcagcagactggccacgatggacgtgaccgtcaggaaatccgcgttggggcgcagatcccggcgcagcccttcccacgcgcttttcgccatgggggcggacagtcccagactggcaagggcttccagtgaagtgaagttcgccagcgcgccgcccatcaaaggcgcggtcagcagggtgttgcccagcaccagcgccccggcgttcacggccagccgcttggccagacgggaagtggtcatgggcgtttccgccgcttcctcaccgctttcagcgtggagctggcgcaaggccgccatgctgtgacgggccagtaccagatcggcctgctcggacagttcggcggactccaccatgccgcggtcatactgcaaaaggatgccgccggtgcagacggtcacccgcgccagctgcacgccgggaatggaagccagctccgcggcaatagccgggctttcttcctttagataacggagcccctccgcggtcagccgcaaccgtcccggcagactgtgggccacgcgcgttttcataaaatcttcctgatgttctttccgaagcatattatcccttcttttgctgcgggagccgcaggatcagccgctgacggacgatctcttccagctccttttcgccggcgttctgccagacgtcttctttcgaaatgcaaatgccctcgtctaccacgatatccacccagcgcagaatggcgcgggtgttggtcacagccgcgtcatagcggatgagcaccgttccgatgcggggattggcctccgcccccgatacgccgggcagcagctgaagcacgtcctgaatatagtggagatagggcagcgcctctttgggcagcagatgatatttggaaaaactgatccgcagccgccccggcaggtcgcattccaccttggggtgcaggcacagccgcaggaagctttcttccattttattcactgctttgcgctccaaacagcttggaggcccaccacagcagcgtcatggctcctggcgcggcccagccgtatttcgtcttgctgcgcagggcagccacggtcagcgcgccagcggtcagcgtcttcgcgtccagcagaccgtccgtcgcgtccagaatcccctgatcaacagcgttcagcagcagcttgatcccttcctgcaccttgctggcgggggcggtcttgaccttgccatccagccccatcagcttcatcatggcgcccagcaccacgggagcctgcaccttggactcgtcatagcagatcaggacgctgccggttcggggctccgccttcacatgatgaatcacgcccgtgctttccagctgctgaaccatttgcccggtcaaggcgggctcctgcgttacggcgggcacatacagccgcatccgtcccggaaggctggagcggacttcggccaccccgcggaaagaggggagtttcatcaaattgtgtttgggaggcttgggcaggagcaccgcagcgcccgcagccaacgccgcccatccgatggcattcacatgaatccctcctgaaatgtgaaacgttttccgtaaaattagtctatgctaactttacgggctaaatcaaggcaaagggttcctttgccgtttcctattttatcacggcgcgtttttttgtcaatatttttgtttttggtacacaggattttggcaaaggaaaaagtggctcccgaaacccgggaaccgctggaaggataggactcaacagtcggatgctcacgcttctttttggagatccagccggacgatctgcattttcatcatgccgtcgcccaagcgggctaaaaagcggaagaaaccgctga

SEQ ID NO: 2866 - DNA, 32759 bp, Unknown
  16S sequences of unknown bacteria
gcaccccacttgttatccagtatatcatactgtctaacaaatggggtgcagttcaatgtggtcctctccgcttttttatcggctttcccgcaatgtgcggaaaaattcttccaacaggcaggagcattccgcctccagcacaccggccaccacctggggacgatggttgaaatcctcccagaacaggtccagcacacctcccatggccccgcctttggggtcccgggccccgaaaaacacctgggggatgcgggattgcaaaatagccccggcacacatgggacagggttccagggtcacatacaaagcgcagtcggaaagacgccagcggcctaaagtctggcaggcctcattgatggcttcgatctcggcatggagaagggcgttttgcttttcttcccgccggttgcggccccggcctaccacctggtcaccttgtaccaccacgcatcccaccggcacgtccccggtgtccagagcctgccgggccagttccagggcctgcatcatatactctttgggttccatgagaaaagcccccttttgacagcaaagattatttgcattatactgcaaagaagcaaagaaaaaaaggtggtacagcatggacgagatgaaagaagaaatggagaagatcctccatacattaaaagaaaaaggggtagacttcgaggaatatcaccacgaggcgctggacaatgtgctgcagagggaagaaaaagatctgtgctttgacgcgaagatctgcaaaaacttgtttgtcaccacgcggaaacgggatcgggtgtttttggtgatggtggaagcccataagaaagccgatctccatcggttggcccaggctctggggaccacccatctggggtttgcgccccaggaactgttggcagagcgcttggggcagaagcccggagccgtaggccccctggggatcctccacgatcgccagggaacggtggaagtggtgtttgacgaaagcctgtgccaggccagccgggtggccatgcatcccagcgtcaatacagccaccgtggtgctgccttttgagcagctggaaggtctgattcgaaaaaatggaaatttaatctattttatgaatttttaacaaaaaatatgggaaaaaccccttgcttgtccatctttctggtggagatgacacaagaatttggtaaagagcgagaaaaaagtttgcaatttgtttgtagaatctccgggaggattgtattataatgtgtcatatcaatgcgtaagtccggctatttgccggaaatacaggctcccgaccgccggcaaagaccggccaaacagaaaggggaagattcctgatggagaccctgatgaaatacaaggccaagccgctgttctcccgatccaaagaaaaggatcgtgctgctgaaaaaaagggtaagggcggcaatgtgctcagctgggcaccggttcagatcttgctgctggccttgggactcaatcttttgatcgaactgctcaaccacaagggattgggcgggctgctgtcctttatcggcgagcacccgttggcgttttttgccaactatttgatcattctggtgacgctggttcccgccctgtttttcaaacggcgcatattctatatgggcatggtgggcatcgtctgggccattggcggtatcgccaacggtatcattatcctcaaccgcatgactccctttaccacagcggacctggcggtgttcgccaccggctttgagatcctgcccacctatttcactaagtttgaaatggtgctgctggttctggccgctgttgtggtgattacagctgcggttctgctctttttgaaaggacccaagagcaaggatccccttccccgccgtttgctggtgggtgtggcggccactgtgctgacaagctgtgctttgggcctgaccatcaagcaggggctggaaggcggcggcctttccaccatcttcagcaacttggcctatgcctatgaagattatggttttggctattgttttgccaacacctggctcaatgtgggcattcgcactcccgagaattattctgccgaggacatgggccggatcatgggtgagatggatgacaatgctgcggctctcccccagggagaagccatgaccgatgtgaatgtggtttatgtgcagctggaatccttttttgatcctcagcagatcaagggtctggagtttaaccaggacccgctgcccaactggcatgctcttcaggaaaaatacactactggtttcctcacggtgccggtggtgggggctggtacggccaacacagagaccgaagtgctcaccggtatgagtacccggttctttggccctggagaatatccctataagactgttttgacagaaaacaccgctgaaagcgtggcgtatatcctgaagggtctggggtatggcacccatgcggtgcacaatcaccggggtgtcttttatggccggaacaaggtctataaaaacctgggctttgatacctttacctctttggagtatatgtccaatacatccatgacccccaagaactggtgcaaggacaaggtgctcaccggagagatcgaagcggcgttggattccaccgatactccggatctggtatataccgtttcggtgcaagggcacggcaaataccccactgctcccgagctggaggagccggccattaccgtggagagcattcccaatgaggatcagcactattccatggagtactatgcaaaccagatccatgagatggatgaattcatcggccagctggtggaaatgctggaaaaccgggatgaaaagaccattctggtgctgtatggtgatcatctgcctgccttgcagatggatgaggataccctgctgacccatgacctttataagaccgaatacctgatttggaacaatttcggtctggagaaagaggacgaggggatcaaggcataccagctcacctccaaggtgctggccagcctgaatatcagtgacggtatcttcaaccggtatcatcagacctgcaaggatgagagcacctatctgctggacctgcggaagctgcagtatgaccagctgtatggagagcgttatgtcactggcggcgaaccggcttatgagcccaccgatatgaagatgggtgtgcggcctattcgggtcaccggctatatcaagctggaggagacctggtatctggagggcgagaacttcacgccttacagcaaggccacggtcaatggtaagattctggagaccgaatatctcaatggccacctgttacgggtgatcgatgacaaactgatccaggaagtggatgaggtgagtgacatcaagatcagccaggtggaaaaatacaaagaagtgctcagtgtgacagaatagaagcaaaacgccctgaggcgatgagcctcagggcgttttatatgcagaaacttactttgtcagatagctgtaagcggcctgggcataggctgcggcgccggcggccagaccgtcttcgtcgaagatgatcttgggatggtgcaggggatagacctgctcctgatggctggtgctgcccacagagaaggagcaggagggcacccgggagctgatgaaggaaaagtcctcgctgcccatgctcttggtgtaggacatgggaggaatgtccacgccttcctggccgatggtttcctggagccaggtgtgcagctgctggctgaactccggatcgttgatgaggggaggaatgccccggggacggtcaaaggtcagctggcagcggtaggcatcggcgatgctctgggccacctgctgcatccggtccagagtgaactggcgggcttcgtcgttgaaggtgcgcagagtgccggtgaactcgcagtcctcaggaatgatgttgctggctgtgccggaatggaaggtgcagatggacagggcggtgggctcctgcacatccacttcgtaccgaccgatgtccccgaaggcctcggcgatcttgatggcgcaggtgatggggttgatggactgatggggccgggcaccgtggccgcctttgccgtggagatgcaccacgaaccggtcgctggaggcgctgcaaggcccacttttcagcatgatctgattggtcttgacaatgtcagaggccatgtgggccatcacagccacatcgggcttgtatttgtccagaaggccgttttccaccatcatccgggcgccggtgccatcggtgccctcttcgtcgggctggaacatcaggatcacctggccctgcagttcctcttcgtgctttttcagcagggcggcggcggtgagcagcatggaggtgtggcagtcgtggccgcaggagtgcatgaccccatcacattccgaggcaaagggcagaccggtctcctcgcccatgggcagggcgtccatatcggcccggagcaggatctttttcccttcttttttgccgatgacgcccacaatggcacaggggccgatctcttcccaggagatgcccatgtcatccagggcttttttcaccagggccgtggtctggggcagacggcagcccagctcgggatggtgatggatctgccggcgccaggccagcagctgttcgttcatctctttggcttctttgtacatcatgtggattcactctcctttttgagttatttcaaataagacagggcggcctgggcataggtggcggccccataggcaaaggctttttcgtcaaactgcaccttaggatggtgagcagggaagtgggggatatccggattggaggcccccaggctgagggagcaggaggagatcttctgggacacataggcgaagtcctcgctgcccatcatccggctgctgtccagaggcagcacttccaccccttccagatcccgtttcagcatggcatacagctcatcggagaaggtttcctcgctgtaattgctgggggtggagaagtcgttatagaactcaaaggtgcaccggtagagggagcagatcttttccaccgtctcctggatgcggctgagcagattggcccgcacttcttcgttgaaggtgcgcacggtaccccggatctcgcagtcgttgggaatgatattataggtggtgcctgcatggatggagcaggtgttgaccacggtgggctgctgggggtccacttcgtagcggccgatgtcggtgaaggcctccacgatcttggcggcggcaaaaatggggttgatgctgttttggggagaagcaccgtggccgcccttgccatggaggatgatccggtaattgtcgctggaagcggcaatggtgccacggctcagcttgacctgaccggtctgatagggctcaccggcgatgtggatggccacagcgtggtcgggcttgggattttccaggcagccgtcctcgatcatggagcgggcgccggacagagtttcctcacccggctggaacatcaggatcacaaggccctggagttcctcttcatgggctttcagcagtttggccgcacccagcagcatggcggcatgggtgtcatggccgcaggcgtgcattttccccgggcactgggaggcatagggcaggccggtgtcttcagtgaggggcagagcatccatatctccccggagaaggatgcttttgcctccttctttgccgatgtagcccagcacgccgctctggccgcagggacggaaacggacacccattttctccagttcttcctgcactttggcagcggttttgggcagttccagccccagttcgggattttcatggaaataccggcgccagccgatgatctcttgctccatggcctgggcttcctgcaaaaggctcataggtaacactcctttttggattattttcttattttattccgcattgtttaagtaggaaagggcgatctgcacataggcggcagtgccatagacaaagcagttttcgtcaaaaaccactttgggatggtggccgggataggcctggccttccgggctggtgctgcccagggagagcatggccgaggggatacgctgggtgacaaaggaaaagtcctcgctgcccatggccttgccggtctggaggggaaccaggtcgatttccggcagatcctttgtcagcaggtcctgaagcttctggcagaagtccgggtcgctcttggtgctgggggcgctttggccgatgtaccactcggcctggcagcgatagagctcggccacctggtgcatggccttctggagccggtccagcagccaggtccgctcttcttcgtcaaaggtgcggatggtgcccatcacctgacactcattggggatgatgttgtaggtggagccggcatggagggcgcagatgttcaccacagtgggcttctggggatcgatctcatagcgggcaatgtcctcaaaggcgccgatgagcttgacggcagcatagatggggctgatgctgtcttggggagaagccccgtgaccgcctttgccggtgagagtcacccggaagccgtcgctggaagccatgcagttgccgcttttgatggccagctggccggtttgcagacggtcggcggcaatgtgaatggcgatggcccgctccggtttgggatcttccaggcatccggcggcgatcatatcccgggcgccggtgagcccttcttcgtcgggctggaacatgagaatggcaaggccgggcagttcactttcatgctctttcagaattttggccgcgcccagcagcattgcggtatgggtgtcgtggccgcaggagtgcatggctccggggcactgggaggcaaagggcaggccggttttttcctccatgggcagtgcgtccatgtcggcccgcatcaatatgctgtggccgccctttttgccaatataggccataaaggcgttggggatcacttcccggtattccacgccccattcatccagcttctgccgcaccaaagcggcggtctggggcaggttttgcccgatctccggatgctggtggatctgccgccgccaggcgatgatctcctgctggatggcacgggcttcctcaaatgcgttcataacatctcctccttttgcggatacacttttctatttttcagaaagaatctccagaatggtctcttcggtatgggtcatgccgggacaggcaatgcgccccatgttctgcatggttttttccggggtttgccccaggatgctgtggcggctgtccacagccagggactggagggccagacggctcatatcccaggcgcactgcacaccggctctggctttgagggcacagccctggtttccgccgtggcagatcatgccggtgagggaagcggccatattctgcactgccagggcgatctgctcatcgcttcccccgaaaagcagtaccaggccgcaggccgtaccggtgccgccggccagagcacagccgcacagggcggacaggcggccggaatattctttgatgtaaatggtcacaagacagctgagagccagggcacgcagcaagtcttcccggctcttcccacttttttgggcggcgcccagcaggggcatggtggccagaatgccgtggctgccgctgccggtcaggctcatggccggagccgaggccccacggacccgggcttcgatggcgccgcaggccagataggtcatctcatccaggatgctctcccggtttcccgccagcgcccgggtcagaggcagcttattttcctgctcgcccgcttgcaaaagggcctggttcatggccagggcatcctccaaaaagagaaattcttccaggggagtctggcgcacatactggcacagctccttcagggtatagccgcagatctcctggcaggggtcctgctgctggggagaagggggatcgtttttcagcacaacgccgtctttttccagataggtcaggccggtgtgggtgttttccagccgagccacgccccggtggccgccgccttccacccgggcttcgatgaagatctccggagccaggcggcacatttccacggtgacggctccttggtccaaaagggcctgggcctgggcatgaacgccctccgacaggttttccaaagcggccagacccttttcggcgtcccctcccaaggcgcccagggccgccgcccaggcgcagccttcttcttctgtgccgggaatggcgcaggtgaaggcgtttttatagatgcccgaattgacgcccagccagatgctttccacctggggcacctgggcccgggccagagcgcaggcataggcaatggctcccggttcggtgacgccataggccggggccatgtcctgatggatcagttgggccagctgtttcataaaagtcctcctataaattcagtatgcggacaaattctacttcccatgatacacccccaggggaaaaggttcaaccgattggggaaatttacctgggatatcccaaaagatcccgcagagcaggggtgatggcctcatcacattctgccggggaaaggccctggtctttcagctgctgccgccgatctttcagttgccggtaggccgtcagcatctgctcatcacgataaaggagagccacggctttgccttccagatcctcttcccgggccagctgggaggggagaaaggtggagtcgatccacaccgacacaccatagtgcccggccacctcataaagggccttttccagctggagcaggtccttttgatcgatgggcggggagagggccagctttttcaccccttgctgcaccatttcgcagaaggccgccgccatgcccagctgaaaagaaagcagatcgaacgctttgtaagacgatgtcatactccattcctccttgggtgattatgaataaaagaacggggattcatcaatagaaacgattggacatatggaataaactgtggtatcttgtaatcacagcagcgagacaggaacgggagcctgtttctcaaaactccatcatttaaatggcaaaacccagggcaaagccctgggttttgtgttttattatgcttctttggtggcggcgcacactgtgccggtggcagcatccagcgtgacgcaggagccgctcttcaaaagggcggtggcgttgacagcccccaccacggcagggatgtccagggccagcgccgaagtggcggcatgggaatccagccctccctgctcggtgatcagaccggagagacggcggatagcgggcatcatttcgttggtggtatagggaacggccaggatgtcaccgtcagaaatgcttttcagcgcttcctgggcatctttgcacaccaccacaggaccggtgacgcatttccgggtgacgccggtgcccgaaagcagcagatcgccgatgacttccactttcagcaggttggtggtgcccgagacacccagaggcagaccggcggtgagtaccaccatgtcgccgtttttcacaagcccggccttctgggcggcttccaccgcaccggcaaagagggcgtcggtgctgtcggcttccggaaccaccagggggcagacaccccacaccaggctgagccgccgctggctgcgcacgctgttggtgcagcagatgatgggcaccgggggacggaaccgggagatcatccgggcggtgcgtcccgacttggacaccgggatgatggcagcgcaatgcaggctggtggccgtggtgcaggtggcataggaaatggagctggtgacgctgggtaccgccgagggggcctcttcccgcagacggttctggtagttgatgttttcttcggtggaaagggcgatggccgccatggcctccacggcctccaccggatacaggcccgctgccgtttcaccggagagcatgacggcgccggtgccgtcatacacagcgttggccacatcggaaacttccgcccgggtggggcgggggtttttcatcatggaatccagcatttgggtggcggtgatgacgatttttccctgactgttggcctttttgatcatcatcttctggatggggggcagcttgtcaaaggggatctccacccccatatcgccccgggccaccataacgccgtcggacacagccaggatctcgtcgatgttctccaggccttcggcgttttcaattttggagatgatctggatgtcgcttccggcctggcggaggatgcggcgcacctgcatcacatcatcggcccggcggacaaaggaagcggcgatatagtcgtaattgttcttgacggcgaagagcaggtcttcttcgtcctttttggacagataaggcatggaaaagcgcacgccgggcaggttgacccctttccggtcggagaccgtgccgccgttgagcacccggcagacgatatcggtgttttccaccttttccaccgtcaggccgatcaggccgtcgtccagcaaaatggtgcagccgggctgtacatcttcatacaggcgctcataggagatgccgcagcccgtttcatcaccgggctcgtcggtgcggcgcagagtgaacagctggcttttttccagctgcacttttttattggcaaatgtcttgaggcggatctccgggcctttggtgtccagaagggcggccaccggcagggaaagctcccggcgcagggcgtcaaagcggtcaaaccgctcctgctgctcttcatgggtgccgtgggagaaattgaatcgggccacattcatgcccgcctccatcatccggcgcaggatggccggatcgtcacaggcggggcccagggtacagacaatttttgtttttcgcatgatctttttcctcttctttctttccgcgcgcctttttcggcagcggcccggcgcggtcgggccgatctgctcacgggataaagccatatacaaagatatggtaccaccccccagcggccatcgtcaaggcaaatccaccaaacaaggggcaaaaaagacttttcaaattcttaacaaattacacatgacagaagcgggcttttgtcatatgatatagatgaaaggaatggcctttcattcaatcctttgccggtatgatccggcctgtaaaatcttttaggagctgatgaagaaaaaatgctgctcattccccatattcgcattgcccgtcgtgtcagcggagtcctgcgggaccgttttcaggttcgcctgtccccggtggtcttcgcctttgggagcattttccccgatctggcgaaaaatgctgtcaccggttatcacgacatcaatgaagcagtgagccgggtggaagggtttttggccaagcgtcccaagagccggctggttcagagtttccgcttgggggagatttgtcactataccgccgatagtttctgtcgggtgcacatccaccacgatcagtataccctgaaagagcatatgctgtatgaaatgcgccaaagtcgtcagatgaagcggcagctgcctctggccggaaagctggctatggaggatgtgtatccttcccgcagcggcgccttggagcgatttttcagcgagcagcgggaatttgctgcccagaagcacagctatgaggaagagaccaatgccgttgtccgcggctgtgtgctggtgcttcacagtctggcccgccagccttgggaggaagcccgtcccatggccctggcccaggccggatcgtaagtccagtttttgatcatctgctaagccgtacccatagtggtacggcttttgctttgaaaacaaatagtatttgtcataataaaataagcatttcgttatatcctaattgtaaacttttccaccaaggggaagaaaagcgaaaaaatggttttttccagcccgtttttcctgtataataaaatagttggggaaaagaacaccaacttatcatctggaatacaaacaaagggagtatgatacagtggaaagattagtgggaaccgtttcccggggcattcgcgcccccattatccgggaaggggacgacatcagcaagatcgtagtggacagcgtgctcagcgctgcggaaagcagcggctttcagattcatgaccaggatatcatcgccgtgaccgaagcggtggtagcccgggcccagggcaactatgccaccgtgcagcagatcgcccaggacatcaagggcaaattcggcggggagaccatgggtgtgattttccccatcctcagccgcaaccgttttgccatgtgcctcaagggcatcgccatgggcgccaaaaagattgtgctcatgctcagctatccttccgatgaagtgggaaatcacctggtggatctggatgctctggacgaaaagggcatcaacccctggaccgatgtgctcaccgaagagcgcttccatcagctgttcgggccggcccgccacactttcaccggggtggactacatcgcctattacaaagagctgatccagagctgtggctgtgaggtggaggtcattctggccaacgactgccgcaccattctggactataccaaaaaggtcctttgctgcgatattcatacccgtgcccgcaccaagcggcttttgcagaaggccggggccgagaccgtctattgcctggacgagatcctcacccagccggtggacggcagcggctgcaatgagcagttcggtctgttgggctccaacaaggccaccgaggagcgggtcaagctcttccccagaaactgcgctccggtggtggaaagcatccagaagcagatgaaggaacgcaccggaaagcatgtggaagtgatgatctacggcgacggcgctttcaaagatccggtgggcaagatctgggaactggccgatccggtggtggcccccgcttataccgccggcctggagggtcagcccaacgaagtcaagctgaagtacctggcggacaacgactttgccgatctggagggccaggagctgaaagacgccatctccgattacatccggcacaaggatgccgacctcactggcaagatggtctctcagggcaccacaccccgccgtctcaccgacctggtgggctcgctgtgcgatctgacttccggcagcggcgacaagggcactcctatcgttctggtgcagggttatttcgacaactacaccaaataaacagggcaaaaataccaaaaaaacagagccaaatttggctctgttttttatttccaaatattgacggggggcactgttatactataataaaataaaaaataatttaatgacaaaggaggggcaaaaatgaaaaagaaaatgatggtggctgtggtgctggtggttgttgtggccgtggtaggtgtggtcttctggtggcgcaatgcagccggagaaaaggaggacgaagctttcctccaatggattcgccccttctaccaggaagaacaggacaattacatcttccaggatgcccaaggggcggacatcacccagaaggtgatggaggacacccaggactgggccaaggcggaaaaatggggcaaagtacaaagccatgtgctggaaaacaccgcaaaagcctggcatgagacggtgaaggccgaagagggccaggtacagcagaccgccgtgttcggccagagcaccggcgacaaaggtccctgggtctttttcaccctggaaggcaccgtgtattataaccaggccactggccagattacttcccaggagcagggcagtctgaaagacatctggctgctgccccgggacgacaaagcggtgacgggccagtcggtgaccggagacatttccaccgatgaaaaatcggccacttacaccggctatgtggaagtgggagacaagggtaaattctatggggaaatgaaagtggaagttccccaaggctaaagaaaagcaaaggcctgccgcaatttgcggcaggcctttttcatatgtttggttttagcggctgagcagccccacattcacatcctcggcaaagtttccggtctgatagagcaccagaatctcatcggcgccgcattgggcggcgtattcgctgatgggggtgcggttataccggggatcgaacacatagatctcctcatagctttctgccagatagggaagcaggctgttggcaaaggaatccttgaccaccagaagagtgccatgggcctccgggttttcgttgcggatggtgagggccggcgggtttccgccgaagaacagggagtatttgtccttctgatccagataggagcggtcgtagatggaggtaggctccttgcccggctgctccatggtcaggccggggaaatcataccaggtgatggtgtccggctcataaaagcgtgctcccgcctggctgtacagggtgccgtagaagtccggagtctcttgcttgacggcttccagctcttcctgggtgagaatctcgtcctcccgtcctgcggccttcatataggcttcgtaggccagataagcaccctttgtggtccagtgatgatcggtgcggtagtagatgtattcctcccgggcgtccagaagggcttgggccaccgggatgttctccgcctgctgcagctgagaagcccgatccagaagctgctgctggtcatagctgggggcgtttgcaggcagctcatcctggtagatatatgcactggtgggtaccagcatgaagcgggtgggcaggccggtgttctgagccagggcgtcaatggcggcaaagttttgttccacccgggtttcatccgggggatcaaaccgggcaatcagccggtcgccggcaaaatagatgccgttgttttcctgcttgagcatggcacgctcgcagatgtatttcagtcccacccaggtgtcccgcagggggaattggtcggtgaggtaggtctcgaagtcctgggtccactcgccggagaaaagacccttccaagagaagtccggtcgctgggccagggtacggttttccatgggggaaaactcccggtcgggccagcacagattgagcacggcgcacaccaggatgaaaaggacgaacagcccgcacagggcaatggattgttttttgctcatgaattgatcctcctaaaagcggaaatagaggaaggggttataggaggcgtccaccagataggcggtggacagcaaaagccccaggaaacacagggccatggccgcgccccaccgatgggagggcttgagccgcagccaaagttttttgcccaaaggcatgctggccaggaccagaatcagcagcagcggcaggtaagagaccagacggtacagactggcgctgtcccacagcccgtttccgccgcccaacatggcgctgatatagccgaaggcccgggaaatatcctcattggcaaacaaggcccagctgatgagtgccaaaaacagggtgtaaatgtgtcccaaagcggcaggggcctttttcagaagggaaaggaggaaggccttttccaccatcagaagcacggcgaagaacagaccccagcacacatagttccaggaagcgccatgccagatgccggtgagcatccacacaacgaagatgttccggtaggttttcagcagacctttccggttgccgcccagagggatatacacatattcccggaaccaggagctgagggaaatgtgccagcgccgccagaactcggtgatgctccgggagatataggggtaatcaaagttgattttgaactcaaagcccagcatccggcctaagccgatggccatgtcggaatagccggagaagtcaaaataaatctggaaggcaaaggccacaatgcccagccaggctcccagcaccgacagggaagaggggtccatggttttgtaaacttcccacaaggcgccgatgttattggccagcagcaccttttttcccaggccgcacacaaaagtctgcacaccctgggcaaactgttccacactttcccggcgctcccgcagctggtcgtccacatccttatacttgacaatggggccagcgatcagctgggggaacagggtgacgaaggtgctgaaggacacaatgtccttctgggcccgggcgtctccccggtagacatcgatggtataggacatggtctggaaggtgtagaaggaaatgccgatgggcagacccagacccagaggctccaaaaagctcagggcggggaaaatggcccggagattgatgacgataaagtcatagtacttgaaaaagaccaaaagccccaggttgatgatcaccgagctggccaccactttccggcagaaccggtcattttcccggtggcgggcaatgagcaggccatggctgtaatccaccaaaatggagaagatcataatgagcacataaatgggctcgccccaaccatagaagatcaggttgagaactagaagggccaggttccgccatcggcggggggttatgtaatagatgcccagagtcagaggcaaatagagaaacaaaaagagtatgctgctgaaaaccatcgcgccaacgctcctacttgcattttttcaaaaaaagatggggccggcttccccggcccgccggtcagaatgccttttcaaaagccgccacggcctcgtcggcctggggcgataccacataaaggatgaaatctcctttttccacggtgcggctttgcttcaccgtgtcatatacctcgggcagatactgcttccaggtgctttccagatcggcctgccgcttttcgacggcgctgcgcacagcatccatgcgtccttctttcacctgagccacaaagaattcgtcggcccgcacattgattgcggcaaattcccaggcgtaggatgtgaggtcatcgggggaaaggccgtagaagctttgcagcaaagtttcgtctcccgcctggagcatgggcagattttcttctcccacagcggttttcatgctctccagaagttgatcgggggtttgatcggtgctgttctccttctgggtgcagccccagagaggaaaagcgaaaagggcacaaaggcaaagcgccagccatcgtttcatagataaaatccttccttttgtcacagtattcttttagacgcaggccgaaggccgtttgtttcttattttgggaaggaaaatagattttatgcaaaacgcccaaaaaagcgcccggaaattccgggcgcttattctgctttttcaagggatcaataggcgatgccgaagatcaccatatacttggcaggcttgccgcagacggggcacacatcgtcgatgtgctcctgctcaaaggggatgcagcgggagggcatgccggtttcgtttttgatgatctcttcgcagtgctcgtcgccgcaccacatggccttgacaaagccaacccgcttttgcaggatgtccttcatctcctggatattgtgggccggggtgatgttgccttccaggttggccttggccttttcgtagatggccttggcgaaatccttcaacatctgctgggtgctctccaccagattgtccagagctaccacggtcttttcccggttgtcacggcgcaccagcacgcagttgccgttttcaatatcccggggcccgatttccagacggaggggtacgcccttcatctcgtactgggcatatttccagccgggggattggtcgctgtcgtccagcttgacccgcaggccggcctttttcagtgtttcagcgatctcagcagccttttccagcacgccgggcttgtgggcagccaccggcacgatgaccacctggatgggagcgatggccgggggcagaaccaggccttcgttgtcgccgtgggtcatgatgatgccgccgatgagacgggtggagatgccccaggaagtctgatggacatactggagcttgttttccttgtcggtgtactgtacgccgaaggccttggcaaagccgtcgccaaagtagtgggaagtgccgctctgcagagccttgccatcgtgcatcatggcctcgatggtgtaggtctccatggcaccggcaaacttctcccggtcggttttccggcctttgatcaccggcatgcacaggtattcggtggccagcttttcatacaggtccaggatgtccagggtttccttccgggcatcctcttcggtggcgtgggcggtgtggccctcctgccaccagaattcccgggtgcgcaggaagggacgggtggtcttttcccaccgcaccacgctgcaccactggttgtacagcttgggcaggtcacgccaggactggatgatgtgggcatagtgctcgcagaacagggtctcggaagtggggcggacgcacagccgctcttccagcttttcgctgccgccgtgggtgacccaggccacttccggggcaaagccttccacatggtccttttccttgttcagcagggactcgggaatgaaaatgggcattgccacattttcatggccggtctctttgatcatgccgtcaaagatcttctggatattctcccagatggcctgggcataggggcgcatgatgacgcagccacgcatgctggaatagtcgatcagttcggctttttttacgatgtcggtataccactgggcgaaatcttcatccatgggggtgatttcccgcaccatttttttgtcgtttgccatattatatccctcttatcgctccataaattgacgcatattcgtaaaacgcgtcaatattatatcagtattttggaaaaatggcaagggaaagccattatctcccccggtattcccgcaaaagggaagcggaaaggccgctgagggccagaagagctgccagattgggcagggccatcaggccgcagcacagatcggccagctcccacatctttcccacatccatcaaagcacccagaaaaacgcacaggctcacccccagccggtaaggagcgattcctagctttccaaagaggtaccgggcattggctgcgccgaaaaaataccaccccagaagggaagagaaggcgaaaaagaagatgcacagggcgataaagggaccgccccattttcccagcactgccgaaaaaccggcctgagtcagggctgcaccggtgagggaggcatcagaggtgaggacaccggtgaccaggatcaccagggcggtgagggtcagaatgacaaaggtgtcgataaaaacccccagcatggccacatacccctgctgcaccggatgctctacccgggccactgcgtgggcatggggagtggagcccaccccggcttcgtgggagaaaagcccccgggccagccccaggcgcatgacttttttggcggtgacgccgacgacgcctccggtcagggcttggggagcaaaggcgcccacgaaaatggaggacagggcaggaagaaggttttcccggaagcggaacaggacaaaagcagagcccaacatataaaacagggccatcacaggcaccagacgcccggtaagggcggccagacggcggatgccgccggaaaaggacacaaagcacaaaagcgccacagcgatgccggtatacagcggagggatgccaaaagcggcctgaaaggattccccgatggcgttggactgaaccatggcacctacaaagcccatggaaaacaccaccagaaaggcaaaaatcaccgccagcagccgtccgcccaggccgggaaaggcggccttgatgtagtagaccggtccgccggtgatggtgccgtccactttccgccggaatttctgggccagtaccgcttccccaaaggcggtggccatgccgaaaaaggcgctgacccacatccagaacaccgctcccggaccgcccacggcaatggccgccgcggcccccgccagattgccggtgcccacctgggcggccacggcggtcatcagggcgctgaaggagctcatgccatcctgggaggccttctgggaaaaggcctcttgaaacacctgacggcaggcggggaaaaagccccgcaactgcacaaagccgaagcggagcgtgcaaaatacccctgcgccccccagagccaaaagaaggaaggggtcccacaaaaaggcgctgattttgtcaaattgctgccagaacagatccattttcagtccctcgcttttctgttttctcagaaaagcctatgagaaaatggagcaaactatgaaaaaatcccccaaaggcgctgcctttgggggattgcggtttttgaaaagtgttgatcatgcaagtgggctggttgcccttaccttcatgaattcgcaaaaagccgcgacctgtgcgtggctttttgcacttctcaagggacaagtgtacgccaaaggcgtgcatgcaggcccttgtaaaaactcgtgaaagcggcaaagccgctttcacgaaaaactattacatggcccgggtcttgacttcttcgccgatcttctccatgaactcttccaggctcatcacctgggtctcgccggtcttccggctgcggacggccacctggccgctttccgcttccttgtcgcccagcaccagcatataggggatcttctccagctgagcttcccggatcttgtagccgatcttttcgctgcggtcgtccagctcgcagcgcaggcccatggcggtgagcttcttcatcacctggacggaatactcgtgagtccggtcggtgatgggcagcaccttcacctgcacaggagacagccaggtggggaaggcgccggcaaaatgctcggtgatgacgccgatgaaccgctcgatggaacccagcagggcccggtggatcatgacgggacggtgcttgtggccgtcttcgcccacatattccagatcaaaccgctcgggcatctggaagtccagctggatggtgccgcactgccaggtgcgtcccagggagtcggccagatggaagtccagcttggggccatagaaggcgccgtcaccggcgttgatgacaaactccttgcccatctcctggatggcggcctggagggtgtcctcagcaaaatgccacacttcctcttcgcccatgtggtcctccggcatggtggacagctcgatgcgataggtcaggccgaaggtggaatagatctcgtcaaacagccgcaccacatttttgatttcttccttcatctggtcgcgggtcatgaagatgtgggcgtcgtcctgagtgaagcagcgcacacggaacaggccgtggagagcgccggacagctcatgacggtgcaccagacccagctcggccatgcgcagaggcaggtcgcggtaggaatggggctggttcttatacaccagcatgccgccggggcagttcatgggcttgacggcgtaatcctccccgtcgatcttggtggtgtacatattgttcttgtaatgatcccagtggcccgaacgatgccacagctcctggttgaggatgatgggggtggagatttccacatagccatagcgcttgtggcactcacgccagtaatccagcagagtgtttttcagcaccatgcccttgggcaggaagaaggggaagccggggccttcctcggtcatcatgaacaggcccagctctttgcccagtttccggtgatcccgccgcttggcttcttcgatcttggccaggtaggcatccagctcttccttcttggggaaggctacgccatagatccgctgcagggtctgacggctgctgtcgccacgccagtaggcggcgttgcaggcggtgagcttgatggcgttgcccttgatgcgaccggtggagtccacatgggggccggcgcacagatcggtgaactcgccctgcttgtagaaggagatcacttcgtcctccggcagatcctggatcagctccactttgtaaggctcgcccttttcctccatgaagcggatggcctcttcccggggcagctcgaaccgctccagcttcagcttttccttgcagatcttccgcatctcggcttccagctcggagagctgatcctcggagaagggttcgggcatatcaaagtcatagtagaagccgttgtcgatggcaggaccgatggccagcttcacttccggatgcagccgcttcatggcctgggccaggatgtgggagcaggtgtgccaataggtcttgcggtattcttcgttttcaaaggtgtactggttgttctggttttcgctcatggcaaaattcctccttttgcggggcggcggatgatgaatgaaaaacaaaaaaagcctcgcccctgaaatttttcaggggtgaggctctgaaaaaagtcccacggttccaccctgcttgcgccaaaggcgccgcttgtgacctctgtaacgggaggacccgtcccgcttatgtcgcgggcagctcggaagtggtcaggccgcggccgccgcaggatgctcgcagcaaaatgcatccctctctgaacggtgctttgcggtttcgtcttcgtcaaagccaatttgataaggacactatatcaccggtggggaggcttgtcaaggcggattttagcccatcagaagggccatgacggccttctgggcatggagacggttttccgcctcgtcgaagatctcctgggcatggccttcgaagacctcttcggtgatctcttcgccccggtgagcgggcaggcaatgctggatcatgcagtcgggcttggccaccttcatcatttcgctgttcacctggaaaccggcaaaggcctgttcccgctgggccttttcctgttcctggcccatggaggcccacacatcggtgaagatcacatcggcgcctttggccgcttccatggggtcctgagtcatcacaaatttggcatcggttaccgtttcggcataggccagcacatcgggatggggctgataggaagcgggacaggcgatggagacatccatgccgcatttcaggccgcccacgatgatggagtttgccatgttgttgccgtcaccgatgtagcagatcttcaatccttccagcttggccttgtgctcccggatggtcatcaggtcagccagcacctggcaggggtgagccatgtcggtgaggccgttgatcacggggatggagccgtatttggccaggtcttctacttcctgctggtcaaaggtgcggatcatgatgccgtcgcagtagcggctgagtacccgggcggtgtcctgtaccggctcgccccggctgatctgactggtggcgttggagaggaagagggcgtggccgcccagctggaacatacccacctcaaaggaaacacgggtacgggtggagttcttgctgaagatcatagccagggtcttgccctggagccggggatgggggatgccgtgcttctggtcgtatttcagctggtcggccaggtccaggatctcatagatctcctcccggctcaggtccagcagtttcaaaagatgcttctgcatgatagttattctcctttttcgcttttcagttcatccaggacctgcttgagaatggcaaggccctgatccatttcttctttggtgatgaccagcgggggcagcagacgcagggtgtccttgcctgccgtcagagccagaaggccctttttcatcagcttgttgtgcagctcggtatgggtgatgccggtgacgcctacgcccagcatcagccccatgccccgcacgccggtgacaaaggggctgtccatggcttcgatggcctttttcagatagtcgcccttttccttcacctgggcgagaaattccggggtgagggtgtccatcaccacattggcggccgctgcggccatggggttgccgccgaaggtgctgccgtgggtgccgggggcgagcacatccttgcacttttcaccggccataaagccgccgaagggcatgccgccggcgatgcctttggcaaagctgaccacatcgggagtgactccgaactgctggaaggcaaacagggtgccggtgcggccgatgccggtctgcacttcgtccatcagcagaagccagtctttttcctggcacagggcggccactttctgtacatattccttctccaggggatagacgccgccttccccctggatgggctccatcatcacggcgcacacatcgtctcccgccactttcagaagggcgtccagatcgttggccggggcatagcggaagccttcggtgaaggggaagaagaactcatggaaatgatcctgtccggtggcccgcagggtggtgatcgtccggccatggaaggaattttgcagggtgatgacggtatggcgtccggcgccgtatttgtcaaaggaatatttccgggccagcttgatcataccttcgttggcctcggcaccggagttgccgaagaatacgccgctcatgccgctctggggcaccagacgggaggccagaacggcgcagggagaggtgtaatagaggttggagatgtgccccagcttgagagcctggtcatagatggccttggcccatgcctcgttgccgtagcccaggctgcacaccccgatgcccgaggtgaagtcgatgtactctttgccctctgtgtcatagagcttagcgcccttgccgtggtcgatggccaccgggttgcgcttgtaggtatggaggatatactggtcgtccagctgtttgatttcttcaaaatgcataggagttggctcctttcccgtttaatagatcatggtgccgatgccggcatcggaaagcatctcgatgagaatggaatgggggatgcgtccgtccaggatgtgggtgcgttccacgccggagcgcacggcctccacgcagcaatccaccttggggatcatgcccccggcaatgattccttctttcaccagaggaggcacatcggaggggtgtaccttggagatcagggtgctttcgtcgtttttgtcccggagcaggccgcgcacatcggtgagcaggatcagcttttccgcccccagagcgatggcgattttggcggcagcggtgtcggcgttgatgttatagcagcagggggcgtcgatgccctgggccacagtggaaatcaccgggatgaagccctgttcgatctgggccttgatggggtgagggtccacctgggtgatctcgcccaccaggccgtagtccaccccttcttctgtgtggcgcacggccttcatcatgccgccgtccaggccgcacaggccgatggccttgccgccggagcggttgagggtgtccaccaggtttttgtttaccttgccgcagagcaccatctgcaccgcttccatggtttcttcatcggtgtagcgcagaccgttgacaaatttgctctctttgcccagacggcggagcaggtcggaaatctccgggccgcctccgtggaccaccaccacattgatgcccaccagcttgagcagaatgatgtcgctgatcaccgcctggcacagttccggggagatcatggcgttgccgccgtatttcaccacaatggttttatgatggtattcctggatatagggcagggcctccaccagaacctgggccttgtccgtatgggaaaattccatgttgttcccttctttcttccaatggggcgggttaagtccggtaatccccgttgatcttgatgtaatcgtaggtgatgtcgcagccccagcaggtgcactgggcatccccctgggacagggtgatgaggatctctacttcatcctcggtgagcaccttccgggccagatcttcgtcaaaggggagaccctgtcccttttggcatacggccacttttccggcctgggaagcaaaggttacatccacctgagtgggatcgaaatccaccccggcatagcccatggcgcaaagcacccggccccagttggcgtcgcagccgaaaatggcggccttggtaagggtggaggaaatgacgcttttggaaagggcctgggcctgctccacgctttctgcaccggacaccgtgcaggtgatcaggtggcgagcgccctcgccgtccttggccatggcccgggccagatggacgcacacctggagaagagcctggcagaaggcatcataggccgggccttcttctgtgatctcagagacgcctgccatgccgtttgccagaataatgcagctgtcgttggtggaggtatccccgtccacgctgatccggttgaagctctggtcccccacagaggccagggccttttgcagcagagcgggggaaatagcgcagtcggtggtgaggaagcagagcatggtgcccatgttgggatggatcatgccgctacccttggcgatgccgccgatgaccacttccttgccttccagctggaaggagacggccacctcttttttctgggtgtcggtggtcatgatggcgtgggcagcgtcgtcgctggcctcggaggaatgggccagtttcccggccagcaccggcatcccttcctgaatgggggcgatgggcaaagtccggccgatgaccccggtggaagccaccagcacctgttccggggagagggacagggcctgggccgccgcctggcacatggccagggcgttttcgttttccagaggggcgcaggcattggcgttgccgctattgacggccacggcctgagccgtgccgctttttacatggtttcggctgagacgcaccggggcggccttcaccttgttgcgggtaaagatgccggcagcggtgcagggtttttcagaatagatcagggccagatcctttttgtcgccggaatttactttgacgcccacatggatgccggcagcggaaaagccctgggcggcacatacgccgccgggaatgaaatgtatcatggtcagctcctttgtttcaaaaggggggatggagggtcagatgagaccctgggtttcggggagggacagcatcaggttcatattctgcaccgctgcgccggaggcacccttgcccagattgtcaaacagggcggtgatggtaaagcgttccccgcttccgcccaccaccagatgcagccggttggtgccggagaactggtttgcatatagggtgcctttttccaaaaccgagtccccaactgtgacaaaggtctgcccttcatagtgccgggccaggatctgccgcacttcttccggggaggagaccccttgcagctgggaaaggtggaagggaacggtgaccgccatgcctttgtaatagtcatccacaatgggagtaaacaggggtggggtgtccagctggcacaaatgggcgatctccggcagatgcttgtgcttctggttcagcccgtacaggccgggggaggacagagtctccggccggttttcctcttcatactggccgatcatctttcgtccgccgccggaatagccggtgagggagaaacaggacagcagggcgctggaagaaagggcgccggaagagcgcagggggtagacgatgctgataaagccggtggcgtggcagcccgggtttgccacccggctgctttggctgatgtcctgccgtctttccggggagagttccgggaagccgtagtcccagccggccgctgtgcggtgggcggtggaggcgtcgatgatccgggccttggagccttcggccagcttcaccgcttcccgggcggcgtcatcgggcagacagagaaagacgatgtcggccttgtggatcatctcctgccgggcggcggggtctttccgcttttccgggtcaatggagatcagttccaccccggggtgggaggccagccgctgatggatctgtaggccggtggtgccctcctgaccgtcaatatagaccagtggcttcatttgctttcctccttgggggtgtgctctgtgatgaactgctccagattttcgatctggcggctggtctctgccggggcggggccgccgtagcttgcgcgcagggccatgcagttttccaggttgagggattggtaaatgtcctcttcaaagagaggagaggccttttgcagttcgggaagggtcagctcttccagggtcttgttctgggcggtgcactgagccacaagctggcccaccagggtataagcatcccggaagggaaggcccttgcgggtcaggtagtcggcacagtcggtggcgttgatgaagccgtggccggcggcccggcgcatattctccggcagcaccttcatggtttcgatcatagcggtgaacaccggcaggcacatttccacggtgtccagtgcgtcaaacaccggctccttgtcttcctgcatatccttgttgtaggccaggggcagggatttcatcacggtgagcaaggtgatcaggctgccgtagacccggccggtcttgccccgcaccagttcggccacatcggggttctttttctggggcatgatggaagagccggtggaataggcgtcatccagctcgatgaacttgaattcccagctgcaccataggatgatctcctcggagaagcgggacagatgcatcatcagaatggaaaggtcgctgagaagctccagggcgtaatcccggtcggaaaccccgtccagggagttttccatgggagcggcaaagcccagggcctgggcggtctggtgccggtcgatgggataggtggtgcccgccaaagcgccggagcccagaggacattcgtccagccgctcaaggcagtcttccagccgggtcacatcccgtttcagcatggccccataggccagaagatgctgagcaaaggagatgggctgtgctctttgcagatgggtgtagccgggcatgacggtgtttttgtgctgggcagccttctggcagatggccttttccagctggagcagctgagagatgacggtggggatatgccggcggacaaaaaggcggaagtccagcgccacctggtcattccgggagcggccggtgtgcaggcgtttgccggcctggccgatctgctcggtcagccgggattcgatgttcatgtggatgtcttcctgatccagcttgaattccatctcgcccttttcgatgtccagaaggatctgccggaggcccttttggatggcttcgttgtcctcatctgtgatgatgccctgtttggccagcatagcggcgtgggcctggctgccctggatgtcttcttcgtaaaggcgctggtcaaaggggatggaggcgttgagggcgtccaccagcgcatcggtgtccttgccgaatcttccggaccaaagtttcatattgtttccctttcttctttttcagttaagaggacggggcgaagaaaatctctccgccccggtgaattttttaaaatggatgggccgatggcttacagcttgccctggtcccgcagtgccagaacggtgtcgggcaggccccacaggttgatgaagccggtggcgttggtctggtcgtagctgctctcttcgaaggtcaccagatcctcggaatacaggccgtgaggagaggtgatggaagaggtgatgatgttgcccttatagagcttgagcttgacggtgccggtgacatattcctggctctttgtcacaaaagcgctgagggcttcccgcaggggggagaaccatttgccgttgtagagcagatcggcaaagtccaccgccagcttggtcttcatgtgagcggtatccttgtccagagtgatcatttccagcagctgatgagccttataaaggatggtgccgccgggggtctcatagacgcctctgtccttcatgccaaccagccggttttccacgatgtccagcaggccgatgccgttttcgccgcccagcttgttcagtttgcggatcacatcgctggccttcatcttttcgccgtccacggctacgggcacgcctttctcaaaatcgatggtcacataggtggccttgtcgggagcggccagggggctgacgcccatctccaggaagccgggcttttcgtactggggctcgttggcgggatcttccagatccaggccttcgtggctcaggtgccacaggttcttgtccttggagtagttggtctcgcggctgatcttcaggggcacattgtgcttttcggcatagtcgatctcttcgtctctgcccttgatgtcccactcacgccagggggcgatgatgggcatatccggtgcaaaacgcttgatggccagctcgaagcgcacctggtcgttgcccttgccggtgcagccatggcagatggcgtcggcgttttccttcttggcgatctccaccaggcgtttgccgatgatgggccgggcgaaagcagtgcccagcagatactgttcgtagctggcgcccatctgcatggaggggatgatcacatcgtccaccatttcgtcggtcaggtcttcgatatacagcttggaagcgccggtcttgatagccttttcctccaggccttccagctcgtcgttctgtcccacatcaccggccacggcgatgatctccgggttgttgtagttttctttcagccagggaataatgatggaagtgtccaggccgccggaataggccaacacgatttttttgatcttgctcttatccatgagtaaaacctccgtttgtttgtttacgatggcttaattatacgactatatgcatgaatatgcaatcatcagattgcacaagatgaaaagggatttttgggaaatttgtatattatatcaacatagcgtttaaatattcataatgcgccatgatataaaaagggctataataggctccaaaggagggaatcgtgtggtcattgccgatctgcatatccattcccgctatagccgggccaccagccgggatggagatctggagcatctggatctgtgggcccggaagaaggggatcggccttgtggggacgggggattttacccacccggcctggcagcaggaaatgagagaaaagctggagcccgccgaagaagggctttatgtgctgaaaaagccctaccgtttgctggatgagggagaaagtccacggtttgtggtcaccggggagatcagctccatttataaaagggacggaaaaacacggaaggtccacaatctgctgctgttgccttctttggaaaagggggaggagctttcggggaggctttcccaggtggggaacctgaatgccgacggccgccccattctcaaactggacagtgaggatctgctggggatgctgttggacacatccccggaaggagagctgatcccggcccatatctggacgccccatttttctatgttcggggccttttctgccttttccactttggaagagtgtttcggcgatctggcggggcacatccacggcatagagaccggcctatcttctgacccgcctatgaatgccggtgtgccggccctccagggcctgcggctcatttccaactccgatgcccattccccgggaaaactggggcgggaggcgagtctcctggagatcgacctgtcttatcagaatttgttggacgctatccgccaaggtgaggaaaagggatggcggggcaccattgaatttttcccccaggagggcaaataccactgggatggccaccgggcctgtggggtgtctatggcgccggaggaaggggaaaaacggggcaacatttgcccggtgtgcggcaaaaagatgacggtgggggtgtgccatcgggtgctggagctgtccggcgctggaaaaacagagactgctccctatgagagcttggctcctttgccggagaccattgccgcctctttaggggtgggagttacatcggtgaaggtgaagcggctgtatgaaaacttgctttgtcagctggggccggagtttttcattctgcgtcaggccaaaatagaggatgtggagaaagtggccggggcctgcgtggcccaggggctttgcaatctgagagagggaaaggtatgctgggagccggggtatgacggggtctatggcaaacttcaccttctcacagagcaggaacgaaaagagctgaaataaaaaaagaactgcctggaggcagttctttttttatgataagggttattgacgggaggggatcttcatcgctttgcgaagcagcagaagtcccagggggaacagaagggagagagcggccacgccggcccgggaggtgttgaacagctgggtggagaatcccatgatcatagcgccggtaaaggaggcgctttttccaaagatatcgaagaaaccgaaaaattccgccgaacgctctttggggatgatcttggcgtagtaggagcgggacagggcctgaatggtaccctggaacaccgccacacacacggccaggaaccagaattcccaggcgcggtccagctgaagggcaaataccgccacaaagaaataacccagaatacagacctggatcaggttttccggcttgtagcggcggcagagcttggcgaaaaacagggaacaggggaatgccaccacctgggtcagcagcagggccagcaccagattggtgtcggagatgcccacatccttgccgtaagaggtggccaggtcaataatggtatagaccccgtcaatataaaagaagaaggccagcaggaaccaaaaaacctttttttccttgcggatgtcccgcagggtgcgccccagacggcggagactttcctttaccgcaccaggggcccggggaacaaagtggacctgccggtagtttttcagcaaaggcagagaacagccgatccaccacagggcggtgatcacaaaggcaatgccagtggcggtggctgtgcccagtccggtttgttcggctgtcaggatcagggccaggcaaaggacaaagggaagacagctgcccagatagccccaggcatagcccttggaagataccatatccatacggctgtcctcggtcacatcggagagcatggcatcataaaacaccaggctgccggaaaaaccgaccttggccaaaataaacagcaccaggaatcccatccagtccagaggcatgggcaaggccaggcagcccaccacgcccaaagccagcatagcggtgaagagcggctttttaaagcctttggtgtcggccagagcgcctagggtgggccccaggaaagccactaccagcgtacagaaggcggcagtgtagctccaataggcggtggag

SEQ ID NO: 2867 - DNA, 32759 bp, Unknown
  16S sequences of unknown bacteria
aaatatgaattggagcggcaatatgccgcgactaacacgatattaaggcgcttgggaggcgcttatgtggctgaccatattactatcgtgcataatagcaatctgcgccgtgctggcagtagtttatattgtgcgccgaaaaattaaaaataggggaaaatgctccgattgcagcgggcattgctacggttgcacggcgtgcacttacgcaaaagaacagccgccgcataacaaaagcgaaagcacggattgctctgccgcaagccaggcagccattcacggcgaacgggagcaaaacgaacactgacagaacactccgaaagcatacaaagggcattgtttgggcgtaccgataagcggcgtcccccgccgttcaaatttttggttaaaaaatagacaaaggcacaaaaaacagtttgacaaaggcaaacgtattttatataataaataggctgtaaacgaaatatgcaccgttagctcaaccggatagagcgacgagcgcagagttatcaaaacaatgaacactcattgttttgctgcgcgagatgagtgagcgcatatgcgcgcgcgaacggtgaccgagcaaggcggtcttatccgctagccttgcgagaggtctacggaaccaaataaacaacttaacaacattatgcaccgttagctcaactggatagagcgttggtctacggaaccaaaggctagggattcgaattccttaaggtgcaccaaacgcaacctgattcgaatattaggttgcgtttttattaggtatattttctaaactcaattataaaaaaggaaagacacgacaacacagccgtgtcttttttgttttagggtttatatctcattttctaaaccaagcaaataatcggcgcttacattaaaggctttgcaaattagataaatactctctgcattaggttgtatctttccggcagtccaatccgatacgctcattgcagagatacctgctttttctgcgaatttacgtttgctcaatcctgtttcttttataaattcacttaatcgaattgcaaataaattttccatacttaaattgtaagataaaatttacaaaaaatcattgacataagacatgtcttatgatataatataaacgtaagacatgttttacaaactaaaataaatagaggtgtagacaaaaatggaagagaaagaacaaaaaagcaagaaatgttgttactgcggcaattttgaggggtactataccaaaggattgcggcgttacgagaaaagcaaacaagggttttgctcagaacatcataaaatcgtagaaaatcaagattgttgcgagtgttggagaacaaacagcagaagacatttagtaagaaaccgagttgcttcaagggcgttatacgaaatcttaatggacatttccgctatccgacaaatcattcaggaaaacgaagaggagaagaaaaacttataatggaaaagaaatgccaaaagtgtcgatattacagcgcgtattatgaaaagggactggcaaacttttacagagaaggaaaagcggggttctgttgtcaaaagcaaaaagccgtagagaaaaacgacatctgcgagttctatctatcccgtatttctacgaaaaaaacggttaccgtggaatatatcgacgaggtgctcaaagatatagaagagctggaatggatataccgcgactataactattgactactaaaaaagaagtcaaattgaatttggcactatggcgggtgcttgtcttgaacaagtccccgccaaaaacaatcatataaaacaacttgctttcctcaaagccgcgcggaaaaggcgttacgccgcataaataaaaaagccgacggcaaacgcgccgacggcttttttctcgcaggactcagtcctccaaaacggcgaggatgcgccccatcgattcctcaaattcctcgtccgtagagttgttgaatatcaacagatcgtcctcgctttcgggggtgtccaattcgacgggcacctcgaagttacaccccgctatatattcgtcccaatgcgccagcttccaggtatcgcggtcggaattgcgggcgatcatcctctgacggcacacctccttggaagtgttcacccagatgacgacgagttttgcccctttcgctaaaagagtttcccgaagcttctccatatacgctttctcccggatctcgcgggtgaagggcgcgttgatgagcaccttgtcgtcataatcgagcgcttccagcgccatgccgacgatggtttcgtattcataatcgcggatatatttttcaaagaagggcgaactgcggttgtattcctcccccgccacgagaaaaatttgcttggagaggggaatcaggctgtctttatcgagataaacgatatgtctgagccgtttggaaagttccttggaaatgtacgtttttccgcaggcgggcggcgacgtcaccaatatcagcttcttcataactgcgaaaactccttttttgttattttccgcaattattataaaatttttccttttttcagtcaatcggatttttcgccctaaaaaaatcccgccaaagccgagccgtattcacttattttgccagaatcgttcacctatcttgacaaaactcgtcctctcattcgggaatctccacgtccacctttctgtcgcggaaataatattccctgtcccgctgcccgatcggacggagcacgcggcagggattgcccgccgccaccacgcccgcgggaatatccttcgtcactacgctgcccgccccgatcaccgtatcgtccccgatcgcaatgcccggcagaaggacgctgcccgccccgatccagacgttgttgccgatatggacgtcgatgttgtactgcatctgatcctttctcagcgcgggctgaatgggatgccccgccgtggcgacggtaacgttcggtccgaacatgaccccgtcccccacgtaaatctgtccgtcgtccaccaatgtcagattgaaattcgcgtagacgccgctgccgaaatgcacgtgcttccccgcccaattcgcgtgcagaggcggttcgatatagcaattttctcctatttccgcgaacatttcttttaaaagcgccgcgcgcctctccatttcggacggacgggtggcgttaaattcatactgtttttcgagggcggcggtctgttcgcgcatgatggcgtcgtcgcccggcatatacagccttccttcctccattctctttctcgattcttccgacgtcatttccattcttcctttcctccccggcgccttcccgctgttccgcaagcaaaaatcgccgtttgttttctcccgctattgtaacaaatatccgcccggaagtcaacaaaaaaccgcgtggcagcgcattttcggcgcagccgcgcggttttcttcccagcgtcttttgctctttatccgtaattgtgatcgggatcatagccgtttttccacgaggaggtgtcgatacccagcgcgccgatcatctcgacggcgccctcgtgcagtttcttatcgtaacttttcaaaaattgatcgtcgctgtattttcccgccacccaatactgaaaatacctcgacatggtgttctgcgtagccacggtgacgcctgtcgtccactgacagctcggcgtgcgcgcaaactcgccgcggatatagtcctctatctccgcggggatcgcggtgccgtagaccgcgcccacgtattcgcccgccttttcatccaccattttattgatgttcttgggcgccgtcagccacatcagatagagtttggaggcgagaagatgcgcttctcctttctgctccaccgcctgtttgcagatattgaaggattcggcgatgggcggattatacgcgccctgtcccgtttcgaaatccgcgcagtagtcctttgaagtcgcggaatccgcaagcggcgtggcaaaaatgccgtactcgaattttctctccgcgttgacgttttccgcgcccaaacgccacataccgtcctccatcatcgctacctttccctgattccacaaaggctcgtaatcggtatccgccgcgcccgtctgcaagatttcgttatatttgtacttcacttcgttatacagggagagaatgtttccgcggttttgcccctgaccgtagaataccccttcgtatacggcgcggagaagttcgtcctgcgtcatgtagccgttgccgtcgtagtcccattgttccttgatcttttcggcgtacgtcggtcccagcgaaaattgaacgtcccatacgtcgatgttcgccttcgcgttcaaagaccagggcgccaccgcgacatatcccgcgtccgaaacggttttgcagacgcttttgaactgctcccacgtgcgcggaatttccagattcagctcggcaaagatctctttgttgtaaaaataggccgtggcggtgccgggatagcacatgacgggaacggcgacgatattgcccgccgcgtccgacgtcatatcgctcgtccacatataatcgggaaacatatctttccagcgctcgctgccccgcgttccttcctccacaaacagattcggctcttccagcatctcgtcgagattgataaaccatcctcggtccgaatactccgagccgtgcatcatcacgatgtcgggcgcgtcggaggaggagatctgcgtcgtcatccactgcgcccaatcccctacgctctttttcgaatacgcccattgcaccctgacattggggaacatctccgtaaattcgtccgtaatgtcctgaatggaacggaacaccgtgggctgctgctcggtaggctccgtgttcgtggtgggcatcagaccgttgatgtccacgaggagggtgagcggctttccgtcgttgatcagaataccgttccaggcgtctgcggaagaagagttctccccgtctttgcaggcggcgagattgaggcacatcagccctcccaacaccgccgccgttattcgtttcgtctttgcgaatttcattgttatcatgacctcttattataaaatctattcggagcgcacgccgcacgcgacatggtaaacttgcgcaagcggcaaaggaagtaaggaggcgcgcggggacgcgtaaacgcggctctctatggcgcgtacaacagtttccaaacccgttttttccgtctgcgcgtccgtattctcccccgccgcaaaaagggacgcgcacagcggggaattgtcccgtttggaaaacgcgtccgccgcttttttgaggaggaaaaaagcgctctcgttcaacgccttttcttcccgcgcgttttcaaaacttcaccgccgcgttcgtcagaccttccacgtagaacttattggagaacacgtaaagcaggatgagcggcaccgaggagatgagatagcccgcgaaaagagtgggatagctgcccgtattggcggacaaaaattcctttttgatggcggcggcgatcgtcagtttacttgcgtcggagggaatggcgatcatgggccagatatagtcgttccacgcccccgaaagctgcatgatggcgagcgtcgtcaaaatgggcacggacagaggcagacaaattttcgtatagcacacgaaatcccccgcgccgtctatcttcgccgcttcgaagatactctcattaagcccctcgaaaaagccgcggagcaaaaatacgccgaacaccgagccgcccgtgatgatgggcagaatcaaaatgagataggaatccgtgccgaccagttttttatagagcatgaagctaggcacgagagtcatgatggcgggcagcatcatcagcccgatcaccatggcgtacagcgcgtttttgagatagaatttcatgcgggcgaacgcatacgcggccagggaagacaccgcgagcatcccgagcgttcccgcgccgccgacgaaaatggtgttgagaatatagacgtccaattccttggcggcataaaatacgttttcgaaattgagcgggagcgtgggataccacttggtgagattgaactgcgccgtgctcttgaacgagcaccacaccgccatgaaaagaggatataccatgaggcacaacaacaggagcaaaatgacgtgagcgaatacctgcccccagcgaatttttattttcattgcgcgttttccccctttttccctatcttaaaagaaaggagcgtaaagatcatgatgacgacgaagaggaaagtgccgatagcgcttgcgaagcccatacgccccgactgaaacgccgcctgatacatatagtatccgggcaccatggtgtcgtaaccgggtcccccgtccgtcagcaggaactgcaccgaataatcctgaatgccgccgatcagtccgttgatgaggaagaagcgcatctgtcccgcgatctgcggcaggtcgatgttccagatgatctgaaaggtccccgccccgtccagccgcgcgctttccctcgcctcggcggaaacggcgttcagtcccgatatgtaaatgagcacattggtgccgccgatccacggaaatcccatgaaaataatggcgggaatgacggtgttcgaattatgcagccagtccaccggctcgccgcccaccatctgccagatcgccgtcaggatgccgaagttcgggtcgtagatatagtcccagatgagggtcacgaccacgccgggggcgaccatgggaatgagcacccagagccgatacgccgattttgccttttcgctgcggagattgaagatgagttccgcgacgatgaggggcaccgcgatgccgatgagaagtttggggatcatgatcttcaaaagcgtcgcgcaggagggccagaatacctgcgtatcggaaagaaattccctataatttttccagccgataaaggcggattcccccgagtccttccaatcgaaaaaggaatgataaataccgctcagcgcgggataataggaaaatgtgagcagaaagaagaagaggggcagcaaaaacagatacgcctttctcgacgcgtacagctttttcccgacgttcttcaaaacggggaatttaccgttccccttggcggagcgatcccccgccgcgttcgtcgttacggtttcgttttccatgcgtcaatcctcctttcccgtgtcgatgtcgtaaaaaatatcgtccgtcgtcatgcccgatcccgaaccgccctcgcccgccgccatggacagcgtatagctcgcctcggcgggcacaaagacgaagagggaattatcctcgtcccgcaccgtcagaacgacgggcgtcaccttccccgttcccgcccgatagcagcgataatccaccgtcacgcagccctcgccgtccgtatccgtgcgttcgaggacgttgcggtttgtcttgatatagagggtatgtccctgcacgggcttgccgccgtgcgtcacccgaacgacaaaccgcactttcgtactgccgtccgcgatcccccaatcggcgggcacctcgcccgcctccgtcacaggttcgcccgattccgtcagtctgacgacggatacgaactcgattttatacgtcagggaaatcgcaaaatctatcagcgcgccgacgcagagcacggcgacgatacagccgatgacgatgagctttttcaccgcacttttcattccttttcctccgtcatgaaatattttatccagatcggcgtcttgcccgaatattccacttccacccgcttttcgccgtcgagggggaaatacagccaggaaatgccgctccaaatacaggtatccacagccgaaacgagcggtttgccgtccgccgtcactttcagtccttcgggatagccgcgcgccgtgcgcagaggcgccgtgccgtccatcgtaaaggtaagttgcagggaggtctttccctccgtgtcgaagatcagcgtttcaccgcggcagaccgccgttttgtcgaagctcttttcccgcggcagaagcgtccatttgacgaggagaaatccgtttgcggaaagttccaaaggataggcgtaataggcttcttccgcctccgattcaagtccctccgcccctttgtccgccccgcgcgtgagttctccgtcagagatcagcgtttctattttcaggcggcaatttttccaagcgggcagtgcgagcagacatttttccgcgcgggaagaaggattcagcgccaccgcgtatcccgaagcgcccccgtccgcggcgtagccgtagatctcccctttccgcgcgtcgccgaggataaagtccgtttcgtatcccccgcggaggatctcctcgtaaacgccgtccacgaaggaaaaatagcggaggtcgtcctcgtccagcccggatacgtccccgtatagatgcactttcccgccgccgcgcatgacgtccatgagcacaccctgccggaaaagttttttcccgagtccgtagatggtcgaggtgcttcccatcatcgtgccgtggtcgtcgatcgccgagaacggcatggacgcttcgcggaaattgcggatcatcgcgtccgtataatagacgagggaatgagaaaagtccccgcaggaaatttcgcttggccgcggatcgccgcagtagagataatcgacgtattcgcaccagtagggagaaatcgcgtagcctttgcgctcctgcacgctccctatccaatccagctccgtcgtccagccgttatagcagaggatttttaagtcggtctgcaacgcctttaatttcccgatcatgcggataaaattgccgacgctcttttccttggactcggtgtgttccacggaatgcccgtgatccggattcgcgcactcgaaataagcgaaatccagcttgatcatgcgcacgccgtgcctttggatatgatggctcagcgcttccgtcatcgcctccgccacgtcgtcgcaggcgaagcacagagcgccgctttccaataaggcgtcgtatttttccatccctttccaatgggcgtgaatgcagtttaaatcgaaccagaggccgtatttcatgcccttttgttcgagctgtttcaacaccgtttccacgccgtgggggaaagtgctctttttaaagcggatatacggctgattttcctcaaaccagtaggcgtccatgagataataatcgaatttcacgcccgatttttccgagagcgcggcgatccgttcgatattttccaaagtcatgatctccgtgaggttgatgtggtccgtgaggtcgtcgtgcagtccccaatcgcaatagatgcgcagcggctgccgatcgcccgaccgcaccgacttttttcggatataggcctcgaaggaacgggaaagatctccgaaagcgccgaatccgtagacgacgggcagggactcgaaacgggaagttttttcaaagggcgcctgcgtaaaacagagggtatcgccttcgaaacgattgcttgccgcgggaaattctatgccgcaccacatttcccttccgacgaatacgggctgtccctccccgccccgcgacaaagccctgttgaccgtccgattttcgagcgcggcgcgcttgatataaaacgggagaggcgcagaaacgaggattcgtttttcaaaggtttcttcccgcgccgtatacgtcacttcgacgaggagattttcgccccgataagtaagggtcaattttttcccttccccgtcctttttcagtccgcaaaacccgaacgcccccgcgggcagaatatgcgttttgccctccctttcgaggtagaggacgaattcgtccccgcccgacaagacggcggcttcgcccgtacggcggttgacaaaaaccacctgtcccgcttcatagagcagacttccgtaaaaatttctcaattcaatcgtttccatctttctcttctttcttcttgttttttattaccgattttcggatgacgagctcgcagggaaccatcacccgcacgggaaattttctcttataattgatccgttccaagaggagatccgtcaccagcctgccgatctcctctttgtagatccgcaccgtcgtcaggggcacgcggctataattggatttcaaaatgtcgtcgtgtcccgtcacggatacgtcctcgggcactcgatacccgccgtccaacagcgcgttcatggtccctatcgccatttcgtcgttcatgcagcagatgactttcggcggcggcgattcggataatttttccctgatcgcgtcgtaagctttctgagattcgttgagcgcgttgaaaaaatatttttcgttgatgtgcaaagaaatttcggaagcgtaacgcacgatggcgtcgatgcgcttctgatccccgcccgtcaccagtcccgcctccgtatacccgcagcttttgacgtaatcgagcatcccgttcatcgtggaacacatatcgctgcccacaaaatccgcgttttcgataaagctgccgtaaatgctcgataagtatttcgtctgcgtggagagataagaagcgaggtcgtcgggaatttccccgaacaggatcagtccgtccagtttcttttcgcacaaaggcatattgcgccgatacagctgcgccacttcgtcgatatagaaacgatacacctgatactccgcgtccgtcaaaatggtggtgatcccctcgatgatacggtcgaaataggcgttcattttcagcaccgcgcccttataggtgacatagccgatgcggatgtcctttttcgcctttaaagaattgtttgcgagcagccgcgcgtgatagtcgggaatgtacgccgtgcgctctatctccttcaacactttcgcccgcgtttcgggtcggcagcggagcgtggaatcttcgttgatgatcctcgaaaccaacgcaatcgacactccgcacgcgtccgcaatatcctgaatcgtccgtttcaccttcttctctccttgccaatttttctttcgtctttcccctgccccttccctttcacttttttaaagggtttcggcacaccgttttttcccatgcgcctcacgccggcgtttcttccgccgtcccgtcgggcagatagacggccaaggcgcactttttgcctatcctgtctgccgcttccgataccgcgcagcgtcttatttctccccgctcgcattcagatcgccgtaaacggaaaggagaatcgtagacgataagcgccctttctctaaaatcgaaaaatccgcttcgcctttcgcctcgaataagacggcaggcgcacagatccatctccttttactctcgtaaatacgcgcatatcccgttgggcttgcatcggacgcgggcgcgatttttacgcaggggcaaagggcgagcgaaaacagaacgcctgcgataaaaagcaaaccaaccttaactctctccttcaccctttttcctcttatcaaaatcgggggaacgaccgttttctattcacggcaaagacggtcgttcccctttttctcagaatgtttccttaaagaacgtcattgttaaaatcattttctaagtttacttttttcttctcttcaatcctatcgccaaaacgcccgcggcggcaagaatagaaacggcgccgatgcccagcgcgctgccgcagccgtcgctcgaaacggaggtcccgctcgatgcgctgtccgcggaagacgaatcgacgggcacagtcgaactgctctccgaactcgacgaaatcgacgaatcgggaatatcgctcgacgaggaagaagaactctccatcgcttcttgtcggctgatggtgcaaaaatcgatcagcgaggaataagcgatcgcgtcgtcgttcgcgtcgtaagcgacgatctgcaccgcgtaatcggtcttttcggaaagtcccgagatcagctctttatagcttgcgtcgcccgaataaatgggaccttcgatggacagatgggtgtacgcctcttcgctgccttcgggatttaccccgtaaacgtacatcttataggtttcggcgccttcaaattcattccagttgacatttactttgttataggaaatatcgctcgccgtgcccgtgaagccttcggtcggcgtctggggacgaatggtcgtatcggcgggcgcgccgaacgtgacgatctgatcgaaatagatggtatgcgtatagtcactgtccgaccaaggttccgcactgcttctcgaatcgcggtgtttgacgcaaaggcgaacggtttttccctccccgtaaatagtgggaagatagaaaccctgactgaacgtatatacgccgggcgtccattttaaaggctccgcagcggtcgttttctgttcaaggagggaaggattgcctaaatcgttatgcttatccgcaagccaattctcatagttccccctcgattcataataggtgtcctcggtgccgagatagatatacaatccgtccgcattggtatgcgtggtgggatcgtctacttcaatacggtagaaaatattttcggcggccgtataaatttttatggtgcccgtcgcgcccgtttccgttgcgttgtttgcgatcaggtcataggcggtcgccttttcccagtcgctttctgtgggctgagagggaagatcagtgacgacgattttcaaatcgggattttcgggcgcgggcacaggttccgccgaagagctttccgaagacgactcggagggactgtccgaagaagcggaatccgacgccgtatccgaagaagtttccccggaactgtcgccgccttcgggaacttcgccgagataaagctttccgctataagtagtggcttcgcccgatccccagtcgccgtctgccgtcgtaacgtcctgatgggtaaacgccacgtcgacagccgcgcccagcgcgtaacaatcgcccaaattcatgccgatggtgaccacataagaagtcgtcgcgtcgtcatacgccatctccgtttgaacgttaggtccaaaaccgtagcttcccgtcagccaggggtcatagtttccctgtatatccgccgtcgttcctccgacggtgatcttataggcgattctgtctttccccgtaaatttagtggtatctgtcactatcatacggaaatacaaattcgtgcccaccgtagcgagcttgacgctgcccgtattcgcacccgtcatcgcgtgttcatacgcggtattccattccgtttcggtcacgaagcctttatcgcctccgcccgtcacggctttgattaccttttcgtccgttcccgcctccgcggaaacgcctaaggcgacgatgcccgccagaccgctgaaagccattgcgccggaaagagccaacgctgcaaattttttcttcatttttctttctccttatctttcggctgacgccgaattattttttatcagtttcctttgcggaagaagacctctcccgccttatggatgtcgtacgaagcgtggcagtcgttccaggcgagcagcgatttgaaatcgttgctgtcccgattgtcgtatacgtagcaatcgaagccgaaagagtcgtatgcctcctgcgtcgttttaaaccgccagggaatcatgacctctaccctgtatccgtcgtttgtcgttttcacgattgcctgtattcccgaaaggtcctcgctgtccccgtcggttgccgaaatcttaccgctgcggcagacctcgacgttcgtaatctcctcaggcacagaagcgaagcgtttttcgtccagcaggagatacaccatatcgctgtcgtgcgcgattttatcctttacgtcgacaaagagatacagcgcttctttcgtataagtcatgtacgccttcgccgtcgtttcgccgggcaccgcacgatagtcggacacggcgcggtctatttccagcgactccgcgcgatcgtacagcgcgtccttctcgccgtctattacgggcgccgactccgagagggaaacgccctgcaatctctcctcgtattcctcgtgcgccgcgcggtaaacctctatcgtttcctccaaatacaccctgccgttaggaagcacctgtcggcgattggcgtattggctgacgttgaaagcggcgatatgaatatcccatgtcgcggaatactgccgccaatcgtttcccgcatccgccatgcgcccttccatataggcgacgtaagcggtgtaatcgcttacctgccccatgccgttgcccacgaaatcgggatagccgcgcacgaagccgccgcctttggaaagaatatttttattgttcgacgcttccgtaaaattggagtacgtaaatttgacgccgtcctccgattccatataatacacgcgggagatcgttcccgtcgtatactcgtaagccatcataaacttttcggtcagcgtattgtatttcacgccgctgcccgcccgcgtaaacacctcccttccttctccgaaatggatcccgtcccgggaagtgaacacatacattctgtcccccgcttcgagggaatacgtacaatataagtaataggtgccgtccttatagagcgcggagggctgaccgatgccgtaatagccatagccgcttccgcctgcgagttgactcttatcccaactgtccgccatttgctcgtccgtcatgcggatgacgggatacggctccttgcccccgtcttcgcccttccatatctcccaggagataccgtcgtcggaagtcgccatcagcacgttgttgtcaaattctttgtatcccgccagcgtcgcgggcgcctcgaaatacatggtatatttgccgtctattttgaggacggtgggtttcccgacgtgcattttgatccacgtcgaatcctccgtcaccgtcatcagcttctgcgccgaatgccaattttttaaatcgctgctctcggcgtaccaaatggtgtcgtaccccgaattgcggcaccaccacatcttatagatcttttcttcctcgtcgtaaaggatgctctgtccccaatcgtatttgtcgtcgtaagggtaagcgtccaaaagacaatccccgagatctgtcacggcaaattgctctcccgcccacgaggacggatcgccgaagtcataattttccgccagcgtcatgtccttttccccgcccgacgaaacattgccgcccgaatcgctctcctgccgggaatccgaagggaaagagctgcccgaagaagcggaagttcctcctctgcagcccgcgaaaaacgcgagcagcagagtcatcgccgccagggaaagtttcctcatcttatacatggtatcccccttttcgtcaagccttcacaagatatacgtcgcccattccttccacatagcggaaagaatcgcccgtattgtagctccataccacgatggcctctcttccgacgccggcgcccatgcaatcgttgatttggaaatccatgccgatgcaggcgccttcctcgatgtattcctccgccatctcaaaccattctattctcagttccaccgcgtatccgtaatccgtccttctgacgcggtgcctcgcggcggggaattcggacgtgagatcgtattcgtcgctgccctttatcatgaaatcggtattgttcgaccccgtacacaccatatattgctcgatgccgtacgcctgcccgactccttcgccgtggtcgttaggcgcgtcgatgaagagatcgaagctgtcgcgcatatatcccatggcgggcgaagtgatcttataggaattgtcgattgcgtcgtcgtagactctcgcatagacgtaaaggttgttctcgttccacgccagatagacttccgcccaggaatcggtgagattgctgccgtagccgtagacggggcggaccacctctattctcgtcgccttgtcgtaggccgcatccttctcgccgtctatggaaatctccccttccgccgcatagaccgcgtccgcagtcactttggagtagctgttctgacggtcgcggtagcccttcaaattttcttccgtcgccgcaccgccgttgggaagcgtgatcattctgcccgcaaactctctcggctccaccgcgtgaatatagccgtcccaggtagtgtagcccgcgcgccagtcgctcgtcgtggattttttgccctgcaaatgaatggtgtagaacgtttccgtgtcgatgagcccgtgggcgtttttgacaaattcatagaagccggtctgaatggtcgtcgtgtcgtagtcataatatttgtaggtttgatgccctgtaaaatccagcgtgtcgctctcccaaatttcgcccgtcccggcagccatgtatttgccggtcagcgtgttgtaggtgacgcccatgccgttgcccggagagagttttttatgcgtgcccgtcagaccgaaatgaatgccgtcctccgaggtggcgacgcggatctccgcgatattttgagaataaatgacgtagcaataggtcagataaaacagtccgtccttatagaaaacggacggctgcccggcgccgtaatccttgtcgttgaagttgcccatgagctcttcgggcatggcgacgacgggctgcggctgccctttatcgtccgaataaaattcccagtctattccgtctttcgaggtggcaagcatcacctgattatcccattcgaggacggtttgggtaatatcggggtcctccgtcgcgggggcttcgaaatacatataataggtgtcgcccacatggatgacggaaggcttcccgagcattcccttgatattgtcgaacttctcgacgttgagggaattgggggacagggaaatcaccctctgcacgttcgtccaatttttgagatcgacgctttccgcatagaaaacggcgtcgtacacggcgggacgcacccaccacattttgtattttccgtcctctttgatcaccgaatgtccccaatcgtacacgttgtcgtctatgacgtcctgtaaatagacgtgtccgagatccttggaaacgtaagcgtcccccgcccatgcggacgaatcgccgtagtcgtactccttgtccacgacttccgccgtaggcatctcctgctttttgcggggcgtatagacgatctctccgttcccgccgcctgccgacgaattttcgtccgaagacgaatcggacgagtcctgcgtgccgctttgcgactcttgggagctttcgctctgccctccgcccgaagaatcatccggctttccgcaggccgcggcgccgaacgcgagaagcagcgataacgccaagctgaacaattttgccgattttttcatgaaaccttcctcctgtcatcttttccgatttatttgccgatctttctattttttgccttcccgtaaaatgcgctcaaagattcccgataagctttgttttactttgagcaaaacaaaacgggtaccctttcaaccgcgcgcatcaaacgtaaagcatattttttacagtgtggacgtcctttgcagcgtctactttttatcgttgttcttcttcctcttcgaggctaaaattcccaatgcggtcaatcccccgacgattcccgcggacgcgcccaaagcgctgccgcagccattcgaatcactgccttccgacgcgttttcgctttgagaagcgcctcccgcggaggagctttgcgaactctgcgcgccgcccgaagaatcggagtcgccgccagaagaatcttcctccccgggctttccgtagtcgctgatttccagcgtcttcaaaagggtctgcgcatagacgcgggcgagatagtcattggcgtgattgacgttgttgcccgtcatatccgcgtagcgcttcgcttccaaaagccccgcatggacgcccgtcacgtccacggcggcgattccctgcgtttcgtattctttcaacgccccgtaaaaataagcctgatttccgtaaaacgtataggcgtcgcgattgggcagcataggcgccaccaagagaatatcggcgtcctcgtatttgcttttcagtcccttggccattctctgcatattgcgggcatagctctcggcgtcgcgcacggtatcgttcatgccgaaagcgagaattgccaggtctatgtcttcgtatttgtcgagcacgccgccgcgcagattggagagtccccaggcggaatcggtgccgcccacggaagcgttgtagacgttgacggtttctatcccgtacaggctctttaatcctgcggcgaagagttcgggataaataggcatattgggagaaacgtgaatggagggatgccccgacgaattggcgcccgtggaaatggagtcgccgtaaacgaggaggttcagcgtatccccttccagcttttgcagcgtcctttccaaaagcctccctttcccttcggggacgtatcccgcatagccttccgcgtgcgtataggtcacgacgatctgtttcgaatgaaaccagctcccttccttccacagtacgtaaccgccgtttctgtcctcgaatcccgaagtgcccgtagccgggtgaaattcggaataagtaagaacggggatcgccccgtcctttttgatgacgagcttaccgtccctgacggaataatctttttccgcttcataggcgaccagcaaagacgcgcttttgacggaaacgatttccccgatcggatacaagagggaaacgggcgcaagactcccgtcctcttcctccaccgccaaaacggattcctgataagaaacgttcccctcccaaacgggggcaagaatttcctccgtcgaaaacaattcgctcgccgaagccttctttttgccgacgtttccataccccgcgcacattcccaaaaccaaagcgaaaaccgtggcggcggctatcgtttttttccatttcattctctttcttcctccccgcagagcgccttttaaaacgagctgaaaacgcgcgttttcagccgaatgacgtgtgtagtataacattgagattttcacttgtcaatatgaaagtcaggtaaaacgctttaccaatttctgcctgcctcaatcccttttgttgcctgaggataaagcgttttactaaaaaacggcttgcgcgattaaaaaaaatatgctacacttgaaaagaataagcttttcgaaggagcatttttaatcatgtataagagcattcgtccgggaaggacgtggtatgacgcagaaggaaagaggatccaggcgcacggcggctccctcctttacgcggagggaaagttctggtggtacggcgaaaataaagaagggattacggggcgggcaacgggcgccccctgtcccttctggcatcacggcgtcaagctctattcctcttccgatctctataactggacggacgagggctttgcgatgaaggagagcggggacaaaaacaacccctttcatcccgccaatatcatggacagaccgcacattctcttcaacaaaaagacgaacagatacgtcctttgggcaaagacggcaaggggggatttctccaacgccgctttttccgtctgtatcggaaaagacctgcattcttttgaattcgtgagagaaattgtcccttctccccatcacgcgggcgatttcgacttgttcgaggcggacggcaaagcgtatatcgtctacgaaaatccgcactcggaaacgatatgcagagagttgaccgaagactatgcgaatttgacggacaactacacctcgcatttgcaggcggaatgtccgccctatgtacgggaagcgcccgcgtatttcgaaaggcgcggaaggcggtatctcctcacctcgggtacgacgggatattatcccaatccctcgcggctcgacgaggtgagcagcattcacggagaatggctctgcctcgggaatccctgcgcgggggatacggggcgcaattctttccacgcgcaattttcctccgttttcaagcacccgttcgtcgaagatttgtatatcgcactcggggacaggtggctgacggatttgacgatagatctgccgaatatggaagaagtcttttacggtctgttttcaaaaaacgccccgaaggtgatggaaagcgccgaactttccacgctgacggacgaaaacacgagcgaagcggattacgtatggctgcccgtccgtttccgttccgacggcacgccctatctcgaatggacgagggaatggacgattcccgaaaatagaaaagaataattcgtattctctcccttaccgtcccccttcccaaacctttatgcgccctgcttccctttttccttctacgctttatgcgccctgttgccgcctttccgccttccaattttatccgccgaatccccctttctccgcgccttgccctttttgcaagctcttttcaattttatttcaccgcattttttgtatctccttttcggtttgcgccgcgatttttatacgcggtccgggggatacgaggtcggcgatcacccctttgtcgcgcccggcgaaactcatatccgtcgcttgtcctgtcgacagtgatttttgtccgcgcaggatatctcttcaaatcgtattccctttttgtttaaaaaaatcttgcgctcgcctttgtccccttcggcgccctttctgtccacaaaaaaagactcggaattatccgggtcttttttctatccttgcctttcagtctttgtccgagaatcgccacgtcaccgaatggacagctttttctcccgcctttaaaacgcggaattttttttcgggcataggcgtcgtaacgggttcaagccccacgacgtaatccccgcaagccatacttttccattccaaaagatacggaaactcgacgggatcaaattgcagcgcgacggaaaaatttttatttttcaaacgcgctttcacgccgccgcccgcacgaaggtcgtgacggtacacctcctccgcgcgccccgcggtcggggcttcgaatttcaggcatcgggagaggtcataggcgtccgaaatgcccgccgtgcgctccgcgtccacgaatagctcggcattttcgtccaaaaggggatagccgaggtttgtgtgatacatgagcatatacccctcttcctcatacccctcgttgacgatttcatccttcaccgtcacttcgtcgccgaggtaacgaaggcggatctcccgccgcaggaccaacttttgtccgaacagggcggtaaatttcatcgtcccctttaaagcgaggcaatattctccgtccgcttcttccgtttccacgcgcacgttttccgcgggaagataggaaacgctgccgtgctgcggcagtacgcgcccgcccacgctctccggagcgccgatattgtccagaccgcacgtatacataaaccccgcgtcgaagctgtttaaaaaaccgtatggcgccgtttccgtaagccgcggagaaaccagcccgtttttggaaatataagaaacgggcacgcccttataaaacaggcggaaaatatccatgcaccgatcgaggagcaccgtcagatcgagcttgccgttatacaggcgaacggcgtccacgcccttggcctttccctcggaaaaagtaaatcgctcggcgccgcaaagcgaggacggatcggcgacgtattgcgtcttcatgcgctcattccctccccgaaaagattttcagcgtcgagagggcgttttcccgcatcgcttcctgcgcgcagagagcgaggtcgtgataaaatcccgaagccgacttttccgtctgcgccttcgccgccgcatatcccgcatacgacatatacgtgtaataattgatcttgtcgatgccgcggcggatcacctcgcggtattccccgtgagagataccgctgcctccgtgcatgaccagaggaatatccgtgcgcttccgcacctcggtgatgacgtccatattcagcacgggtctgaccttataaatgccgtgcgcggtcccgaatgcgatcgccaaagcgtccacgcccgtcttttcgagatacccctctacgaggtcggggtcggtatacagatcctcgggcctttccgccgcggcttcgccgcccgaggcgccgccctcccgctgcggcagtctgcccagctccgcttccacgtccacgccgtgcgcgtgcgcgtagagcgccacttcccgcgtgcccgcggcgttttcctcgtacgccaacgtcgaataatcgatcatcaccgacgtaaagcccagcccgatcgcctttttgcagtattcgaaatcctcgccgtgatcgagatgaacgcatacctgccccctcgacgccttggcgagctccaccatcacgcgcccgattttatcgagcggagaaacgctttcgtggcattgcgcgtgcgcgatgataacgggcacgtcgagcgtttccgccgcgtccaaaaccgccagcagacattcgagattgggcgtattgaaacttcctatcgcgatttttctctttcgcccttccgcgatgacatcctttaaactcgctaacataactcactcctcgatattgacgatatcatagcccaaataggtggaaaacgcctcttcgagcacgtttttcatgtgtcccatgccgacggtggtatggtgtttgaatccgcccctggcgagccgcaggagtttgttttgcagatcgggaatctgagcgacgccgccgcagccgaaatatccttcctcgatcggctctcccgtaaacttcgcttcgctggcgtatactttgagttttccgttctccgtaaagcaattggaaaaagtcatgtcgaacgccgcaattctgccctcgttgctgccccagccgctgccggggtcccctttggcgaacatcttgtgctcggtgacggttcccctgcccgccatcagcgtctgcgcgacgggaccgcaatggaagagaatcactttattttcgtcctcgccgtaattgttgttccagtccaggcaggcggtaggcttgcccgaagcgagattcatcgcccgcatcgtaatggcggagcaaagatcgatctcgcaggaggcgacgatgccgcggtcgttgagttcggagagtaagacgcacggacagacgcgcaggatggtttccatctcgttccagcagcggagcgtgacggcgtcgaggcgataggtttctatatattcgtcgatgacgacggaaatttttgccagcgtgtatttgttcttttcgggcactttcgaaaaatcggcgtaattttcgaggcgcttcaccttttcgatcacggctttctcgtcgtcctttttgttctgcaccgcaaagatcaactcggacaggtcgaaactttccacattgatgccgtagcgctgtaaggtgacttcgtcgaaacggacggtcttgaacgccgtcgttctcgcgccgatacagccgagattaaagcgtttcatgcccttgacgacgcggcagacggcggcgaaatcttcgagattttgcgcgaaagctttgcttaaaggatgcacgacgtgcggcttcatgaccgtaaagggaattttgtactgataaaatacgtccgtcacggagaatttaccgcagaacgcgtcgcggcggtgccgaaaatccattttaccgatctcgtcgggatacgcctgcatgaggatgggaacgtttgcgtcctgcaacgccgtcaccgctccgttttcgtcgatgaagataggcatggaaaggatgacgccgtcgtactccccttcgtggcttttcaaaaagtcgtgatacagccgtccctcgtcccgcgtttcgacggcgccgtaacgggtcgccttttcgtccatgacgaggacttcgtgccccgcttttctcacggcttcgatcatgtccgtgcgcgcgcccgcaatgagttccgcgggcatgaagccgcggttgccgaaaaataatgcaaatttcattttaatcaccatgccgtgcggttacggcacaaatagggatgaaaaatacatccgcatattttgtatttttcacgctaataacctcccgttaaaaagccgtttgaaaaatagacgcaatcgctccgattccgcgcccttcggcaaaaggatctccgcccgccgtttcccgggaatttgtcaaaagaacgccgagattcagatcggaaagagtcgattctgtcaaaacgacgcagccggatccgagtgccctcgcgacgatctgctgcggcataatattcggaatcaatggggtcaagtcctttcgccgcgcccaaggccgatcgattctcgcgaaaacaagcccgctaaaaggtgatcgacgccccgtttttttaccttatacgatgttgtcctttcctccgcggggggggggcgggctttttgcgcgaggaggacggggctttttctctgccgcgaaaattctcttgaaagcactttcctttcgccccgctcggcgcccttgctctttttaccccaaaaaggaagatctccctccttttttctctcggagtttctctcctcttttttagagcacgcagtccgccgacgcgcgctcgcgtttatcccgaaaagaggcgccacgccgaaacatcgcaccgcgtatatttttcaaatcgaaagctcttttaccgttttatataattttttataccgttcaaaaattttgtcgtactccgctttttgtccctcgcgcgggatatagggcggcttcgtctttacgaacttttccgaaagagaagagagcgattttcccgtaagcgccgacgcgcccagcattgcggcgccgcatacgcccgcctctttgctcgccaaaggataaacgggcagccccgtgacgtcggctttgatttgcagccattttgcggaagccgacccgccgcccgtggcgatcagccttcggggccgaacgccgaatttttccgcttgttcgaggttcagcctcatctccatgcacagcccttccaaaattcccttgtatacgtccgcgggggtatgcgcgagccgcaagccgagaacggcgcccgaagcgccgaggtcctgatagggcgtcgcggcgcccgcaaaatagggaagcaccaaaatccccgtcggctcctctttaaattctttttccaactttccaaacgccttgccgctttctatttcctcttcggaaaacaatccgttcatccaccagcgcaccagggagccgcaggaataattgaggagataagtacagtacagtccgccgacaaagggcacgttcggatatccgcaaacgcccatttccatggcggaagagggctgccgataaagagcggtcacgcactccaccgtgcccatcccgtccgcgcacgctcccgcttccacggcgcctgcgcccatcgccgcgcagatctgatcgtgcccgcccgcgacgagaaggacgggggcttttgcgccccattcttccagcagttccgccttgatctcccccactgcggcgcccgagggcagaacgggggagaacagcttttcgtctacgccgaaaagggagcaaagttccttggaaaacttcttttcccgaatatcgaatacgcccgtgcgcgccgccgaagcgtaatcgctcccccgcgttcccgtcagctgatagcccacgaaatccccgacgagcatcagtttctccgcgcttcggtatacgtcggggcggtgcgcctttatccagagaagcttgtagacggcatacattccctgcgggcaaactcccgatatccggaaaattttttccgcatactctttaaaggcgttcgcctcctcttctccgcgggaatcggtatacagcatgggcgggaacaaaagctcgtcccctttccccagcagcgcgaaggattctcccagcgaagaaatcgtcaccgaatcgaacgcaaaattcccgtaagcctttccaagcagcgcttttgcgcattcccagaccgcttccgcgtccagacagctctcttttccccactgtctaacgccgtagtcgcagccgtcggcataaagcagcgcgccgctttcatcgtagacgccgcacttcattctcgtcgtgcctatgtcgagtcccaagaaacgcatcaattcgcctccttatccctttggattcgcctctatattacttgattttttcttttatttatagtataattaagaaaaatttatggtaaaatcgtattttaatttactaatatgttaaaaatcgaccgcgaaaaattaatatcgctcctgaccgatttctatcgtctgacggggatcaagatctgcgtatgcgacgaggagggcaacgaaatttcttacgtgcccgagcatttgtgcgccttctgcgggtatgtgcgctcttccgcggcgggcagcgaagcctgcaaaaaatcggacagcgacgcctttgccgtttgcaaaaggacgggcgaggcgtacgtctattcctgccatatgggtctgacggaatgcgtttctcccatcatgcagcaggggcactgcatcggatttatcatgctggggcagaccgccagcgggcaggaggacggttttgaaaagatccgagaaaaaataaaagcctattcgctcgacgagcaaaaggcattttctctgtattccctgattcagttttcccccacggaaaaggtgcgcgcggcagtttccattatggacgcctgcgcgggctatctgtatcttcataaacttatttccgcaggcgaaagcatgggggcaaggctcaacgcttatattctcggcaatctcaaaggcgatttgtccgtggacaggctctgccgcgtattcaagctctcccgcgtggatttatacgcctgctttaagcacgcgtttcagaccactcccgccgagtttatcaagcgggcgcggctcgaacgcgcgaaagaactgctcgaaacgcccctttccgtgacgcagatagcgcgggaaacgggcatctgcgattataactacttttccaaaatttttaaggcgcgattcggcgtttctccgcgcgaatatagaaaaagcgtcgaaaagtaacccttttcccgcgttttaaacgtccgacttttcccgccttcccgaacttttttctccgcaaaaatacgtttttataagcgataaagcaggcaaaggctttatcgctttattttttgctcttttccccttccgtttcggtcaggcgcttccagtaatcttccttgggcatgggtcgggaatagtagaatccctgtatcatgtcgcagcggcggtcgcgcaggaactgcacctgttcctgcgtttcgatcccctcggaaacgacgtttttgccgaggtcgtgggaaaggctgatgagggtggaaacgatgtgtttggattcgtcgtcaaagcccttctccccgtagaaaaattttctgtccagcttgatggtgtcgaaattgaattctttaagcatattgagggaggaatacccgctgccgaaatcgtctatcgagcaggtgcagccgatcttgtgaatacgatcgataaactttttgagaaattcctcccgttccatgaccagactctcggtaatttcaaactcgatatacttatgcggaacgcgatagcgatccataatcttctcaaattcgtcgaggaaatattcctgcgaaaaatgccgtttggaaaggttgacgctgacgggcacgacggacgtccccgcgtcgagcgaacggcgcaagtctttgcagacctgttcaaacacgtacttatccagctcgacgataaacccgtttctctcgaagagcgggatgaactttccgggggaaatcatgccccgcacggggtccatccagcgcaccagcgcctcgcttccgcaccactcgtcgcggagaatgttgcgctttaactgataatagaccacgaactgtcccttggcgagcgcctgttcctcccgctgttcgaggtctgcctcctccatctccttgacgagcatattgtcgtcgaagaggacgatggattttccccgatacaattcctccgtgtagcgctgcgccagccgcgcgcggtcgattcccgaggaaagaccgatctccgaagcgtcgggcatctcgtaaacgcccatcgtaaatttaagcgatacggcgccccgcgcgtagctcgtttccgaaagctttttgtataattcttggagccgccgcgaaagatcgtcgacgtcgctgcgaagcaggattaaaaatctgtccgcgtagccgcgcgcggtcagttcgtcctctctcaggaaagaagccgtcacgcgaagcacgtcggcgagaatctcgtccgcgacctctctccccacctgttcgttgacgtatttaaaacggagtatattcatcgatacgatggcatagcgtccgtttccgtcgtgcagaagccgccccgcgtcgatccggaagcgttcctgattgatatttcccgtcacggggtcggtatatttgagcagtttattcttgcggataatccgcccgtaaacggcgatgacgaaaatgagaatgatgcagatgatggcaaggagcgcaaaaagcgtcgtctgaacgcctttaaacgcggcgaggatgtcccttgccacgacggaggtcggcaccatgatgacgatgcgccagtcggcggcgggcgaagcctcggacgccaccccttccacgggcgtgtagtaggtgaggaaggaatttcccccgtagtgaaactccacggtgtctttggcgcccgtcaaaaaatcctcggctacgcgcagcagcgagtcctcgtccgtcatcatttcgaacgcgttgaaaatattatagggaaaatcgaaatccccgtgtttgcccgaaacgactttcgtgccgtccgaacgcaccaacaaaagatacgcttcgttttcaaacgcgctggtttccaaaagccccgccaacttttcaggttccatcagaccgacgatgcccgcgatcctgtccgtatcttcgggcaattccgccttcctgtaataaggcacggcgaaaatgatgcgctcgccccataagttgatatgaatattcccgacaaactgctgctcgccttcggaaataatggcgcccgcgacgtcctccgaagcgatgttgtactgcacgtccgaagaaaaatagagattgccggattcgaacagcactcccaccgaggaaaagctcatcgtatccgccagtcccgttaaggtgccgtccaaaaaggagtaatcaaactcgtcgtcgggatgatactcctgcgtgtccgtcaaagggtcctctttgtacgtttctatgggcgcgaccgcgccgcccgagttgccgatcacctgtcccgccattttcagctgactgaaccaggaatcgagattgcccgaaatatcggcggaaatgcgttcgcagaaattggacatgatgctctgcgcctccgcgtacacgaagccgctcatgctgttgctgtactgtaccccgaagatcagggcggtacacaccacgacggccaggaaaatcgccgcgaggcacatactcctgattttcagctgccgcagttcgccgcggaagagtttttgatttttatccgttttcgaaacggcgagtttttccccgccgtgttccgcctcgacacgcaatccgtagacgcatacgccgtgcttgcccgaatttttgacccgatataacgccttatccgccttgtcgaacagctgtaaaaaatttttcccgtctttgggcgcaaaggaaacgccgcagctgcacatgacggtcagctgttttttcgtctttctctgcacgacggtatagcggatggcgaggatctttttgcatatccgctcgattttctccccgtcgggcgccttcacccagacgaggaactcgtcgccgccgtaccgacccaaaagctctccctcgcaggcttcgccaagccccgcggaaatcctgctcagacattcgtcgcctacggcgtgccccaacgtatcgtttatctttttgaaatcgtcgagatcgacgagtatcaaagcgccctccgctccttccgagagctgtttttcgatgccgtcgatgagataggaacgggtatagacgcccgtcagataatcccgcgcgtaatcgccgttgaaatccttgccttcgatcttattgaccgagcaatagacaatgccctcctcgttaggatgactgtaagcggtgaagcgataggaatacttcccgtcgcgggaagagaagctcaccgtcctgccgttgtttttccggcgaaggaactcgacgagcgcctcgcagtcgaaatccgcctccatctcccccgtcacgggagaagaaaagtattcccgcataaactcttcgagcgtcatgcccttcgcctgaggatactgttcgcaatagacgatttgcagcgcgtcggtatccgtgccgaaaaagacatatgaagttttcagttcaaacacggaaccctccttttttccttcgctcccttttcaggaaagcggaaaggactcaaaccattccatatattccagcaggctctgataattggggataagctccaccccctgcgcctgcgagatgaaataatccacgccgtaaatatatatattcttttcgatgtcgaaatacgtatagagttgtttttccacttccgcataattttcgacggtgacggaatttttcggatacgcctccaaaaacacttctatctgattccaaagcgccatgcgggaaagttcgtcggtataaaaattgtccgtcccctcgtccagcaaccagaaaaaagagccgagatcgtccgccgccgcgcggattttttcatattgcgcgcggtccgccgaatactcgaaggcgtctatcatgtcccgcaccgtctgcaactttttcccgacaaattcgtcgaaatcttcgcggtagccgtaatattcggaaagaagcggaagttgagagagatactcttccgccatgcccaaatagtaatccacctgatgaatatagccgtcgagctcctgataattgccgtcgtttatcgtcggatagttttcgaataaaaaggcgatgtcgttgcgggcgtagatcgcatacagcttatcgctcggccaccataattcggaaagccgccccaagtcctctatttccccgaataaagcgttgtatttttcggcgtcgaagggaagcgtaaaatcgaagttctctattttttcgttcacggcggcaaccgcttccgcgcagtattcgtcgaatctcgccttttctgcgggatactcgctcagtccatagacggaagagcatatctcctcgccgatcagataataggtgaaataagccgtgagattctcgtattcgtaatcggacccatagacgccgtaaatgctcagatataattcgtcgcgattttccggcgtaaattcctttgtcgtcaacaatctccaaatcagataggaagcgtcgagctgcacgtatttcgtcgaaacatctccgagggggagcaatccgctgacgccgagcgcgcggcacctattgcgcaaatccccgaacgcctgcgcgtcgaaagaatccgcggacaggggaaacgcgagaatttccttggatatttcctctattttgcgattgagttcttcccgcgcggcggtatacgcttccagctctccgacgatgctccgaagcgactgtttcagtcccgcaggcgccgcggcgtaatgctccaaaatcgtttgggacgcactgctcatatcgccgtggtcatgattgcggatatatcccgccatcgcgcggcaaagctgctcgtcgaaagagaaaaagtattgcacatacgcgtcttcgaagtcggaaaacagcggataaatactgtcgagcatatccatggcttcgagaaaagacatcggcgaatccgcgtaggaagtccgcaggtatccccgtacgcccgcggcaaccttgtcgaagggggtgaagcccagcgactctatttttttcaccagcttaggcacctgacgggaaacgctgctgaaaaacttgtcgagcgtaaaattctgttccccgctttccgtggaatcgtattccttccatgcgtcggcataggcgtcgtaacagtcgtcgcgcacatagacgagcgggcgaaaagtagacagggacccgggcgcataaaacgcgccgttttgtatttcaaagggtgtttttaaaaacagatataccgccttcaagcgatacatggtatagatgggcagtccgttcgtttcgattttttccagcttactgtcctcgccgacggtgatcgttttgagctgccgattgaagaggaacgcgcccgatttgatgactttgacggagtcgggcagggtgtaggaggtttcgggataggcggaaggaacgacgtacagcgaagaaaaatctttgctgtataagacgccgtccttcgcggcgaagctcccgcttttttcggaaacggaaattcccgcgcccttccagtccttaaacgcctgttccgaaaaggattccagcgacgcgggcaggacgaaggcgacgcggctctccgcaaaggcgttcgcgccgatgtatttcagcccctcgttcatgatcagcgtttccagggaataggcgctgtcttcggggctgagagaaaacgcgcactcgtgtatctctttgacgaaagagggaagagaaaacaccttttcgtcccgaccgaagcagtagcggatgagggaagttttgtccttggaatagaggatgccgtcgatgctgcaaaacttggaattggcggcgtccacttcgattccggaaagtttcgacatcgaatcgaacgcccgcagtcctatatagatgaccgacgcgggcagacggatccttttcacagaacggcagccgaggaacgcgtacggcatgatcgtttccagcttttgaggaagcgctatctccgtaagggcgccctgataggaaaacgcgcgttcgcctatatacgtcaaagcgcaatcgggatccgaggtgatctgttccagatgcgagctgccgctgctgaaagcctccgcctctattcttttcagcccctgattgaggcgcagcgttccccgcaggggattgcccgcaaaggcgccctccccgaccacttccaggctgtcgggaaaatacagcgtttgcagcgtacaattggaaaaagcggaatcc

SEQ ID NO: 2868 - DNA, 13151 bp, Unknown
  16S sequences of unknown bacteria
tacctcttctttcccatgcgaactccaaactgtctcattctgagtccgcacatcccggcccctcgtgccatttgcgccgccgcgcatcgacgtcgaaccgcaagcgttacggaaccgtcgtgtcccgcgttgtgattcaaacagaccgatagtttcccgtatgcaacattggcagcaacacaaacacacccatcgtcaacaggaaagaggaccgcatggaacaactccgcagcaaaagcggcttcatctgcgatatggacggcgtcatctaccatggggaccgtttgctccccggcgccagggaattcatcgagtggctcaagacgagcgggaagaagttcctcttcctcaccaattcgagcgagaagaccccgcaggacctgcacgacaagctcgcgcgcatgggcgtcgacgtaggcgccgaccacttctacacgagcgcgctctcgatggcgcgcttcttgtcgagccagatgcccggctgcaaggcctacgtgatcggcgcgcacggcctcacgaccgcgcttgcccaagcgggaatcaccatgaccagcgagaaccccgacttcgtggtggtgggtgaaacgcccagctacgactacgagagcatcgtgaccgcatcgatcctggtgagcaacggggcgcgcctggtagcaacgaacagcgacgtttcggcgcctttcgaaggcggcatcaggccgtcttgcggcgcgctcgtcgcacccatcgaagaggccaccggcaagaaggcgtacttcgtgggcaagcccaacccgctcatgatgcgcacggggctgcagctgctcggcgtgcactcgtccgaggccgccatcgtgggcgaccgcatggacaccgacgtcatcgccggcatcgagacgggcctcgacacctgcctggtgctctcaggcgtcacgagcgaagaggaccttgcgagcttcccctaccggccacgcttgattgccgccggcgtgggcgacatcgtgccggcgtaaggagtgcacgacggggggggcaggccggagcgtcctcccctcgcgccaaaatggcacgatgcccacggcccctcgtgtcaccgggcccctggtgtcatgcgtccgccgcgcacagctcgagctgatgaatcacgtcgatatgctgcggacaggcgcgctcgcactgcccgcacgcgatgcaggcgtctgccacactgcccttgtccgccagctcggcataggcagcacggaacccctctgcatcgccttgctggtagcgcaggtttgccgccgaaaagatctctgggatgggaatctgctttgggcagcccttcgtgcagtaatgacatgcagtgcagggaatgcccgattccttgcccatgatgcgctgcgcttcgatgatgacactccgctcacgctcgtcaagcggggcgaagtcacgcatgtacgagacgttgtcgtgcatctgggcgaggttcgacatacccgaaagcacggtgagcacgccctcgagcgaggctgcaaaccgaattgcccacgacgcgtaggaagcattcggagccgtctggtcgaacagattgcgtaccacgcgcggcggcttggcgagcgagccgcccttcaccggttccatgacgatgacgggcttaccgtgggcccgcgccacctcgtagttggcgcgcgaggcgatgcgtttgctctcccagtcggcatagttgatctgcagctgcacgaagtccatctcgggatggacgttcaagatttcctcgagcagctccggcccgccgtggaaggagaaacccgcctgcttgacgagccccctgctcttgagttccgccacgtactcccagatgtggtagcggtcgtagcttcggtaattctgccccatgagcccatggagcaggtaatagtcgaaatactcgagaccggtccgcttgaggctcgtgtagaactgctttttcgctgacttctcgttgcgcacgagcatccaggcgttgagcttggtcgcgagctcgaactcttcgcgcgcgtgccggctcaccagggctttgcgggtggcctcttccgagcccgggtagacataggcggtatcgaaatagcggaagcccgactccaagaagaggtcgaccatctgcttggtctgctcgatgtcggttttcaggcctttgcggggcagtctcataagcccgaacccgagcttggggtagttccgcagttcctcagcattcatgagctccgccttccatcgccttgccgttcgattcgaatggtggagcacaggataccgcgtgcatagcgtgcatggagcggagggaccgaggccaatgccccgtcggccctgtcgtgacagaccggcgaggcattggccatatacgtgacagaccggctagctgctggccaaaaattgccagagccttgccggtttgtcatgtatgtggtcaggggcttaccggtttgtcacgcagacgggcgcgcggcacggcgcggcacggcgcgtcatgggctatactgcagcagcacatcaccgaattcaggagcacgtggaagacaacgcacatagcccgcacccaaatgagcaccgctgcgtgcccgcgtgggtgcgcgccgttgcggtccttgcttgcggatgggtggtcatctgggtcgcgcgcatgatgttcacgccggtctaccccgagttgagcgcgtttttcggcggcgcaacgagcgccgaactcggcgccatctccagctggtacttcctcggctacgcgctcatgcagataccctcgggcctgctcgtggatcgcatcggcatgcggcgcgtcgtcatcccgggctttgtgctgttcgccctcgggaccgccatcatggccggcgcgcacagcctgtccatgctctacttgggaaatgtgctcgccggtgtgggcagcggcacgttctacggcatcgcctacacgatcaccaacacgcgcgtccccgcacggcgcaagagcctcgccaccgcaatcgtcaacagcggcacggcggtgggcagcgggctgggcatcgcatctgcgagctcgctcgtgagcacgggcctcatcaactggcagatgcttgcggggatcaccggcgccctcgcactcgccatggtcgccatgttcgcgaagagccttccgaaggagcacggagcaggcgccaagacgtcagacgcgcccgcgggcaagacgttaaccgtccaccttgccgccgcgtgcgtgctctactttgccaccctgtacctgtactacctgataagcacctggctgcctgactttctgcacgtcgagcgcgcatttgatgcctcgtttgcgggggcggcgagcattgcggtctttcttgccggcattcccggggcgcttgtggcgggacgtattgccgaccggcaccccaagcggcagattgccctgattgtcgcgctcgagattgccgctgcgctcgcgctgctgccgctcatcttcggacaggtcatgccaattgccgcgattggcgccatcgcgtatggcttcttcgggaagctcgccgtcgagcccctcatcatctcgtggctgggcgcgcgccccagcgccgcgcgcatgaccacgacctttggcatcttcaacttcttcgggatgagcgcatccgttttcgcgccgctcgtcaccggcatcctcgccgacgcgacgagatccgatatccccggcttcctgaccgcgctcgccatcctcgcgttgggaaccatcgcgtttctggtcattctcgccgcgcacgggagacgggcaggctcacaccacacgcaggctcgcaactcccgctagctgttgtgtgccatgacgttgtttacaccgacgatgcgtgacatcggcgggggaaggccgtcgcaggcgctgtggggcctggcgtgcttgcgctcgatgcccgccgcctccagccagccgttgaacggccgcgagcggtaccccggcccgtcgtcggtcaccacacgctcgacctcgacgccgagcccgcggtagaagtcccgagcgcgccccatgaacgcgacgcaggtctccttgcactcgtcaccgagcagctcggcgtaggccacgcggctgcggtcgtcgagcctctgccgcccgcggggcgtgagccatgagttaggatgctggaacaaggagggctcctctcgctgcaaccttcgacaagtcacagcttggaggagtcctccccttttgtcacgtcatgtgtcaacaacctgttggcacacaacagctagctttcagcagcaagaagcgccgcgctctcctcactccgccaggtttccctcggaatcgaacgccatgggcttgggctcgcccaatagcgagatgcccttgacatccttaatcgactcgtagagcggcacggacacctcaatccgattcaggtcgagggtgttcttgatgtgtacgatgcgcgcctgttggtaatcgagttggtaaatggtgcgcaggcagagcttgatgcattcctcgtcgttgttcatgtacaggggcatctcgccggcgcgcatgaggccggtcgtcagcacgttcgtccacgttgcctgccagtcgatatcgcgcatcaccgcgcgcgtcgtcacgtctgcggcagaaatccccgcgccgttgtggtgcgcctccggcgtgattccgcggatgaacagctttttcaggtcgagcacgtcgccaaacgttccagtgatgtttcttcccgtcacgtttgggtcgtgtccgttgccgctgatgttcttgccgacctcgtcgatgatgagcagatcgatatggtcgaataggaatttggccatccgccgctttgccacctcgagcaggcgggcgtcggtttccaacagcttgtcgggcgtgcagacctcgaggtcgcagatgtcgtcataggcgttttgcacgagtccgaccccaaataccacggggcacttctgcacgaagatctcggcaacgcgaggtatcaactctgcaaagcggtgaaacccaaacgagtggaacatcgcagcgcccttgtgcttggcgatgccgatggcaatcatctttgccaggccgctctcgtgcgggccccgaaagtcggtatggggctttaccttgttgaagatgacgatgccatcagactccatggcgttcttatcgcagtacagcggtataccgtccagctcgccatactggaccacctccatggaagacaagatgggcacgcccatgctctcttccgtgacgttgtacccggcaagcatctcgagctgcccttgtgccgtggcaccggcatggctccccatcgcggggatgatgaacgggcgggcgccccattccttgagcacgtcgcacatggtacgcagcaggtggtcaaagtagggtatgccgcgactgccggcggtaatgcaaatgcgtttgccagcatacgagccatgattggggagcttctccatctgcatgcgcagatgcgcgcacggatccccaattttcgaagcgtcgtacgattctccgattttcaccatcggtgggatcgtcacatcctcgatgccctgcacggtgatgtcgacctcgggaaaatcgatgaacattgccatagaagatgctcccttcaaatacctgcgaactcttgccggcgcgctacgagcctataaagaacgaggaaacgtaggcgatcaccacgagagcgacaaaaaacgcgataacgcatccacatccgcagcccgacccgtcgtcgccgccaccgtctgggtctccctcgccgcccaggtagcccgccgattgccatcgataccgcgtcatcgagtccatcttcatttggcttgcgccccctcgtgattatccgctgccggcatctacgatattagaacagcggtgagacacgaaaatgaaaacttgcctgatgcagtcgcgccagctgccgcaagcacttccattcctcgagatggactctcccttccagagccctcgtccagatcggcgccacaaagagtttacaaacccacgctccatcagagattgaaagatgtggccgaagtagatattatagtgatatcactttgagaccactcggcctcgaaccgacagcggggccggcgaggaaaggagacctgatggcatccgagaaaatcatccaggcaaagtcgggctgggcaatgctcgcagccaacgtcatcgtctacaccgcgagctgcgctggcctcgtgtactccatcgtgctcctcgcctcggcagacgatgcgggcatcgaggcaccggactttgcggttcccctgatgattgctggattcgtcctgctcgcgctgggcatcgtcatgagctcggggttcatcaccctcaagccgggtgaggccaaggtctgcctcctcttcggaaactacatcggcaccatccgcgagtccggtttcttctgggccaaccccttctacagccgccaaatgggcacggccagcctcgacgaggagactgtcgaagagaccggcaagaaggggctgcgggcatccaagacgcccgccggcatctcgaccaagatttcgctccgtgcgcgcacccacaacggcgagcgcatcaaggtcaacgacaagcagggcaaccccatcgagattgcgaccgtcgtggtatggcacgtgtccgacaccgccaaggcgctcttcgacgtggacaactacgtctcctacgtctcgatgcagaccgagaccgcgctgcgccacgtggcgagcatctacgcatacgaccacatggaggaaagcgacgagtccaacgcgagcatcacgctgcgctccaacatcgaggaagtatcgaacagcctgaaagaagagctggggttgcgccttgcccccgccggcgtcgaggtcgatgacgcgcgtctcacgcacctggcctacgcgcccgagattgcccccgccatgctgcgccgccagcaggccgaggccatcatcgccgcccgcaagaagatcgtcgagggcgctgtctcgatggtgggcatggcgctctccgagctctcggacggcagcatcgtcgacttcgacgaggaccgcaaggcaaccatggcctccaacctgatggtggtgctctgcggagactccgaggcgcagccggtgctcaacaccgggtcgctgtactagcactcgcaggagcacacgttcgtggcgcggcgcaaacaatatcccctccgcatcgacccgaagatctgggccgcggtagagcgctgggcagaagacgacatgcggagcgcgaacgcgcaggtggagtggattttgcgggatgcgctcaagcgcgcgggaagactgaaggatggcagcagcggagacgacgaggacgagtaggtaccgcgggaggccccgagggagaaggattcaggcggagcgccgtcacccttggggtgttccgcgccacgcgtgtcacagaatggcccgagggcgaaagcctctccgttcggggaattctcccttgggatgttttgtgccgcgcgtgtcacggggaggcccgaaggcgaaagccccgtcattcgcagattctcccttgggctgttccgcggcgtaggacgtctccctcggcaggcttcacgccacttgcgggacgcagctgccgcgggaggccccgagggagacggaatcgaagccgaaaacgtctccctcggcccgttccgcggcgaaaagcgtcgcccttggctcgttccgtggcacctaacgcgtggcacctggcacgcagccccgcatcactgagcgccggtcgccttcctgaattcgcttggtagcatcccgacttcgcgcttgaacagtgccgaaaagtggcttggacacgagtagcctaccgcgcgcgccaccttccctatggaaaggtcactctgccgaagcagcagctctgcctggctcacgcgtctcgcctgcacgtaccgtgtaaccgtcattccattgacgcgcttgaatgtctccttgaacttggtggggctcatgcaggcgatggccgccagctcggcaatgcgcagctcggcggaacaatggtcgtcgatgtagcacaccacttcgtgaatgctgctgcgatcggcggggcttactgccttgccctcgtccggcaccgtcgccctcgacctctccacgataagccccatcgcctcgagtaccttgccgtggtaatacagcttggtgcggctttcgtcgcccggttgtggccagagctgggagagcagcgtcttcatctcggggaattcgtcatcgcgccctaacgagaagaaggctttctcgacatttcgaaactctcccccatactccctttcgagaaactgagctgagaactccggcgatatctcaatcgagacgccctgcaccggcacacctccatgagccactcctcgccataggccgccgccgacgctctgtcccaacacgctgttggacttgagtcttcggtagggattgaatacctcgccagaaatcgatttgaaccaggtgacggcaagataccctggcgatttcaagttcaagatgaagtcgtcgcgcacggtaaggtcatggacgatgatgccccaaggttcatcatccggaaaaagatagtgacaccagccccagcagcgctcgttctgtgctcggtacgagtgccacagcgagccaaaacctgctggtgacggctctcttgcaaaccctgcgtctgccaggctctgctctttgaacgcgctgatcatttgcgtgtcctttcatcgtagtatgacaagacgcaggtcagtgcgagatgagcaggctcctttccatggcaaacaacgcgaacctgccgttttcatatacttgatagtcgggtttattatctggctccgcgggcttcctacttcttcagatggcgagcgtgccccgtcaatcggcggcgttctgccgacgcccttcgccagccagcagcaccagccgcacatgccgcgagcgcagctatcagcaaaacagccggcacggtagcgtcatcgccggtttttggcagagaaggagaagccgtactcgtcttgtcttggggattgtctggcccgtcttgagagctgctcgaattgtcttgagggtctcccggcgtgccgggcacgtcttccttggtgttggttactgtaaaaccagaaactgcatcgccggtgacgctggccgtatagccttcggcaacgtcaatttcctgcacggagtagacgatttcgtgtccgtcactcgcatcgtactttgccaggccatcaaaactgcacgtccagccatcgtcggaggtgatggccttctcggcgacatccctgccatcggcgagcagactcacggtgacggacgcggggcgcgtgccgtcgcggtcattgccgtcatcccatgccttgatgcaggggatcgagacggtctcgatcttcctgtcggcgatggtcagggtcgcggtcttcgcgtcgttgctgaggtcgtctgcgctcacgtgcacgtccgccgccgccatgtagccctcgggcggcgtggtctcgcggaccgtgtatgcgtcgcgcaacagcccgcccaggctgcccgccccgtcggcgcccgtggtgatggtgcccacttcagccccggaggagtcacgcacgaccgagaacacggctccggcgagcggggcacccgtttcgtcggtcttgttgattgcgatggaatagttgtaaccgttggcctcgcccgaggcggtctgccacacgacggtgttggtgtagctgttgtcgacagtgccgttactaccggacagggccaccgtgttctggaacttctcctggttgacggggtcgtggttgagcttgactttgtagcgcacgtagaacccgtcggtcccgatgtcgcccaggttgatgctgaaagaggacttgtcagagctgaactcgacggggaactggtccgtgacgtcccggccgccggacatttcgtaggagccggaatcggggttgaggcttatggtgccgcgcgtgacggtgaagctgccctcgacgtagctcatgccggggctcttcagggcatccgagacaacggcgctggagatgttatctcctttcccgttcacgcggatcgtgtaggagatggtcccgtcggcggagttggaggcgttgccccacttggcgatcacctcgttggggttgtcgcccttccacttctcgtagactacctcgccgacggggacgatagttccgtcgacgttcaggttgaactgcttcttgccgaagtcgccgatcgtctccctgttggtggtgaccgacgccgtgatgctgccggtgacgccggagtgggactcgacgtagttggtgtaggtgagcgtcatggtcccggcctgcgcgtcaatgtgggcgcgtgccaccatcgcgccgtcggaagacttcacgtcaaagtcgtagtccgcgacgaacttgaaccctaccggaagctggatcgtgctgatgtcgcccgagtagaactccccgtcggggagggcgaagtccatcgcaagctgggcggacgagtagctgctgttgaagtgagtggtcgagagcgaggccgatgtgatgatgcttccggagacaggggcgcgcaagatcgcctttgctattgcggcggcaaggttgttgacggccggctcttcggcggggctgcctctggtcacgtccgcctgggtgctctcgagacctgtctcttcgtcatcagcctggccggaggcaggctgcgcctcctcgtccgagttgacggcgccttcactcaagctctgtgtttggcttacttgaggagagtcctccgaaacgcttgccgtctgttcggcattggccgcctgcgacggtgactgcgcggcagtctgcgcggcgggctcggcggcaaccgcctgtaccacccctccgggaacgcagatgcaaagaacaagcaacgcgctcatgatgcagcacagcttctttttcattttgactcccccctgccctttcgccgccttgggcgaatcttcggcagtaacttgctagcaaggcacgactttaggagaagttgaagctgcgtcagttccggcagggacggatatgtccttttcgcactgatattcgtctgtttgtcatagctagtatcgagatgcgcatactagttcgccgcggcacgtgtggggaacggatgccacgaaagggcttgagggagacggaatcgggcccgaaggcgtcgcccttggccctcgacgcggcaaaaggcgtcgcccttggctcgttccgtggcacctggacggcgcacatgcgccgctcgcttgcagcgcccccacaggctcgatatcgctcgcgtgccaatcgtccaaataacgcctcgagaactaccgagggcggttgcgttgcctgacgtgcgcaaactagttcggcacaggaacaatatactggagctgagcgcatgcccggccttagacgacaccacgaaaggaagcccatgaaaaccgtcatcctcaacggcagcccccggaaaaactggaacaccgcgcagattctgaaggaggcgcagcgaggagtggagtcggctggcgacgaggtttcgtacatcgacctgtacagcctggactacaacggctgccgtggctgcatggcctgcaaacgcaagggggttgccgaacccttcaagtgccacttcaaagacgggctcacgccggtgctcgaatctattttgcaagccgaccggctcatagccggtgcgcccatctactttgacaatattccaggaggcttccactcgctcgtcgagcgcatctccttccccgcgctgtcctacaacgactacaccagcacgtttcccggcaaggtggacatcgacatgttctttaccatgaacgccaacgagaagagatgggaacaggttacaaaagcccgggtgggcagctgcctggagccgctgcacttgctgcgcggcgagcagcgcatgttccccgtgttcaacaccctgcaggtgaaggactactccaaatacgagatggcgtcattttcggaagaggacaaacgggcagctcgcaaaaccgagttccccaaggcgctcgagcacgcattcaaggtgggtgcgcgaaccgaccgctaggagtggcaggctcacgttttcgccgtcaagcccccaagagcaatccctattcttcaagcaacaaaggaaaacaggatgtacgaaaaacccttcatcggaacgccaaccgactactcagaccccgacaactggctcgcgtctgctcgggatggtgctcggcgagtacatagccgggcaccccgactattatgcccgcatgatctgcgcctaccacatcggcgatggaggccacgtttggccccgaatgcttccacacctgcgattacgggttcttcttctacaacatccgcgagaacgctgcgaaccgcgtccagaagtggctcgcggccaatccggctgcaggacgcgagtagccgcaggtcagaggaaagttagggtcaggctctcgagatactcgagcgcctgacctgctggtcggacgtgcccagacccacgcgggcacgtccgcccctgcttgatcttgtgagctgagcccgcggctccaggctggccctacagcagcttcgtgcgtttgacggcctcgatgtccttcgtgcccgcaagctgcatggtgatggaaagctccatgttgaggtggtcgaacacggacttcacgccctcggcgccgccgaggttcaagccccagatgacgggacggccgatcgccacgaggtccgcgccgcttgccagcgccttgaagacgtgctcgccgcgacgtacaccgctgtcgaacacgacggggacgcgatggtccaccgccgccgcgatcgagggaagcacctcgaaagacgcggggccgccgtcgagctggcgcccgccgtggttggaaacccacacgccatcggcgccggcttcgatcgaagtcacggcatcttccggggactggatgcccttcacgattacgggaagaccggacatctgcttgattttcgcaatgtccgcgggcacgaagtcctgcttggccgcagcgtaaatctcgctgatccccttgccgaccccgtcgctgtcgctgtaggcggcgaggttgggcattggcagcgggaactggaacttcgaggccacgttctcttcgcgatatccgccaagcgttgagtcgaccgtcatgatgatcgccttcacgccggctttcacagccttcttaaccaggaactcgttgaacccgtcgtccttgctcatgtagagctagaagaactggggtgcgccgggcgcagcctcggctg

SEQ ID NO: 2869 - DNA, 2461 bp, Unknown
  16S sequences of unknown bacteria
tcgcggaaaaattctcgactgttatcttcagtacataagagagcagataggcgacccgtccgacgtggtgcttgaccgaattttcttcacccattcgcgcatggacccggagcacgtcaaaatctgccttgaggaaataaggaaaatcgccccctttaaagaggtcatcgaaaccaacgccggctgtgtaatttcctgccactgcggtccgggatgctgcggcgtgcttttcttcagaacacataaaaaataaattttcggaggaaaatataatgaaagtttttaaatccgtcgctgccgttcttctttcggccgcaatgattatttctcttaccgcctgccacaaaaagggtgagacggtcatgaccgtcggcgaaacgaccattgactcgggtctttatctcgcgtttcagtacagcgcctattccgagtttataagcgacgtttcggcgtcgtccgaagaaagcgtccccagcggagccagctattcctattttaatgacaagacccaccccgacgacggcctttcccttaacgactgggtcaacaaccgcaccaaagaacttgttaaggaatacggcgccgtcaaggagctttgccgtcaaaacaacatcaccctgaccgtcgccgagcaggacaccgccgaccagtatgccgaggcatattgggaaaatcagggcgttaaaatgtattatgaggattacggcgtgagctacagcacctataaggaaaccatcgcctacaacttcctcacctccaagcttttcagtttctactatgaaaaggccgacgatgccgtcgcgggaagcggaagcaaggcagtttcagacgaggaaatcgccggtgcaatcaacaattatgccgtgcttgccgaccacatcgacaacaagctttcggccacctatgacgaggacggcaattccatcgccgtttccgacgaagaaagagatgccgccaaggccaagcttcagggctatgccgaccgcataaacaagggaacctcctttgacacgataaaggccgaatttgctgccgaaagcggttcgaccgacaccgacacttcttccaccgttccctcctccgacaccgcaacttctatctacaccgcaaccgcaaaggcatataccaaaaacgattccgataccaccaactataaccttttcaacggctttaaggacaccgagggctttgaatacggcaaggccatggtcgtggagggcgataccgacgacttcaaaatggtaatcatctatgacctttccaaggatccttattatctcgagacctatcgttcggccgtcatcagagaccttaagaccgatgaatttgaggatttcctcaagaccgaggccgaaaacatcggtgtcaccgagaattcctcgctcatcaaattctacagcccctccaaaatcgactttgacaaggcaagacaaaacgccgcctcctaaaaaaagtctttacaaaaccgcaaaactgtggtatagtacataaagtgccgtaatcggtgctttactgccctttcttagcttcggggatcaccgtcccatggctcggattcgggataaaatttatttgaggtgaaaaaaatgactaacgaacagaaaacagctattatcaaagagtatgcgacccacgagggcgacaccggttctcccgaggttcagatcgcggttctcaccttccgtattaacgagctcaacgagcatctgaagattcacaagaaggatcatcattccagacgcggactgctcaaaatggtcggtcatcgccgcaatctccttgcatatctgcagaagaaggatattgaaagatatcgttcaatcattgcgagactcggtattcgtaagtaatagtttaaaattcgggcggacttttatttgtccgcccgttttcacctgttgaaaaatatttgaatttaaccgtaatgcacacacgggcacggtttggcggaaaaaaccgttaaatgccttttgggacgtgctcggatatgtgcgatacggttgaaaagacggtgttaatcgccgtttgcataaataaaatccgagggattccgcgttgttttttagcagtgaacagattatccgacagggctcgggtaatgcgtttattgctaaagcggcaaggattccccggaaataaattctggaggaaaaacaaatgtttgaaaatgcaaaaaccttttcaatggaatttgccggacgtccccttgttgtggagaccggcaaacttgctcagcttgcttcgggcgaatgcatgatccgctacggcgagaccgccgtgcattgcgtcgccaccatttccgacaagccccgtgagggcgtcgacttcttccccctttcggtggattatgaagagaagctttacgccgtgggcagaatccccggctccttccttcgccgcgagggccgtcccaccgagaaggccattctgcttttatggctttcaccaagagctgagggtt

SEQ ID NO: 2870 - DNA, 32759 bp, Unknown
  16S sequences of unknown bacteria
aagagaagtacatttttgtacttctctttttttatttaatttttaaaagtttttgtttattcaagacccaatattttacactgtccgaaagagtaaggtttttcaaattttttataaatttgtcagtttaaaacatttcttcttcccatttaaagtttttcatatccacacagccgttgggcttaaaagccacaccttcccgttccagtaaaaatcgctgttcgtcccagccgggggcgcatttaccctgccggtttaccactcggtgacatggaaaattgccgtacaagtgtgcctcacttaaaaccttgcccaccagtctggcgtttttatctctgcctatcagttttgcaatttgaccgtaacaggcgaccttgccctgggggatttcctccacaaccgacaaaatttcatatatcaggttttctgtaatttttcttttcataaatagtatcctcgcaaattatattatatggtttaaaggttgttgtcaatattgacaaaagtttttctctgctttatcataattgtaacgaataaaagcaataagtataaaattattaaaagcagaattgtatttaatgcttttgcagaaacgtataattttaaaaaaacaggaggacaaattatgaaacttgcatttaactgtgattaccttgaaggggcacacgagaaaatcattaaaagattgattgacacaaaccgagaaaaaaccgtgggctacggcgatgacccatattgcgccatggcggcggaaaaaataagggcggcttgcgtacggccggaggctcgcatatacttttttgtagggggcaccccggcaaacgccacaattatcgacggtattttgagaaattatcagggtgtaatttccgccgacacgggacatatcaacggccacgaggccggtgccatagaaactgccggacacaaagttttggctttgccccacaaggacggcaaactgcggcgggaagatgtggaaaattatttaagggacttttacgacaataacacatatccccatatggttcagccgggtatggtttatatttctcagccaacagaaaacggcacactgtacactcttgaagaacttacggctttaagccgggtgtgcaaaaagcacaatttgccattgtacgccgacggcgcacgccttacttacggccttgccacgccgggcaacgatgttactttgaaagacttggcagagctttgtgacgctttttacataggcggtacaaagtgcgggcggcttttcggtgaggcggctgttataacaaacccggatattctgccttgctttttcaccacgatgaagcaacacggtgcggttttggcaaagggcaggcttttgggcttacagtttgacgaaatgtttaccgaggatttgtatttgcacataggggaaagcgcaataaaatatgcagacgagattaccgggcggcttgttaaattcggttatcctatctatatgcagtcccctacaaaccagcgctttgcggttatggataacgaaactttgaagaaattcggggaggaaatagagtacggctactggcggaaggttgacgaaaatcacacggcaattcgccttgccacaagttggcggacaacaagagaagatgtggacaggcttattcgggttttggaaaagtacaaaccgttgtaatcggagaggcaaaatatgaaacgctttaaaagaagcagcggagtgctgttgcctgttttcagcttgccgtcaaactatggaataggcacaatcggcaaagccgcctatgattttatagattttttacacagcgcaaaacaggcttactggcaaattctgccggtaggttccaccggctttggggacagcccatatcagagcttttccacatatgcaggcaatccgtattttatagatctcgatttacttattaaagacgggcttatatcaaaagaggatgcagacaggtttgactgggggaataacccggaaaaaatcgactacggcaaaatttacagcgccaaatttgcaattttggagattgcctataaaaacggaattgaaaaagaccgagaaaagtatgaaaaatttaaagaagaaaatcggtcatggcttggggattattccctttttatggcggtaaaaaaacattttgattttaaaccccggacacagtggccggaggcagatataagtcgacatgaaaaaaacgcctgtgacaaataccggaaagttctcaaaaccgatgtggaaatgtatggctacattcaatatctgttttttcaccagtgggagaacctgcgccgatatgccaatgaaaagggcataaagctcataggagacctgccgatttatgtggcggcggattctgccgatgtgtggcggaaccccgagatgtttttactcgacaaggacaacaagccgattaaggttgcaggtgtgccaccggacgattttacggagcttgggcagctttgggggaaccccatttacgattggcaaaaaatgaaacgggacggttacggttggtggatacgcagaattgacggcgcacgcaaattgtatgatgttatcagaatagaccatttcagaggttttgaaagttactgggcagtgcctgccggggacaaaaacgccattggcggcaagtgggaaaaaggaccgggagaagatattgtaaatattttgaaaaactggttttgcgatacattttttattgccgaagatttgggataccttacccgggaggttaaagatttgcttgccttttcgggttttccgggcatgaaaattcttgaatttgcctttaacccccgggagccaagtgattacttgccttacaaatacgaaaaaaatcgggtttgctatgtgggtacacatgacaatcggacggctttgggatggcttgaaaccggagataaagacgaaatcgcatttgcacaaaaatatatgggtgtaactgccgagggttttgtaaaaggacttttacacaccggaatggcaagcgtggcagatttgtttatcagccaaatgggcgactggctgaatgttggtatagagggcagaataaacacccccggcaccgacacaggcaactggatatggagaatgaaacccggcctttgtaccgagaagttagccggggaaatggcggaaatgacggttctttacggcaggcgggaaaacagcgcaaaaaccgataaaaatcccgtaatcagttaaatcaggctgtaaatttttagcatcacagcgggataattactatttatattttctgccgtaaatggtataatatcaaaaattgtaaattttaaatgaggaaattttatgagaattatggctgttgactacggcgaaagcagaaccggcatcgcagtttgcgacccgacggaatttttgcggagcccggtttgcattataaaagaaaaaaacacccttaaagccattgaaaaaacggcggaaaaggcaaaagaacttaatgccgaacttgttgttgtgggtcacccatacaatatggacggcagcagaggagagcgagcacaaaagtgcgagtttgtggcaggggaaattgaaaagctgcggggaataaaaaccgttttgtgggacgaaagggctacttccgtcactgccgcaaatatgcttaccgaaagcggtacattcggcaaaaagagaaaagaagttttggacgccgttgccgcaacggttattcttgaaagttatcttgcgtggcgcaaaaatcacaaagacgaaatataattttacaaagcagagggcatatacttgcataacgataaaaaattacagccgcagtgcggtctgaaaaattatgacaaaattttaatatttgcggcttttgcggtggggttttttctattttctcacccggatttgtgggagaccgccaatcacggctatgtgtttttggaaagtcttttcagcggtaaggttttgcacttttatgaaatttgtgcccggcacgaaaatacatattactatttaaacagtgcaaattacaatattgtcatttacattatttttggcctgtgggaactgccggtatttgtgtttaataaaatatttcaccttcggttaaacgaaagatttttgatatattgggcaaaatgcgtaagcgttggcttttttgtgggctgcgggattttgataaaaaaaatctgtttaaagcttaacttatcggaaaacaccgccactgcgggtatgtttcttttcatatttaacccaatagcattcttttcgcctatggccatgggtcagtatgacagtatttgcttgtttttttcccttttggcaatgatgttttatttagagggaaatatggcaaaaacctgctttgtggcaggcataggggccgtgtgcaaatttttcccgttgcttatatttatccctttgattttgctaagagaaaagaaaattttaaatatattaaaatatgttcttttgtgcttgtggctgtatatccctacaagtttgcttttccatggcaggacaggcaatgcctcggcttttacatctatgatgattgaccgattattccgggcgaacataagccttggcatcggtgaagtaagcatatttttactttgttactgcttcttggtatttgcacggtttatatgcaatttaagggataaaagggaatttaactatatggcggtttatctgtctatggcggttttccggctgttgtttttaacaataggttggcacccccagtggcttatactgcttgtgccgtttatggttatttccgcactgttgcaggaaaataaaacttattggttttatcttgacatacttttaagttttggattttttattctttgttttgtgagatttccgaaccggtgttccggctcgctgtttaacggcggcgttttatcggggctgacgggctttaataccgcattgcggacaaattacaaatatctaaattattttatcggtcttgtgccgcatttgccggagattgcccgtgtggtttttgccgcagtattgatattgaatattattttaaaattccccattgagggtaaatcaatttccgacaggctttcgcaaaatgccgaatttgataacttcaatttaaaacagcggtgttatcgggtatttgttttaggcttcggcctctgctggtttttgcctgcattggcggagttgttaaacggaatgggcattatttgaactttgtgaaaggggagtaaaatatatgtatgtaaaatccactgtaataacccttgtggcttggtttgtgggattgcttattgatgcaaatttggatttcggcgatccacaaggctttttatgtttgagggttttgttcccgattttatcaatgggtttgtgcgtaataaaaacaataaatgataaaaaatgagaggtgtataaaatgaaatttgcatttattattatgggtaattttgacccggcagttgacaaggcggaaatcggcggcggcaaacggcaaattgtcggcgtaaataatatgaaccgggctttggatgcggcttgccggcttgtaaagcagggagttgactgcatagaactttgcggtgctttcggcgaggacggcgcaagagaaataatagccgtaacggaaaataaagttcccgtgggatatgttacgcatctgcctatgcaggatcggctttacgaagaagtgttttcaaaataagcaacagagggttgcttgtttatatcgcctttctaaactataatttaagcaaaggtggtgattaaatggaaacaaaagatgttattttacaattaagagttcaaaaaggtttgtcccaagaagaacttgcccaaagtttgtatgttacaagacaggcggtttccagatgggaaaacggagagacggttccaaatgttgacacattgaaattgatgtcgaaattttttgatgtatctatcaacactttgctcggttccccaaggagattgatttgccagtgttgcggtatgcccttggaggattcttccataagccgagaaaaggacggaacattcaacgaagattattgcaaatggtgttattccgatggtgagtttatctataaaaaccgggaagatttaatagaattttgcgccggcagcatgacaaacgaaaattttaccgaagaacaggttcgccggtatatggccgctttgttgcctacattaaaacattggaaaaagtaaatcaactgacaagagccccgacaggggcttttttattgacttaaatatctgaaagagatattatatatattagaaatataagtaaagataacattaaatgaaaaacataacggaattttgacagatatgaaaaatatcctgttaaggatgcagcactgttaatgacatctaaaacggattatcttaaagaggcctatgagtttggcagaaacatttattcccaacaataaaatataaattcgatcgaaaaatataaaataaaaaattccaaggctttaaaccttggaatttttattatataaattttatgttcttgcaaggccgtcaacattcagcacaacgcctgtgatatatgaggcttcatcagatgcaaggaatgcaaatgcgtttgcaacatcttccggctggcctattcttctcaaaggtattgttctgataagaggctcaataacttctttcggaacggctttcatcatatctgtctcggtaatgcccggtgcaactgcgtttacccttatgcccttagggcccagttctcttgccattgaaagggtcataccgtttactgcgaatttagaggccgggtaggcaaaacctgccggctgacctgtaatgcttactattgatgacgcattgattattacgccgctgtgctgtttttccatatagtctgcggcaacctttgaacaggtgaaaaccccttttacattcaaatcaataaccttgtcatacaattcttccgtgtatgcggaaagaggtgtggattcggacataccggcattatttacaagaatgtctattctgccgtatttttctacaaccttggcaaattccgcctgtacggattcaaggctgcttaacgtaggagcaatgcccataatatccgcatttgggtatacctcttttaatttgccgacggccttttcggcagaggcctcactgctggctgtaaggcaaaccttggcaccctctttgataaatttttcaactgtggcatagccgataccacggctgccgcctgttacaatagcaactttgttttcaagtttcatgataatatctcctttcgatacttatatgatatatcgttttttatatagctattataacattatgacaaatgtttatcaatacatttttagctaatagtttataaatcgataaaattatcttttattcggagaaatttgtatcaaaatttatgattatgttataacctgggtaaatattttttaccgcttgccgaatgtcggtttttaatttggctttgtcttttacggtaaagtcgataaggcagtcaaaatttatggctttgtttttgtcattaaaatagatgccgtgggcgtttataacgccgtcaaaggatgcggcaattttttctatttcctctcttttttgcactttttccgggtctttttgttcaactgcgtaaatgcctatcgtaagcaaaatgtgatattttgccataacaagttccgctatatccattgtcagcttatgtatttttcttgcggtgtagtctgccggaatttcaatgtgaaccgagccgatggccgtatcgggcccatagttgtgcagtatcaaatcataaaccccgataactccgcgtacggatttgattgtggattttatgtctgcggcaagttcggaaccggggcgggcgccgattacatcggttacagatgtcataagcatttcaacgccggactttatgatgaaaaccgatattattacgccgactaaaccctccaaagaaatattcagaaaaatgcttacaagggcacaaactaatgttgaacatgatattatagcgtcaaaacctgcgtctgcgcctgctgccgaaagggcgtcggaattgtattttttcccttgagtttttacatagttgctcaatataagtttagttataacggaaaggcagataacaaacagggtcacggttgtgtaatctgcctgtgtgggattgaaaatctttttaaccgattccaaaaatgatgtgccgccggcggttaaaataatcaccgaaattattatagcactgaaatattcaattctgccgtgaccgaaaggatggtcgctgtcccgttcttttttggcaagttttactcccaaaatcgtgattatggagcttaaagcgtccgttaagttgtttaccgcatcaagaactatggctatcgaaccgcaggcaatgccgacaccggcttttgtggccgacaaaacccggtttgtggctattcccacaatgccggttttggttatacctttttctcttgtttgtaaatccattttcattccctcttaaatttcataagttaaaataatattactctaaaattcggtgtttttcaataatatatgcaaaataaaaggggcaaatgccccggttattcattattgtctaagtaaattccctctataacattatacaaaaggcttgcctgtttcatctgtccggaggacttatcccgccaagccgaagttttgttaaatgacaaggtgtgaacatcgccgtttttcataaaatattttacggttatttccggggcaccctcggcttttgtaaatggcttgtagtatgaaagatttgcgcagtgtgacaaagtttttatgttttcttcgtcggttacggtaatttgtttttccccggctttaacttctatgtactccactttttcggcctttaccgccaatgacagggcattaggcataccgtttatgataaaccaacctaaattatagccgataaaacaccgaataaaggtgagccgtaagcgcttggttttggatttcataatgatacctcctaaaataaaagtttaatattttaccaaattcaaaagatcatcgccgttgagataatttctgacatttgtcaaaattatttcttcggtcatttggcgcatatcctcaatcccatagccggaggcattgtggaatgtcaatatgcagttttcttcctgccaaagagggtgattgtttggcagcgggtccgggattgttgtgtcaaggacggcgccgcctatttctttgttgtgcaaagcctcggctaaatcatcggtatttataagtccgccacgggcggtgtttataataagagcagtggacttcatcaatttaaactgctcttttgccaagataggccgaggcatatccggcagacacagagcaacgtaatccatttgttccaaaatatcatttatgcgttcaaggctgtaaatttctttaacataggtgggtttttgagtaaggttttgtcttataccgtagatatttgccccaagggcatacatcttttttgcaaatgccgaaccgatatgtccaaggcctataaccaaaacattgctgccggcgattttatttaccggttttgccgggctttcgtaagaccaaattttcttttgctgtaaatctcggaaaatgtaaaaattgcgccgatagttgtaaaccgccccaaccataaaatcggagagagtgtcatcaaaaacaccccgtgcggtggttacaagggttgttcggctgtccaagagaccggattttgtaaggcgatccgccacggaacttatagtttgcagccattccaaattttcgcagtttgaaagagctattacattgggagtgccgattattatgtttgccctgcgcagttcctccagggggaaaaccgtatcaaagctgaaattaaacaattccgggtcgcaacacatgataacttcgtaatcatgcagcattcgtcttattttgttttgagcgtcctcgcttaacaaggcgcatacaagacaggtctttttcatattgcctcccggtttgtttgataatttgattatatagtaaaaatcaggataaatcaacaatataaaacagccgagggtataaaatttccttgatattataactgtttgtgaaaggcaatttatactttaattatatattttcccccattgtaagtcaatgaaatatccttgaaaacaaacttagcaaacagcttaatttacagtatgtagtttttggctatccgatagccttgccatgcaagccctattaaaccaaccgcccaaaagtaccatttatgggttttgtggtgaaaaatcttcatacccagcaaagcccccggggcggcaaatgcgaaagaagtcagcaacagggctttttcgcttattcgccacttattgtgtacggccttgtatttgtcgatgccgtaaagggcaaaaacaaacaggttggcaattatataaatcggtaaaaagtatttaaaatccatttaacggaagatctccttattctgtcaatttcttagattatacatcatataacaggtgatgttctacctaaattatgaataaaattttagcattatgtaaaatttccctcatttacttgaaaaactcgtatataaatagtataatagcccacataaagtttaattttttagaggagtgatcatatgaaatactgcaccaaatgtacaatgccggacacaagaccgggtatcgtatttgatgaaaacggtgtttgcagcgcatgcagacattacgaaaaccgcaaaaatattgattgggacgcccgttggaaagagtttgaagaactttgcgacaaatacagaggttgcaacggcccgggacaatacgattgcgccattgccgtttccggcggtaaggacagtcacttccaggtatatataatgaaggaagttatgcacatgaacccgattttgttcagcgttgaggataacttccctatgacagaggccggtaaacataatttacagaacatcagcgaagaatttggatgcacaatcataagctgcaaacctgacataaaaacacagaagattataatgcgtaagatgtttgaaaaatacggcaagccgacatggtatattgacagacatatttacacattcccattgcacatggcgttgaagtttaatacaatgcttttggtttacggcgaaaatgtaagttacgaatacggcggaaatgatgacgcagaaacatattccgcaaagggacagattgaaaacggcgttgccagcggtatggatgatgcggaacttttgagctggggcgttgaccctgccgcattggctttgacagaagcacctacaaaagaggaacttgcaaagcttgatcctatttatctttcatattttatgccttggaacagctacaagaactatcagcttgccaaatcaagaggtttccacgatttgacccacgaatgggacagaacccaccatgcggaaaactttgaccagatagattcaagagcttatcttgttcactcatggcttaaatatcctaagttcggccatgccgccgctacggactatacagcccgttacattcgctacggcatgatgacaagagatgaggccaaggaaattatcaaaaagcacgatcacgatttggatgttttgtgcgtaagagatttttgcgatttctgcggttataccgaaacggaattttgggctatcattgataagttctataacagagatattttcaaaaaggacgaaacaggccgttgggtgcttaaagaacctatttgggaagaaaagtaattttataacctataaaacacagccgccgatgtattcggcggttttgttgtaaaatactgaaatttttttaaaaaagtgcttgacatttcattattctgtggtataataattaagcattcaggaaatgccaagtaaatatgcaccattagctcagttggtagagcaactgactcttaatcagtgggtcccgggttcgagtccctgatggtgcaccagataagccgatactcaatagagtgtcggttttatttttgcttttaactttaaaattaagtaagtgagttttgaaacttgggtgatgcggtttttgattgaaaatcggtaataaacaaaatgtttatcaatctctcagtcggcttacgccgacagctctctttaccaaagagagccgaatatttgatttattgtatttatttacatataatgaaaaacgattatatataatttataaagggcggtcactgaccgcccttttatcatttgttttaaatacttattaaattgacattttagcattttgtgaagattacagagctatccagtatctttgagagatgtgatctccgttttgtacttcattttcaagtaccccgccgttttttattatcgtgcgccgggaggcgatattggttttgttgcaggtgattaaaatttttgtctcgccgtattctttacaaataggtaggatggatttaagcatttcaccggcgtagccctttctgcgctccgacggcaaaacgctgtaaccgatatttccgccgtattgtaacaggtaaggtgaaagagggtgacggtagtccataattcccacaagtttatcgtcggaaattctcacagctaaaaatacttctgacggaacatatccttcgccatattttgctttaagtctgctttcaaaatcgacccattcttcaaagctgtttacatcttcaaggcaggcgcaacctgtaagtatatcgccgtttttcagcatttcttctttgtatgacataatctgctgtgcatattttgcctgtggtcttattaacttaatgttcattttgtaaacctcctgtatttatgttattcatacatcataatttcgccggcaatgccgttttctaccaaaaatccctttggggtaagggaaattcgactgccggatatttttatatatccctctttttcaagtctttccagctttttatatgcgatgggaggaagaaggataccccatgtttcttttagaacttttaaatcaagcccctgttttaatcgtagggagagcataatataatcgtctttgtcaacttccccctcgtaaatcggggtggggtctgttaagaatttttttaaatttctctcgtagtaaaagcgtttgccgtctatacaggaatgagccgccgggccgatgcccaaatagtcgccaagctgccagtagatactgttatgtcttgaatacattccgtctttggcaaaatttgaaatttcgtactgctcataacccttttgtgcaagataatcacaggcctttaagtagtaatcccgcatttgttcttcgcctgccaaatgttttgggggatttacataaaaaggggtgcctttttcgattttcagcatatatgcggaaatatgggttgcgccttgccgccgcaaaaagtctatggtatccgtaagttctttttcgctgtaatcctcaaggcctatcatcaagtcgccgcttatatttgtaaagccggcggcttttgccatatcaaaggccttttttgccccccgggcgctgtgtattctgcctaaattttcaagacttttatcataggccgtttgcacgccgattgaaagcctgtttacccctgcacggcggtagccctgcaatttttcaagggtcagggtgtccgggtttgcctccaaggttatttcggcaccgggcaggacatttaggctgtttagaatatcacaaatttgctccggccgggcaaggcttggggtgccgccgccgaagtacacggttttacataccaaatcaggatatttggcaatctccttttttactgcgatgatataatcccggggcaccgacaagctgccgccctttgagtagaaatcacagtagttgcattttttcctgcaatagggaatgtgaatataaaggcctgcctccattaaaacaccaactttacgaataatttataatatatttcttattatattacagacatctctctgtggcaagtgtggcataattgtaacaaaagttaaaactttgtgaatttaaaaaaatactgttgacaaacgaaaaaaagtgattataatataaattagcaatcgagataagagagtgctaaaaataaaggatgtgagaaagatggacataaatcaaaggcacaagatgatacttgacgccattgtttcaatgtatatcaaaaacggtgaacctgttgcctcacaaactttgcaggacgccttgaatatcagagtttcctcggctacgctgagaaacgagatggcaatgcttacaaagctggggtatcttaaccagcctcatgtttccgccggtagggtacctacaaacaaggcgtacaggtactatgtttccaacatagacaaaagccggaagatttccccaaaagacagagagaagattgaattgcggtttgatgctcttgacaaggacagcgcaagatttttgcccggtgcggcaaagttattcagcgacttgttgggttatacggtgattatatcccctccacgggataaagaattgcagtttgtaaactttacggcagttaaaaccggcaggtttacggtggcttttgtggcaaccaccacaagaggggaagttcagacgagagttgttaaactgtcaaatgaaatttccaccgcacgggtggcacacataaaccagatcataaacgcaaggctgtgctttgtgtgttatgacgatattgacaggcggtatttccggcggctgacaaaacagcttgaaaaagaaaatccggcatacgcacagcttttacaaggggctttggcactgattgccgacgccaacaacaaatctttgtacgtgtacggacaggaaaagctgcttaacaccagtcactttgataagaacatcggcgatatgcttaaacttttctccgacacggagaaaatgaagagtattataacttcgaaatatgacggagtttcggttgtctacggagatgaacttcccatagacaatgtggaaaatgcctgctttatttccactaagtattatgcaggcagcgcggtcagcggtgtgctgcgggtggtttgtccacagacggttgattacgaaagactgtttgcggcagttgaatacttcgcaggtttgctgacacggtctataacaggttttgaaaggaaatagataatggcagaagaagaaaagatgacacccgaaggggaagttcccgaaaacgagtgtaaagaagaacagcaggaaaagcagggcggagaggaaaaggtagatattgtaaaaggtatcgaacagcttgaagcgatgctgacggaaagcgaaaagaaagccgaaagccttgcaaaacaacttgatgacagcaaaaatgtttatcagagaactcttgcggagtatgataactaccgtaagagaaccactaaggaaaaggccgaaaattacaacagcggtttaactgctgcggtaaatgcaattcttcctattgtggacaccttggagatggctcttgcggccccaaccgaggacgagaattttaaaaagggcattgagatgaccatgacgaaagccgttgagtcacttaaaagtttaggtgttgcggaaatcgaggctttgaacaaaccttttgatccgaattttcactcacgggtgatgcaggaagaaacagagggcgttgagccaaatgtggttgtcaaggtgttccaaaagggttacacccttaacgataaagttatacgccacgcaaaagtggtagtaagctgttaatgattttaagcagaaatgcttgattataaattttaaaatttacattttgttaatagataaaggagattatgattatgagtaagattataggtatagacttaggtacaacaaactcttgcgtagccgttatggaaggcggcgaaccggttgttattgctaacccggaaggcaacagaacaacaccgtctgttgtaggtttttctaagacaggcgaaagattgataggtcaggttgcaaagcgccaggctatcacaaatccggagggcacagtttcttcaattaagagggaaatgggcacaaattacaaggtaactatcgacggcaaggcatacacaccacaggaaatttcagctatgattttgtcaaaacttaaatcagatgccgaagcttaccttggcgaaaaggtaacagaggctgttatcacagttcctgcttacttcaatgatgcacagcgtcaggccactaaggatgcaggcgctattgccggtttgaatgtaaagagaattatcaacgaacctactgccgctgctttggcttacggcgttgataaggaacaggatcagaagatcatggtttacgaccttggcggcggtacattcgatgtatctatcatcgaaatgggcgacggcgttcaggaagttttggctacagccggtaacaaccgtctcggcggcgatgacttcgaccagagaattattgactggatggcagacgaatttaagaaagacacaggcattgacctgagaaatgataagatggctgctcagagacttaaagaggccgctgaaaaagctaagattgaactttcaggcgtaatgcagtccaacatcaacttgccgtttatcacagttgacgcaacaggcccgaaacacttggatatgactcttacaagagctaagttcgatgagttgacacacgaccttgttgaaaagacaatgggtcctgtaaagcaggcacttgcagacgcaggtttgaaaccaagcgatttgaacaaagtattgctggttggcggttctacaagaattccggctgttcaggaagctgtaaagagctttatgggcaaagacccgtttaagggcattaaccctgatgaatgtgttgctatcggcgctgcaattcagggcggtgttctcacaggtgatgtacagggtatccttcttttggatgtaactccgctttcacttggtattgaaacatacggcggtgtatttacaaagatcatcgacagaaacacaactattcctacaaagaagagccagatcttctcaacagcaacagataatcagccttctgtacaggtaaatgtattgcagggcgaaagagaaatggctaaggacaacaagagccttggtatctttaaccttgacggcattgctccggcaccgagaggcgttccacagattgaagttacatttgatatagatgccaacggtatcgtatctgtatctgctaaggatatgggcacaggcaaggaacaggctatcacaattacatcttcttcaaatatgtctaaggaagatgttgaaaaggctatcagagaggctgaacagtacgccgaacaggataaggcagcaagagaaaaggttgagacaaagaaccaggctgacagcatggtattccagaccgaaaaagctcttaaagacgcaggcgataacattccggctgacatcaagagtgaaatcgaaggcaagatcagcgatttgaagaaagctgttgaatccgacaatgttgaggatatgaaagctaagatggaagctttgtcagaggccgcaggcaagatttatgcacaggcacagcagcaggctcagcaacaggcacagcagcaaactcaacaggatgcaggtgcaaacaataataacaacggcggcgacggcaatgtttacgacgctgactttaaggatgttgactaataaattttaatcaccgtaggcggatgttctgcatccgccttacggcggattatgaggaaaatcgagggctaaaaattggcagataaaagagattattatgaagttcttggcgtcaacaagtcggcaagcagtgacgaaataaagcaggcctaccgcaaacttgcgaagaaatatcaccctgacttaaacccgggcaataaagaggcggaggctaagtttaaagaggtaaacgaggcctatgaggttttgagcgaccgggataagaaacagcgctatgacgcttacggtttccggggtgttgaccctaattacggcgcaggccaaggtggctatggcggcggtttcggcggatttgacggcgttgaccttaacgatatattcggttctttcttcggcggcggtttcggcggcgcatcatcacggcgcagaaatcctaacggcccgagaaggggcaatgatgtccatgtgggcgttgttatcacatttatggaggcagctcacggcgcaacaaaaaccgttacattccagcacaaagaaacttgcccggattgtcacggttccggtgcaaaaccgggttcaaatgttcaaacctgtccggattgtcacggttcgggatatgtaaccatacagcagagaacagcgtttggtgtaatgcaaaacacccgtgtatgtacaaagtgcggcggtaaaggtaaaattgttacagacccatgcggcaaatgtcgtggtacaggttatgtaaatgtaacagttaagaaagaagttaagataccggcaggtattgacgatgagcagagccttgcaatgagaggacggggcgacgcaggtacaaacggcggcgcacggggcgatgctattgtaatagtaaccgttaaaccggacccgatcttccaaagaagagattacgatgtgtatgtgaatgtgccgataacctatgcacaggctgttttgggtgctgaaattacggtgccgacagtagatggcaaggttgcttacacagtgccggagggtacacagtccggtacaaggttccgtttaaggagcaagggcatacagtatctcaatggcagaggcagaggcgaccagtatgtaaccgtaaatgttgaaatacctaagaaaatgacaagagagcagaaaaaggctcttgaagcgtttgaggcaactatgggcgattcaaactacgaacagcgcaagggcttctttaaaaaagtaaaggatttgtttgattgataaaatcaggcagacaaataaagaccgtaaattcattttgagtttacggtcttttattatgtgcttttatattcgattttacggactattcttttatttcgccgtttacaactttgtacaaaatgtccgggcggttggagattattccgtcacagccggcggcaataagttttttcatatcctcagggtcgtcacatgtgtatgggtttacctttaaaccacgcttgtgcatttcctctaccaaatgttcgtcatttaatacgctgtggtaatccgggtggaagcagtccggcttaaaatcaagctcgtcgataaaacgggtccaaggaatatctttgtttatatccgcaagggcggcgtccgggtctggaacagggtaggcagaaaggaaataagcacccaattcacgaaagcgcttgtttatgtggtcgggcattgtgagaatgcccactttaaatttaggattatactgttttatttggcgcataaggtcaacatcgaaggaggagaagataaccttgtctgtaagccccattttatcaacagtgtctgcggcggttttggcaaatgggtattccttttttaaccggcttttaagttcaagatttataactttaaaatcctttacaatttctaaaagttcttcaagggttaaaatcttttcccccttaaatttttcgtctttgtatgcgccgtagtcgtatttactcagttcgtcataagtaagggaacaaacagcgccgctgccgtttgagttatcgtcaataaaccagttgtgatttattacgattttattgtcaagtgtaagctgcaagtcggtttcaatgccgtctgccttacagtcttttgcaattaaaaatgcggcttttgtattttgcgggccaagatgagccgtgcctctgtggcctattacaagtgtttttttcattttaacattctccgtaaaaatatttattcgatttaattataaagccggaatgtgaaaaataaaataaatttttcggtttagccgtaaaataatcaggtgatattttgtgcgctttatacaataaccccgtcggtcgcactgccggcggggtattacgattgattattcttttattatttcaaaattttcatctgtgtaggaggtaaggtcttttgcggtgaaaatgctttggcaggttatataaactccgtcaactttgtaaacgctgtaagggcttgtttgggctataatgccgctttctgtcgggttgtcgtcggtaagcattacggattttttatctgccgtgccgtcggaaaatgattttattacggcagattgagtttctgcatatttttcacggtctattcttgcggtaaaatctccgtttaccgctttgcctgccttgccggctttaacaggtaaatcaatgtagtaggcttcggcgtagttgaaaaatacatcataattttcgattaagtcattccaaaatttatttttcatattgtttgatactacttgaccctgtaaatctccctctttgccggtgaaatatgcgtgttttgatatgagggcaccgcttatatcccaagtttgtaaaaccagcataaaagcaagggcgatttccggcaagtgcttaaatttgataagtgaaatgccgtacaggataaacaaaagtatcagatacagcaaaagccatgcaaatctgccgttggcacggaaaatgcaaaagaagttatctatcaacggttgggggaaaggaatatgaaatatattaagaccgccgaatgttatgttgtcgcctattgcaaatataaacagggcagcagttgaaaagatgatgccgaaattattttttataaattcccaaatttttttgaaaacggatgttttatatgttagcaaatagaccatacaggtaacagggataagagctataaaacctaagccaaggtaaccaaaaccttctatttgataaacattattgaatggtctgacaccgatgaattttgaccaatttgaaaaacctttacttgttggattatagaaagagtttaaattaaaactgaatacaccgtaaccgtatgcggccatctcacctttgatgtaaaaagcgccgattatccatcccacaaaaactgtcaaagccatacttgaaattatgtacagaacaggctttaatttttcttttgtcataaagaaattttccaaacaaaaggcaaacattatgccgaatgtaaagggcaaaaaatatgggtgtattgtaattgacagccggtttatcacaaaaaacggcagaagggctttaatatcggttttgcctttgtttttaaaataaaaatacagacaccgcagaattaaaaactgcgccgttaaaccgcaatgcctaaaccgcctttctataagaatcggcataaggcagaatgcgccggcagaaagtgtagtaaaaacccggctttccgtaaacaaacttacaagtaaagcgccgaagcccccttgcaagccaaaacagagcattacaaaaatgccgaagtattgaaaagtttgtggcaatatgctcctgaatattttaaaaaatattgcaaacagcggtattgaatcggtataagacaccgccgtgccgtagggatatgccaaattctgccctaccccaatgggaaactgccatgggctgtttctgaaaagaacccagccccgatagtgctgagctatgtctttttcaatatatccgtttatcaaaaaactatcgttttgcacatttacaacactgaaaccgtaaatggcaaaaaatattaaaagtcctgcggcaaagccaagggcgaatattttcattctttttttgctttgattgttcatggttcacctatatattaaaagtatataaaaaattatatcacagggacagcgtaaaatctacggacaaatagttaagatttttacacattaaaaggcggctttgtaacaagccgcctttttggtgagaaaatttattatgtttagtaaggtgattataaggattagcctacatatccgacagaggccaaaaatgccacgacagctattgatataaccgcataaatgcccataagaggagccgagtatttaagccacttgtcataggaaacatccgcaagacccaatgcgcctacaagaggaccggacataggggtcaatgtgttggaaatagagtcgccgtactggtaggcaagggcaacaacctgtcttgaaaggccgcaaacatcgccgataggaattaaaaccgggaacataatggccatttttgaggttcttgacggaataaggaagttgaatatcaatgtgaatataaacaatcccgcaccggccaatgcaaggcccgaaccgccgataatattcgccgcccaatttgccaatgtgtgcattacatgaccctgggtgagaacaaaaccgataactctggcaacgcccattataagggatatgccgcccatgtcacaggcacctttaaaaaagtttttggaaattttgttcaaatcctggtgataaataagccccgtagcataggccaatataatttgcaatgccaccaaataagactgatcccagccccacttgttgttggcaatcgcatagaagccgtagataccgaacataaccaaaacaacaatgataccacggagagggaatttggcttcttttatttcttccatatcttcatccgggtgcataacgccgccgcagtagctctttgacgggtcggcgcttattttcttggcatatctggtacaccaccaggcgttaaggccaacaaaaacagcccaaataatcattctgacgcccataccactcataggttcaacaccggccataagctgcatggtaatcatgccggtaaaggttgcgcccatacccaccaaatagcctaagtaaaacatacccatggcgcaaattctgtccaggtgcaggcgtttgcagataacaagacctacggtgacgaaagctatcatagagtctgtgccggcaaaagagcccaaaagacccataagaacaactattgacggcacaagcactgtaaccgagcggtcggaaagtttgaaaacaccgtaatttaaaatatcgtcaaaagcgccggtgcctacaatacaagctatggaaccgccgcctataagcataagcgaaatcatagatgccgcattttctatgcctttttttaccataagcaatgcttgccacgggcttacggttgtgcgctcaacggcgtgatatgtaccggcaattgcgtttcctgcctcgtccaaatcgaactctcccacgggggcgatatatgtccgcaggcaggctaccagaacaattataccgataattacaagaatatgaggcacttgaaactttttctttgtcccttttgctttttcagccataaatttttcctcctaatatttattttatcctcttttacaaaccgactttgccgagagggcaatgtttaaattttttctttgtcattccatttggcttaaaacaaccgcaaacagcgctattttttcctctattgaagaaattctcatgtgttcattggttgagtgtatctcatacatatacgggcccagggcatcaacggagggtatgcccataaagctgatgtagtttgcgtcgctgccgccgcctgtggtttgctccggcaaatccttgcctaaaagccgacctgcccggcggactttttcgtagagtttaactccctcttccgttcttgtaaaaggaacggagaaacgatccaccgtaaccttcgtgattgtgtccggaatgtatggcggtgcgtcgtttacctttttaactatttcttcaactgtgtccatatcggccttatttgccacacgcacggaaacttttgcacttgcatggccggagacaacatttgcagggtcatcgtttacaaccggccctacattgaattgaatacctctatcgtttatgttgctttcatataaaagcatcattctgtgggccacttccattatcgcactgcggccgtcaagatagtttacgccggaatgagcctttttgcctgttacatcaatggtgattgagccggaaccttttcttgatgtgagaactccgtcctccaatctggaaggttcaaacacgaagcaggcctctgcaccgggacattctttgtcaaagatttggtgaccggtgggagaaccgatttcctcatcgcagttaaagatgaaaacgatttctttattcggcagcatacctgcctcttgcataacttttaccgcatgtatggcaactactataccgcctttgcagtctataattcccaaaccgtaagctgtgtccccgtcaatgcggaaaggaaattcttcagcttgcccttttttaaacaccgtgtccgtgtgggcgtttaaaattattttgccggttggattttcaggggttaattttgccacaatgttaattccgtagccctcaaagaaatgatgttcgattttaataccctggatttggctaagcataccgtcgataatttcaactacttttgcgttgccctccacatcacggctgccgcagtcaatgccggcaaactgccttaaatagtcaaggcccggggcggcgtatttttttgcgccggattttgccgcttcaactgcctttttctgatcatacataataaaaagcctccttttgctctgtgttttattaacgatattttacaatttactttaaaaaaataaaaatacataatttttatggagtataaaaattacttatgttttgcctttgaggttatcacaaaaatataacataaattttcttgactttatacggaaaaagaactaaaattagaatgttcaaaattgaagtatttaggagacccgaagtatgatgatgaccgttacgcaaatgaatgcctatgtacagaaattcggcagcgcttacgagaaatttttaacacctcttgcaaaacaaattgatatgcctgtgaaagctgtgggaattttactgtacgttgcaaacaatcccttggcaaataccgcaaaggatatatgccgaaatctgtttatgaaacaggggatagtgtcattccatgtggacaatttggtaaaagccggttatcttgaaaggcaggcggcccggggagacagacgagttacaaaacttgtttgcaccgataagtctcggccgattatcagccggggcagggagttacaaaaaactttttttgaaaatctcacccggggagtaagccatgaaaatatggagattttaaaaaactgttttgatatttttgaaaaaaatatcgccgccatgacagagcggaaaaagaaagatgaggaaatctgatatggaacaggataaaacatttttgggcaccgagcccataggcaaactgctttttaaattggcggtgcctaccgttatagcacagcttgtaaatatgctgtacaatatagttgaccgtatatacataggtcacatgcctgaaaacggcagccttgcccttacaggtgtaggcgtttgtatgccccttataatgataatagccgcattttcggcctttgtggcctccggcggtgcaccgagagcctctatcgcaatgggcagaggtgacaatgaacaggctgaaaatattttaagcggttgctttacaatgcaaattataatttccgctgttttgacggttgttatgttgctttggagcaaggacttgcttttgcttttcggggcaagtgaaaatacaataccctatgccaccgcatatatgagcatttatgctctcggcacgatttttgttgaaatgacccttggtttaaacgcatttatcaccgcccaaggttttgccaaagagggcatgatgactgtgcttataggtgcgatttgcaatattatacttgacccgatttttattttcggcttgaatatgggcgttcgtggcgctgccttggcaactattatctcacagggcgtttcctgcgtttgggttgttaagtttctcacaggcaaaaagacgatacttaaaattaagaaagaaaatcttgctgcaggcttaaagtatgtaaccccttgtatcgccttagggctttcaacatttgttatgcagtccagcgagagcattgtttcggtttgttttaactcatcactgcttaaatacggcggagatgttgccgtaggtgctatgacaattctcacaagcgttatgcaatttgcaatgttgccgttgcagggtcttgcacagggagcacagcctataacaagttacaattacggtgcaggcaatgccggccgtgtaaaacagagctttaagttgcttttgacttgcagtatgatttattccacaaccctgtggcggattataatgttaaagccgactgcttttgcgggtatgtttacaaacgacggtgttttgcttgaatttgcctcaaacgcactgcgtatttattgccgggttttgttgatattcggtattcagattgcctgtcagatgacatttgtttcaacaggcaacgccatttgctcaattatcgttgcggtaatgcgtaaatttatacttttgataccgcttatttacattatgccccacatctacaccgcagataaaaccacagctgtttatatggcagaaccggtggccgatattatagcggttacatttacggcgataatgtttattttccggttcagaaaatctttgaagaaaatagaaaaatcggcgtaaaaccgataaataaacacaaaaataaaggcgcagtcttaaccgattgcgtctttaaattttgcaaaaacaaaaccgccttgcggcggttttgcttagggttatataagtgaggttaaattgggataaaattcggataataaactataaagtactgcattactttacattaagttttgcggctgtgccgctttttgaattatgccaaagccgctcccaaggctttgcatttttctattgcctcgtcatccggggcgtcataagcgattacgctttcacaggcaaggtctgcaccgtcgtccttacactgccgggtccatgtctgcatccattcgccctctgcccatgcgtaagaaccgaaaagtgctattttcttgccggcgagctttggctcgcaccgtgaaaacataggttcaaattcgctttcttcaagctgttcggaacccattgcagggcaaccgaaagcaatccggtcatagctatccattttgtccgggccgaattccgacgccgtgaacaattccacatcggcacctgcggcttttgcaccgtcaacaacggcgcttgccatggtctctgtgttgcctgtacctgaccaatatacaactgcgattttactcatttttaaaaccaacctttcattatttatcagacagctacaacaagctgaccgaaagaattaaaccttgaatagtatttgcaatagacttttttgcatttttcatactgccggaatttcttttttgcccgatcctcatcgccgtaaaccttccaggcccccacgcatttggcacaatctgcatggtttgttataaaaccatacacatcttccgggggataccccagaaaaagcccgatttcgtgaggaaagtcacagccggggcggattttttcggccaactgctttatacatgtttccgggcagtcaacagaataactgcgccgtgtaagcatgctgtttgcaagccggtctttaaaatcttctcggagtttggaaattctgtaagcgtagataagggcacgattttcggatgtgcttaaaattacaatcctaaggccctttggcacgcaaacaccgttaaggcggcggatttcatccgtaagctctttactgtcggtgaatttgtaagaaaacaaatttgccgtttttatgccggccataacgctccggcagtgtaaaaccattgtttgttcaagcatcggacaaagcctcctttaacagcagttagctactgctaaccataaggtttttaaattggttagcgttcgctaaccgtgattaaatgataccaaagtcattgccgtttgtcaacagattttttaagcattttagttttttgttacagattatattttggggcttaaaacaaggggctatttgtaacattgcataaaaagttagtattgtataacataatcaccaaaaaataaatatttttttgtgaattattgacaaaacaagccaaatgtactataatatttgatgtgataaagtaattcgggctgttgcctgtgctttgtaacgattattttatgagatatttttatatgaggtgatatgtattatggattacaagaaaattgctttatttgtagctggcacacttttcggttctgcaggtttgaagattttaggcagccgtgatgcaaaaaaggcttatgcaaatgtaacacgggcagctatccgtgctaaggacgcaacacttaaagctgctgacagcgttcgagaggcttggggcgatgttttgagcgacgccaagaacatcaacgaacagcgtgatgttgaagcagaggctgaagttattgaagacgtagccgaagaaacaacagaagaataacaaaataaagtcattaaaacaaagccctgagttttcagggcttattttaggggtaattatatgaaatgtactgttttacattcgtcaaataacagaatacgtgtacacatggccggcagaaaaatgagccggcggcaggcggatttgctgtacggatacttaaaccggttggactttgttgaaaaggccgatgtttatgaccgcacaggtgatgcggttattttatttaccggcgatgttaaaaatgtaaagtccgccttggcggaatttaagtatgaaaatgtggatttgtcaactttgccggtaaacgtgcggacaagaagcataaatcaggaatatgcggacaagctgatttcaaaatgtttgagaagaacttttcgcaaattatatatgccgctgtggtacaccaccgcaaggacggccgttaaatcaatcaaatatatcgcaaagggcatatcctgtattgcccacggacagattaaggttgagcttttggacgcttgttctatcggtgcgtcaattctcacaggggatttctctaccgcaggctcggtaatgttcctccttgaagtaggtgaaatacttgaagactggacccacaaacgcagtgtaaacgacttggctcagagcatgtctttgaacatagataaggtatggcttgtaaccgacggtggagatgttttggtttctgccgacagcatcaagaaaggcgataagataagagttcacacatcaaatgtaattccacttgacggcgaagtttgcgagggtgaagctatggtgaaccaggcgtcacttaccggggaaagcgtaggtgttcgcaaagcaccgggcagcagcgtttacgcaggaaccgttgtggaagagggcgaatgtgtatttatcgcaaaaaaccggataggccaaagcagatatgacagaataacggctatgattgaacagtcggaacttaattccgaatctgcaaacagagctatggctcttgcggataagcttgttccttacagccttttaggcacggttgtaacatatgcgcttacgagaaatgtggcgagagcaatttcgattttgatggttgacttctcttgcgctttaaaattggctatgcccctgtctttcctttccgctatcagcgaggcaggcagacatcacataaccgtaaaaggcggcaactaccttgaacttatgcacaatgcagacacaattgtgtttgacaaaacaggcactcttacaagggcttgcccgacggttgctggggttgtgacatttaacggcaaggacgaaaaccggtgtataaaacttgccgcctgcatggaagaacacttccctcattcaatggcaaatgcagttgtaagttatgcggcaaaaaacggtatcacccatgacgagatgcacagcaaggttgaatatatcgtcgcccacggcatcgcaaccacggtgcagggcaaaaaggccataataggcagttatcattttgtgtttgaggacgaaaaagtgataattccccaaggagaggaagaaaaatttgaaaatcttccggaggagtattcacatctgtacttggccgtcgacggagttttggaggctgttattctcatttccgacccggttagggaagaagcaaaatttgttgttgatgggttgcacaagctgggcataaaagaaattgttatgatgaccggggattccgaaaagaccgcaaaagctattgcaaaacaggcgggagttgaccggtataaggcggaagttttgccggaggataaagcggcatttgtttctcagtgcagggcagagggcaaaaccgttgttatgattggcgacggcataaacgataccccggcactttcaagcgccgatgtgggcattgccataagcgacggcgcaagtattgcaagggaaatttccgacgttattatttccgcaggggatttgtacgaacttgttgtgcttaaaactttgtctgacagacttatggaacgcatacgcaaaaactatgcctttattatgacatttaacggcactcttatagttttgggtgcaatgggcattttaccgtcggcaacttcggcacttttgcacaatgcgtccacaatagcaatcagcttaaagagtatgacaaaattgcttgacgaggaagaaaagtaaatacgaaaggcgcaaaacacgccgaaattaaaggtcgcattccgccgatatggtcggatgcggccttttgattttgtattgatatttgatgatttttgtcaaaaattatcgaaagagaaaacgttgataattttcacaaacagagaaaaaatatttagtaaaactctttttgtcatgggttttcaagatctaattatatttaaaatgaatttagcaattatataaatatcttttgccaaaacgcacagaaaatcggtttttatttctacataaataacatattatttaaaatgtggatatgatataatctaattagaattaaacgtttattttatgtaaagtgaggtaaaaaaatggacaaaaaacagcgtattatcaaagcggcagaggccaacagacagatagctttcgaggcggaacgctatatttggaagcatccgcagacaggttataccgaatggattgccaacgaatatttaatcgaaaaattcgaggcattgggctataaacttgtcagagccgaccaagacccgaagcacggtaaaattccgggcttctatacagatgttgacacaggcagaccgggcccgacgctttgtatcatgggcgagcttgacgccttggatatagcaaaccaccctgagagcgtaaacggtatgtgtcactcatgcggccataacgcacaggccgcaacaatgctgggcttggcagcaacattgaaaaccgacccctctattttggatggtctttccggcaaaatcaggcttatgcttgttcctgcggaggaaatgattcagcttgctttcagaagcaatctgattaaagaaggcacaataagctatatgggcggcaaggttgagttcctgcacagaggctattatgacggcgttgaccttgctcttatggttcactcaggcaacttgggcgacaaatatgacttctcatgcggccagggtaacaacggctgtatggctaaggttattacttacaagggtaagtcatctcacgccggcggtgcgcctcacgagggtataaacgcacagtatgcggctatgctgggcttacaggcctgcaacgatttgagagaaacattgcaggaaaaagatactatccgtttccacccgattatgaagggggtaaactgcgccgttaatattattcctgacgaaatggttatcgaaagctatgtaagaggcagcaatatcgaagccatgaagagagagaataaaaagttcaaccgtgctttggcaggcgccgccgcagctatcggttgtgaactgcacattgacgataagccgggctactcaccggaaatccacgatgttgcatatatgcagctggttgaagaggtatgtaaggatttggcaggggcagacagagtaaattttgagtatgactcatggagcacaggttcatctgacttcggcgacttaacatgcgtaatgccgggtatccagtttacatcagccggcgcatcaggcacggcccacggtataaactactacctgacagaccctgaaagattgcttattaactcaattaaagctcagcttttggttgctgataagctcttgaaagatgatgccgcaaaagccaaggaaatcgttgcaaactataaggcaccttacgcatctataccggaatacttggatgctatcggcgactttatacttgaccgtgatgttgttgagtacgaagaaaacggcaatgtaaaattaaatcttgccaagtaataatggctttttcataatggcggtataatgtcatttaggcaaaataccgtaactcctttcttgcgatacaggcggtgtgtggttgcaccgcctgtatttctgtttttgccgttttttgtgcgttatttacatgatttttaaaataattttatatatttcaccgtttaatttttgcaagtttaaatgctataataatttgtataataagaaaagagggatattttatgacattggcgcagcttaaatatttttgcaagaccgttgagtgtgaaaatatctcaaaggccgcaaaagaacttaatgtttctcagccgtcggtaacggtggcgataaaggatttggaaaccgagcttggggtcagcctttttataagagagaaaaacagaataacaccctcaagagaaggtatgtatttctattcaaaaatagttatggttttgcaggacatagatcttgctgttggggaggtcaaaataatgtctaaggacagccgaaccataacggtgggtattccgcctatgataggttctttcc

SEQ ID NO: 2871 - DNA, 7890 bp, Unknown
  16S sequences of unknown bacteria
atgcccgcgcttccccaatttccttccgccattccgcggccctcctttgcgatcggctttcctcatttttattataccatgttttcgcgcgcggggcaatcccccggggttttgcggctttttccgccgctggcgtgggaagcgcgttttttcacaaagggaggcgggcacaggcccgcctccctttgccagtggctcacacctattcttggagagcaacggtacaccggcccaaaacttcgccgccaatggccttggcctccaggatgagcgaagtgggaatttcgtcaaacgactgcatctcctgctgctcccggtaaatgccggtttccgcatcgaacatgcccccgccgctgccggtatggatttcgttgccctcgccgtcatagagccggaaggaaatgcccatgggttccccttccgccgcctggtactcataatcgatggtcagataaccccgcaccttcgtcacggtcatatttacggcgcggatgcggacgcgttcgccgatcgcgccgtcgccttccggcgcaaatgcggccgtgcgctcgggttccgccctgtcgagggagaaggcgatatcctccagcgggaacggctcgccatccaggaagacgctgacattcagcttcatctccacggtttccggcaggggcgcgtccgaaaaggcgtcaaaccacagcagcacactgccgtccggctgcgcttcggcgttgccgctcatgccgttggccagcccttccgcgccctcggaagcgggcgccatgacgacttcaaagaaaatcatctgcttgccatccagccgggtgatctgttcgctctcctgatgggtaaagtacatcgcatcgccatcgagatacaccggcaggcccgcggcatcggccgtttcccggtccgttgggagctcgacgggttcgccatccacatacagcgcccgctcatccggcccgttgcggatttccattgtgccgttggcatacgggtataccccttcgggcacttcggccggcatgtattccacaagatattcctcctccggcgcgtccagaaagaaagagttgtgcagcgcgtattgctccgggtccttgggtgcgaggcgcgccagcaccatcacgccctgcccatcgtacaccgcttcttccacgcgcagcgttaccagctcgttttccgcgctgcccagatcggtggacaccagcgcttccgccccgtccaggggctcgatgggatctctcactttctccataaaccggaacagatccagcttgctggcggcaaacgccgtcacgctcaacagcgccagcgcgagggccagcgcgaggacgatccttctcttcttccgcatttttctcttctcctttccttctccggccaggacgcgctgctcgagaaacggaacggacgtaaggccggacagccgggcatcgagcgaatgcttcacgcattcgcgcatatcgcgatcattcttcctcatagacgcctcccattccgcgcctgagcgcttcccttgcccttttcaaccgcccggaaaccgaagactggctgatactcagcgcctgcgcgatttccgtcacggaaaaatcctgataataatagaggagcacgacttctttcagtttgcggggcaggtttgccaccagcagcgtgagccgctcgtccctgggcgcgaagctggcctgcgcgcccggcagcatatcgggcgtgagccgccggtcgcggtggcggaaccacgccgaccggcgcatatcccggcacgtgttgatggcgatccgaaagagccacgtcttttcgctgctctcggcgcgaaaatccgcccagtgctgataggcctttagataggtttcctgcaccgcgtcttccgccaaacccctgtcttgcaaatagagatagcaactgcgcagcagcgcagactggtaatcgcgaatccattgcgcaagtttctcttccggagcacgatcagggcccttgatcccgctcattcctccctcgcccccctttcactgcattagacgaaatggcccccgcgtatatcggatggaatttgttaattttgcaattttccgcgcgaaaaagcccgcgccgctgggcaaacggcgcggggcttttgtggcagcggtgtacgcctgccctctagcggcctatcgccccgagggcgttctttgccaaggggaacctatcgcggcggcacgcctatgacaaggccgacgatttgtccaagcggaaaggaatttctcgcgtgcgttaacgcgcaatagcacgcatcgatgcgcattgggttcctttttcaatacgaatttggctagagccctttatgagttttaataaaattccttgtgccaccagtttcttcagtggcatagtgtatttatagctttttgtaaagcccatttcctaaaaattcaataatgttattgtctctcaatatttgtagctgctgtcgcacttttggccgaatgttgtgattcgcaggatgttgcgatgcaagccatgattcaaattgatatacatcctcaagagaaaatattgtctttggaattttatttatgcaatacaatatatctacaatccaactacgagtgctaatattatctgtatcaaaaaatgacatatcttgtacctgcgcaataacatcatccttagctataggaatccgattgcatataataccaatttgcccctgcttggggattttatcaaaatatatattgcatccaatccatccagctcttcttgctgtattgggcaacggtttccgcttttctacaatgtttggaacgaaaaaatgctttggtataaaccaaagattcttgatgcataacttttccgtgctatagttcaaaatgagaaaatcggggctagtattgctcgtgattctttgtacaaatgtatcatatgcgccatttgcaatctttcgccccatagagccgcttttactcttcagctcgtattcactcccgcattttgggcaaaagaaatcggctacctttttgttattagggaagtgctctattctatcgttgccacaacgcgggcaatacatattatcgcttatccatgcctccgtcagcacccgagcaatttgcgatttacttctgtattttgcggcgagttccttgtttaaatacaaatccatctctattcactccattttttgcaatcaggactcttttatggagacaactcgccgcaacaatcgcacaaattttccgcttaccctattcccactcaatcgttcccggcggtttgctggtgatatcgtacaccacgcggttgacgtcctgcacctcggcgatgatgcggctggcgatttttttgagcacgggataggggatttccgcggcttccacggtcatggcgtcctcggtggtgacggcgcgcagggccacgcaattgccgtaggtgcggccatcgcccatcacgcccacggtgcgcgcgccggtgagcacggcgaaggactgccagatctcgtcggcgaggccggcgcgttccagttcttccaggtagatcgcgtcgcaatcgcgcagcacggcgagtttttcgcgggtgatttcgcccatcacgcgcacggcgaggccggggccggggaacggctggcgcatgaccatggggcgggggatgcccagcgcgagccccacggcgcgcacttcatccttgaagagcgcgtccagcggctccacgatgtggccgctaaagcgggattccttgggcaggccgcccacgttgtggtggctcttgatggtggcggagccgcccatgccgctttcgattttatcgggatagatggtgccctgcagcaggaaatccgcgccggtcttggcggcctcctcctcgaaggtgcgcacgaagagctcgccgatgatcttgcgcttttgctccggctcggtcacgccccgcagcgcggcgaggaatttctcgctagcgtccacgtgtacgacgttcagccccaggttttcgcggtacgtgcgcatgacctgcgcggcctcgtccttgcgcagaaggccgtgatccacgaacacgcaggtgagctgttcctttttgagcgcacggctggccagcacgcaggcgaccgacgaatccacgccgcccgaaaggcccgccaccaccgtgccctcgcccacctgggcgcgcacgcgttcgatcatgcggtcgatgaggtcgtcggcccggtagccgccctggcagccgcacacgccgtagacgaaattgttcagcacgcggtcgccctccacgctgtggcgcacttccgggtggaactgcacgccatagagcccgcggctggggcaggaataggccgcgatggggcaattgtccgtgctggcgtcgatggagaagccctcgggcagcgcggtcacgcggtcggtatggttcatgaacaccacggtctggggcgaaacgcccgcgaacagcgcgccgccgcgcgcgtggagcacggtgtggccgtattcgctcacgtccgcgtgttccaccgtgccgcccgccttgtgggcgagcagctgcatgccatagcaaatgcccagcacgggcacgcccagcgaaaagagatccacatccgcgccgggcgcgccgggcaggtacacgctgctaggcccgccggtgaggatcacgcccttcacgctctcgtccagccaggtttcgcgcggtttggcatacggataaatttcggcgtaaacgccgccgtcgcgcacgcggcgggcgatgagctggttatattgcccgccgaaatcgagcaccacaattttttcttgcatagatttttctgtcatagcttgtccccctcgctataggcctcctacatgcgctcgggcgcgctgacgccgatgaggcttagcgcggtggcgatgacgctcttggccgcgcgcgtgaggttcagccgcgcggcgcgcaccgcgccgtcgtcgtcgagaatgcgctgctcataatagaatttgttgaacgcctgcgccaggtccacgctgtagcgcgtgatcatagaaggctcgccgcgctccagcgcctcgcccagcaggccggggaactgttccagcaggcgcacgacgttctgtgcgtccgcgtcggcaagggcggcgtaatccggcgcggcgtccgcctcctcgcccgccttgcgcaacacgctggcgcagcgcgcgtgcgtgtacatcacgtaaggcgcggtttcgccatcgaaattgagcgcgcggtcccaatagaaatcgatatccttgatgcggttgttgtacaaatcgaagaagatcaccgcgcccacgccgatctggcgcgcgatggcctctttgttttccaggtcggggttcttttcgttgatgatggagagcgccttttccaccgccaggttgagcaggtcttccagatacaccacgtgccccttgcgggtggacatggactgcccctcgtaggacaccatgccataggaaatgtgcaccatatccttggcccactcgcggcccatcagctccagcgtcttaaagagctgcttaaagtgcaggtcttgctgataggccaccacgtacaggcacttcgcgaagtggtaggtatcgtgccggtactgggcggcggccaggtcgcgcgtcatatacagcgtggccccgtcgctgcgcagaatgatggccgggggcatgtcgtatgctgaaagatcgacgatctgcgcgccgtcggattccaccagcaggcccttttcgcgcagttcttccacaatgggctgcatcttatcgttgtaaaagctctcgcccgcgtaggaatcgaaggtgacgcccagcatatcgtacacgcgggcggcgtccttgagcgtgagctccttgaaccagttgaagatggacagcgcctcttcgttgccgtcctcaatggccttgaaccaggcgcggccctcgtccgccagggcgggatccttctgcgcctcctcgtcaaagcgcacgtagagctttgtcaactcctcgatgccgcccgcctcgacctgttcccggtcgccccagtgcttgtaggcggcgatcatcttgccaaactgcgtgccccagtcgcccaggtggttcacgcccacgcaggtgtagcccgcgtattgatacatgcggtagagcgcgttgcccagcatcgtggtggacaggtgcccgatgtggaaccgcttggcaatgttgatggaggaatagtcgatcacgatggtcttgccccggcccgcgtcgctcgcgccatagcgcccgttggccgcgagcaccgcttccaccaccgtgcgcgcgtagcccgcgcggtcgagataaaagttcagatagcctttcacggcctccacgcgctcaaatccctcggcgggcacccgcgcggccaacgcttccgcgatggctacgggcggcttgcgcagcgatttcgccagcttaaaacagggcagcgcgtaatcgcccatggccgggtcgggcggcaattccaaaagcgcctcgtaatccgcggcgctaagcgcgctctcgccatacgcgtcctgcgccgcctgccacacgcgctgcgcgatcatttgcctgaaatccatcttccgaatccccttctcacaatgatatttgattataccagaaaattcgcgcggtgtaacccggggacggattcatttatcgtaaaaactgcgcgcaacatggccgcgctagaattcgtccacgtcgcgcgaggccgcggcggcgaggagcgcttcgggcgcctgcgcgaaggcgagcttgtcatacgccgccggaggcatcgcctgccgcaaaacgggcaggctctgcgccagatggttttcgcgcgggccgatgcgcgcgtccgtgagcaaggcaaagccgaaatccgtgtacagcttgatggcccggtaactcgagggctgcgtgtgcagatacacggggtattcctccggcgcgagcggcatcagcaaacgcgtgagcagcgcccggccaatgccacgcccctcgtattccctgcgcaccttcagccagtgcagcgtgttcacccgcccgtaggcccgccacaaaaaggccgtgcccacgggcgcgccgcttgcctcgcgcacaaacaggcagcgggcaaagaactccgcctctttcgcggcgtacacgttctgaaaatagcgcgccataaagggcgcgtactgccgcgcttcttcctgcgtgtcaaagggaaagcgcatccaggtttccagttcctcccggcggcacaggtcgaagtgaaagcccgccgggagcggcgcgaacgcttcctcgcggggcgcgcggcacatcataaacaggttatagtccgagatattctgctgttccatgggtttccctcccgccgtttttccccattatagcagacggcgcgcgcggacacaagaaaaatccggaaaacgcgcgaaacgatggcggcgcggaaaaccggcccttgttttcgcggcgaaagcgtggtataatggatgcaaaaatcagggaggcgcatagcatgatagatcccgctgcggaacgcattttgcaggagcgatttggcaaggacagcgtaattgccctggcgactttggaggacggccagcccagcgcgcgcttcgtgaacgcctattacgaaggcggcgcgttttacagcatcacgcacgcgcactcgggcaaaatgcggcaaattgcccaaaatcccgcagtgggcatcgcggcggactggttcaccgcgcacggcgtggcggaaaacctcggctatctcttcgcgccggaaaacgccgccatggcggccaagctgaagctggctttcgcccagtggttcgacaacgggcacaacgattatgccgatcccaacaccatccttttgcgcgtgcgcctcaccgatggcgtgctgctctcgcacggcacgcgttacgcgctggcgttttgaagctgcgcgcagcactccgctttctcagcgcttgtatcgccgaaccaggtggcaagcgct

SEQ ID NO: 2872 - DNA, 10760 bp, Unknown
  16S sequences of unknown bacteria
atatttgtaaagggcaacgccggctaccgcgcgggcattcacatgaaggcctataaggagaaaaaacccattatggtcatcggcgggcgcgcaggcagctttctcggtgaatatcaggccggcggaatcattatcgtcctcggtctcaacaccgacggaaagcccattgtgggcaacttcccctgcaccggaatgcacggcggcaagatgtttttgagaaccgacggaaaggacatttcctttccccgtcaggtatcggtcaaaaaggccgagccctccgaccttgaggaaatcgcccccataatcgaagaatattgcgaggccgtggggctttgcgcaaaggatattttgcagggcgaatttatcgtcgtttcccccgacagcaaaaatccatataaacaaatgtacgttgctaactgagaaaggcaggcagaaaaatgagctacacacccgatgaaataatgcagtatatcgaggaggaggacgtaaagtttatacgtctcgccttttgcgatgttttcggcaagcagaaaaatatttccataatgccggacgaggtcaaaagagcctttgaatacggcattgccatcgacgcttcggcggtcaacggcttcgggggcgaggttcattccgatctgctgcttcatcccgatcccgacaccattgccgtccttccctggcggccggagcacggacgggtggttcgtatgttttgcgacatttcccttcccgacggtcgcgacttttacgccgacggacgaaaaatcctcgaaaatgccataaaggccgccgccgagcagggagtcgaatttttcttcggctcggaaatggaattttatcttttcaaaagagacgaggagggcgagcccacaaaggagccctacgacaaggcgggatatatggacattgcccccgaggacaagggcgaaaacgtcagaagagaaatttgcctgaccctcgaacaaatgggcataaagcccgaaagctcccaccacgaggagggacccggtcagaacgaaattgactttcgctattccgacccgctcagggcggccgaccatgccgtcaccttccgcgccgtggtcaacaccatttcggcgcgcaacggtctttacgccgacttttcgccgaagcccataaaggacaagccgggcaacggaatgcacattaacatttcggcaagagaaagctcgggaaaggacgtgcttccctttgtcattgcgggaatcatgaaccgcatttgcgacataacggtttttctcaacacctcaaaggagtcatacgagcggctgggctttaacaaagcgcccaaatatgtttcctggtcgaccgaaaaccgttccgagcttataagaatccccgccgcgtcaaaaaagtatcgccgtgccgagctgcgttcccccgacccgctgtgcaatccctacatcgcctttgcgctcataatttatgcggggcttgagggcattaaaaacgagaccgagctgcccgaggcctccgacttcaacctttcaaaggcgccgagagaggcggtggaggggcttaaaaccctgccgacaacccttgaaagcgccaaaaagctggcaaagaacagcgaatttatcgcgtcggttctgcccgcggggctttgcgaatgctattttgaataaagaaaacaaaatccgacaaaggagggaagcaaaatggagctgagggaacaggtctacagcctgctcattgtgtcggcggccgaaaaattcaaccgctctctttccgaattgcttcccgaaaacatatattttcccgttaaaaccgtggccgacgtcggctcggcaaagcgggagcttcttgagcgaggctacgaccttgtcataatcaacactccccttcccgacgatttcggaacgcggcttgccgtcgacatctgtcaaggctcgtccacgggagtgcttcttttcgtcaaggccgagcactatcccgacgtcaacgccaaggtcatgccctacggggttctgaccctttcaaagcccacctcggctcagatgattttacagaccctcgtgctgctttgcggcacaagagagcggcttaaattcatggaaaaaaaggcggccaccttagaggacaaaatggaggaaatccgcattgtcaacagggccaaatggctgcttatttccgagcttaaaatgagcgaggaggacgcccacagatacatagaaaaacaggctatggacaggtgcataacaagaagggccatggccgaaagcataattcgcacatataaacagtaacggaggagaacagcatgaccaaatatatttttgtgaccggcggagtggtttcgggactcggaaaaggaatcaccgcggcttccctcggacggcttttaaagtcgagagggcttagggtggccgctcaaaagctcgacccctatataaacgtcgaccccggcacaatgagcccctatcagcacggcgaggtttatgtcaccgaggacggcgccgaaaccgaccttgacctcggacactatgagcgatttatcgacgaggacctcaaccgcttttccaacctcaccaccggaaaggtatactggaacgtgctcaacaaggagcgcaggggcgaatatctcggctccaccgttcaggtcatccctcacattacaaacgaaatcaaggaatttgtctaccgcgtcggcaagcagaccgacgccgacgtcgtcataaccgaaatcggcggcaccatcggcgacatcgagtcccagcccttcctcgaggcggtcagacagatttccctcgaagtgggcagagaaaacagcctctttattcacgtcaccctcgtgcccttcttaagcggttcggacgagcacaagtcaaagcccacccagcactcggtcaaggagctgcagggcatgggcataaaccccaacatcatcgtgctgcgctgcgacgaaccccttgaggagtcgattttcaagaaaatttcccttttctgcaacgtcaagcccgactgcgttatcgaaaacatcacgctgcccattctttatgaggcgccgcttatgcttgaaaaggcgaacttctcctcggtggtgtgcagagagcttaacatcgaggcaaaggaccccgacatggccgaatggacggctcttgtggagcgcatcaaaaaccgcaaaaaagaggttcacatcggccttgtgggcaaatatattcagctgcacgacgcctatctgtcggtggccgaggccatgcgccacgcaggctatgctctcgacacccacatccgtattcattggatagattccgagaatttaagcgagcagaacatcggagaaaagctttgcgggcttgacggcataatcgtcccaggcggcttcggaaacagaggaatcgagggcatgattctttcggcaaaatacgcaagagagacgggacttccctatttcgggatttgtctcggaatgcagatcgccgtcatggaatatgcacgcaacgtctgcggcattgccgacgcaaattccggcgaattcgacgagctttgcaaaaacaaggtcatcgactttatgccgggtcagtcaaacgacatcgacaagggtggaacacttcgactcggcagctatccctgcgacataaagagcggcacaacaatggagcggtgctacaaatcggctcacataaacgagcgccaccgccaccgctatgaattcaacaacgactaccgcgaggtcctggaaaatgccgggctgaccctttcgggtctttcccccgacgggcaccttgtggaaacggtcgagcttaccgaccgtcccttctatgtgggcgttcagttccaccccgaattcaagtcccgtcccaaccgtcctcatccccttttccgcggatttatcgaggcggcgctctcccacgcggaagaataagcttaaaggcagagaaaatctctgccttttttattgttttttgcaaaaaggactttcccaaagccgcgaaatgtggtattatagggtgaaaaagaaaaatctgcttaaacggcagcaacgagtgaaaacaggggtgcatggatttgaaagaatttgacagaaaaatcatactggaggacggaagcgaatatttgggctacggcttcggaagcgactgcgaccgagtgtgcgaaatcgttttcaacacctccatggtgggctatcaggaaatcgtttccgacccgtcatacacctatcaggcggtggtcatgacctatccgctcataggaaactacggcattaccgacgacgatttcgaaagcaaaaacatgaccatcggcgggcttatcgtcagggactataacgatatgccctccaacttcagatatacaaagaccctctccgaacttcttgaggaaaacaacattcccggcatttcgggggtggacacaagaaagctcacgagaagtatccgcgacaagggctcgagacgggtgctcatcaccgacgtttccacctcccttgaggaaggccttaaaatcataagcgacaccgccgttccccacgacgcggtggaaaaggtcagctgcaaaaagcgttggtattcccgcacttcaaacccgaaattcaatgtcgtggccgtcgactgcggcattaagctcaacataatccgctgtctcaacaaattcggctgcaacgtcaccattgtccccttcgacacctcggccgaggaaatcgagttcatgaatcccgacggaatttttctttcaaacggccccggagaccccgaggacgtcaccccggttatcgacatgataaagaaaatgagaggaaagcaccccattttcggcatatgcctcggacatcagatgatttcccttgcctacggcgccaagacctacaagcttaaattcggccaccgcggcggaaaccacccggtcaaaaatctcgagaccggcaaaatcgaaatcacctcccaaaaccacagctatgccgtcgacgacaagtcacttgaaaacaccgacctttctctcacccacataaacctgctcgacaacaccgtcgagggggtcgagtgcaaaaaggacagggttttcagcgttcagtatcaccccgaaagcgctcccggacctcaggacagcacttatcttttcgaaaaattcatcaacatcatgaaggaggaacgggaaaatgcctaagagaacagatattaaaaaggtgcttgtcatcggctcgggccccatcgtcatcggacaggccgccgagtttgactatgccggaacacaggcctgcctcgcccttaaggaagagggctatgaggtcattctcgcaaactccaaccccgcaacgatcatgaccgacacctccattgccgacaaggtttatatggagccgctgacccttgaatatgtcgcccgaatctgccgctatgagcgccccgacgcaatcgtccccggaataggcggccagacgggactcaacctcgccatgcagcttgccaaaaagggcgtgctgcaggaatgtggaattgagctgctcggcaccgacgcaaaaagtatcgagtgcgccgaggaccgcgagcttttcaaggagctttgcgaaagaatcggcgagccggtggtgccctctcagataacatacagcattgaagaggcggttgaggccgcaaacacaataggctatcccgtcattctccgtcccgccttcaccctgggcggaaccggtggcggctttgccaacgacgagcccgagcttcgggaaatgatgaaaaacgcccttgccctctcccccgttcaccaggtgcttgtggaaaagagcataaagggctataaggaaatcgaatatgaggtaatgagggacgcaaacgacaccgccattaccgtttgtaatatggaaaacctcgacccggtgggaattcacaccggcgactcgatagtcgtcgccccgagccagaccctcaccaacaaggaatatcacatgctccgcgacagcgcccttaaaatcatccgcgcgctcgacgtcaagggcggctgcaacgttcagtttgccctcgacccccagtcctttaaatattacgttatcgaagtcaacccccgcgtttcccgctcctccgccctcgcctcaaaggcaagtggataccccattgcaagggtttcggccaaaatcgccgtgggcatgaatctcgacgaaattcagcttgccaacacccccgcctgcttcgagcccacccttgactatgtggtcaccaaaatgccacgtttcccctttgacaagttcaccaccgcctccaatcgcctttccacccagatgaaggccaccggtgaagtcatgagcgtgggaagaacccttgaggaaagcctgcttaaggccattcgctctctcgaaaacagcaaaaaccacatccacatggagaaattcgacagcgaccacatgaccgccgagcagctgctcgactatatcaaggagggcaccgacgaccgtatctatgccatttctcagcttatgtggatgggcgtcgaccattcgagaatatgcaacatcacgcaaatcgatatgttcttccttgacaaaatcaagaacattgtggattttgaaaaggaaatggaggcaaatcccgactcgcccgagcttatgaaggcggcaaagaaaatgggattctccgattcctacattgccgagctgtggcacaccgccgaggacgacatttacgagcgccgcattaaagaaaatcttttccccgtttataagatgatcgacacctgcgccagcgagttcgacagctatgttccttacttctactccacctatgaggaggaaaacgagtcgatagtttccgacaaaaagaagattatcgtgctgggctcgggacccattcgcatcggtcagggcgtggaattcgactattccaccgttcatgccgtgcgcgccattcgcgaggcgggctatgaagccattgtcataaataacaaccccgagaccgtttccaccgactataccaccgccgacaagctctatttcgagccgctgacggtggaagacgttatgaacatcgttcaccttgaaaagccggttggggttatcgccaccctcggcggacagaccgccgtcaaccttgccgacccgctgacaaaacgcggagtcaaaataatcggcaccgactgcgaggcaatcgagcgtgccgaaaaccgcgacgcctttgacgaggtcatcaagtccctcggaattcccaaccccaagggcgaggccgttaccgacatcgaaagcggcgtggccgcggccgagaaaatcggctatcccgtccttgtcagaccctcctttgtgctgggcggacgcgccatggagatagttgccaacgaaaaaatgcttcgccactaccttaaaaacgccgttgaggttgacgttgacaagcccgtgctggtcgacaaataccttgtgggcaaggaggttgaggtcgacgccatttgcgacggaaagcaggttttcatccccggaatcatggagcttgtggagcgcaccggcgttcactcgggcgacagcacaagcgtctatccccccttcagcatttcgcaaaaagttaaagacaccattgccgattataccacacgtctggggctcggcatcggcattgtgggacttttcaacattcagtttatcgtcgacaaggacgaaaacgtattcgtaatcgaggtcaacccccgcgcctcccgctcggttcccttcctttccaaatccaccggcttcggtcttgtcagaatcgccaccaaagccatgctgggcagcgactttgccgcccagggaatcaccgaaatgagaccgaaagacaaggagcggtggtatgtcaaggctcccgcattttccttcgaaaagctgaccggaatggacgcctatctctcccccgaaatgaagtcgacgggcgaggcaatcggctatgacgacaggctcaaccgcgcgctgtacaaggcgcttcaggcctcgggcgttaaaataaaggaatacggcaccgtgcttgtcaccctcgccgacgaggacaaggaggaggctctgccgctggtgagaagattctatcagctgggctttaacatcgaggccaccgtgggcacggcaaacttccttaaaaagcacggcatacgcacaagggtgagaggaaagctcagcgaaggcagcgaggaaattctcgattccatccgcgccggatatgtcagctatataatcaacacccgcgccattctgtcgggcgttcattatgaggacggcgtggccattcgccgctgcgccgtgcaaaacggcgtcaccattttcacctccctcgacacggtgaaaatccttcttgacgtgctggacgaaatgattcccgccatttccacaatctaatttcaaaatttaaacggactgcgaggtttttgcttcacagtccgtttttttatttgttgagaatataaatgaaaaggttgagataaccggcaaaggcaagccaaagcacatagggaatctgaagatacgccgccaagttatccacccttttatagaaaatgacggttatgacgacaagggcgagcagcataaggagccacaaaaaggaaaacagaaaggcgccgctgttaaaaaagaatatgctccagaaaaagttgaaaatcaagctgacggcgaaagcctcaagagagaactttgccgccgagatatttttctctcttttgtcataaatccttgccgccgaaagacccataaggatataaagcgccgtccacacgatcggaaaaaccgcagcgggcggagaaagcggcggcttttcaatgccgtcgaaaagcttcatgtttcccgccgtacaaagggccgaaagcccgcccacgcaaaggcagatgaccgggaacaaaatataagtaagctttctttttgaatttccgctcaaaaaaatcacctccgctttatcttatgaaaaagcggaggttttattcttaaaagatttaaaagctgcagcagattttgattatatcgagagcctcaagcagggtcgggacgggaatgttaagcgcgggaagcagtctcaccttgtcctttgcggtgaggcaaagcacgcccttttccatgcactctctgaccacgtcggcggcgggttttgtggtttttatgccgatcataagacccatgccggtgaccgattcgacgccctttgcaccctcaagggtgtcgaaaatcagcttgcttttttctttgacttccgacagcagctcgtcgtcgattcgagagacaatgttgaccgctccggcgcagcagacgggatttcccccgaaggtggagccgtggtcgccgaaaccgaaaaccttcgacaccttctccgaaagcagcgtcgcgcctatgggaagtccgccgccaagcccctttgccgtggtgacaatgtcgggggttatgccgaaattcatataggcgaaatatttgcccgttctgccgtttccggtctgaacctcgtcgacgataagcagcacgtccttttgagcggtcagctctctcacggcctttacatattcgccgtcaaggggaacaacgccgccctcgccctgtatgcactcgatcatgaccgcggcaacgtcggaattttcaagcttttgcgaaagctcctttgtatctcccgcggcaatgtagtcaaagccgggggtcagcggggcgaaaagctcgtgataatggtcctgacccgtggcggcaagggtggtcagcgttctgccgtggaagctgtttttgagggtcagaatcacgggatttttgacatttttgctgtcgcttgcgtattttctcgccgccttaacggcgcactcattgctctccgccccggaattcgaaaagaaaaccttgctcattccggatttttcgcaaagaagctcggcaagctttgcgcagggttcggtgtaatagaggtttgacatatgctgaaccatggaaagctggtcggtgacggcgtttttccactcgtcgtcggaaatgccgaatgcggtgacgcctatacccgagcccatgtcgatatatcttttgccctctttgtcgaaaaccaccgagccctttccgttgagaatgtcaacgggaaagcggttgtaggtcggggcagtatactgtttatcaagtttttcaagctctgtcattttctttctcccatcaccattgtaccggcgccttcgtcggtcagaatttccataagtatcgaatggggcacacgcccgtccatgataaccacgttttccacgccctttttaagcgccttcacgcagcaatcgaccttgggcaccatgccgcccgaaaccactccctcggccttcagctcttcggcctcgtcaatggtcacgtcgggaatgagggtggaggggtcgtccctatcccgcagaattcccgcaatgtcggtcatcatgataagtcgctcggcctttaaggcgcccgcgataaaggcggcggcggtgtctccgtttatgttaaagctgttgccctgtcggtcgcagccgacggtggaaaccacgggaatatatcccttttccagcaagtcgtttatgggggttatgttgacgttggtgatttttcccacatagccgagccgctcgtccttgatttcggcctcgataagacgtccgtccatgccggaaattcccattgcgcggccgcccttcatttcaagaagattgacaagggttttgttgacctttccggcaagcaccatttgaacgatgtccaccgtttccttgtcggtcacacgaagtccgtcgacaaattcggcctttttgccgagtcttgtcataaggtcgctgatttcggggccgccgccgtgaacaagcaagattttgactccgataagccacag

SEQ ID NO: 2873 - DNA, 7381 bp, Unknown
  16S sequences of unknown bacteria
gcttcgcggcgccctttttttcactcgaaaacaccggcggatgacatttacgtcacccgccggtattcttatttggtcggattatttctcgtcgtcgcagtattccgcgcagaatctgcggagcgcgaccgcgatctccatcctcgcgacaatctgtttcggctcgagctttccttcaatgccgatctcgaagagtctcagcgcctgagcccacttcgcggcttcacgcgcgtattccgatatgacgtcgttgtcctcgtagccgtcgccggttatagtgacgtcgtatccgcgccgcgcggcgaacctgtagagaatcgtcgctaactgctcacgggttatcgagtcgagcgcgccgaaccttccgtctccgtagcccttgaaaatgtcgttctcataagtccacgaaacggcgtcggtgaaccatgtgtcgtccggaacgtcggtgaagtccgcctttccttccggctcggggcttccctccatcctccagaggatgacggcgatcatagcgcgcgtggtcttcgcgaacgggctgaacatatcctctgaagtgccgatgagtatgccgtttccgtacgcgaacatcacgtcgtcatagaaccagtctgactcgtagacgtcgataaacggattcaccacatccgtcacctcacccgggagagccggatgatcggtagtgtcaggcttgtcgggagtgtcaggaatatcgggcgtgtccggagtatccggctcctcagtccccgcctccgcgagccagcccgcgtaaacggtggtatcggagttcaggtcgaccgatgtaacctttccggtcagcgaagaatccgcgtaccagcctgtgaagatatatccgtccttagtcgggacatatccggagaggtcgatcctcgttcccctgagctttctcagtgtttcgatctcacttccgccgtttgtctcgaacgagaggctgtggaagatcagcattatgaacccgccgtcgctctcgggagtgatctcaatcgtgtagtttctcgaggtcttaccgtcggcggacgtgatcgtgataagcacggtcatatccgtgtatccggtcgagatctggaacataccgttctcagccgttgtgccgttgaccttcacggtcgcgccggaactctccggaatcactgtcagcagatatctgccttcaggaaccttgctcagtatcgccctgtcgttctcatcgaagttgtcgagcgagagcggcataccgtctatcgtgatgctcttcgcgtccgcgttacccgtgtcggacgagccctcggcaaatctgactacgacgcggcttccggaaccgttgaaggtaacgggaatcacgcgcgtttcctcgccgctgagctgaacgttcccgaggtctttcgtctcgataagcccgccgtcagcgccgaggagcgccgcgatgagccgtccgccggactgcgctttcagggaattgttgcgtacagctatcttcgccgtcgtggcgttcccgctgttgtcgagctcgaccgagagggtcacggggtcgccggtgagatgagtgttgaaagtgagtgtcttctggttattgagtgtgtcggcttcggggagggtgatccactttccgtcgacatactgctcgatgcgcgccttcacgaagagattcacaccggaatccggtatctcgtcgagcttcgcgtcgctgacgtattttccgatatcgaacaccgtcttcttcgcgtatccgtcgccgtcgatggcactcagcgcgtctccggagatgatgacctcatacgccttgtcggtctcgccgccctcgaaatacttcccgttgaccggagtctcgcaggacggatcggaatagacgccgagaaccacgcgcctgttaaccttcgcaagcaacgccgccgactggttgtacagtgtcgtcaggaactcgcgtttaccgtccgcctcaccggtgacgcgcactgacgagattccgacgtccggatagtcgagatagatctttccgtcgagataatcgctgtcgtcattctcattcaagaagtgtgccgttatcgtatagtcaagatccatgatgaccgttcccgtcttcgcgacagccgacaggacagtgctctttccgggagcaaccgagagattatcgaaggtctgattgtcagaaccgacgatgcggaccgttacactgtcgatagtgtcgataccctgattctccaccgtgaagctgaccggaatgtacgagtccgccgcgagagtcgtgaagtcgacgtatatgtcggtgactccaaccttgttctcgtagaacgcgttcgaggagtagatcgagacggtctccttcggaatccttccggttccggtctgtgtctttccgttaatttcatactcgaagctgatattgtcgaatttcgtcgtgctgtaggtgacggcgttcatgaccattcctacggtcattccgtccgggtcggtgtacgcgtcgaagtgaccggtcgaggtatttgccggaagaaccgccgcctcagtcggcgcggagagcgcgcagccatttccgctcttcacgaacttcaccatacgaacgatatcattgctgtcatttcccgcgccggagttgttgtaaacaaccgagacgccgtcaagtccggtcgcgccgtctgtaagagcgaaccgcccatcgaacttcgcggtatcaaccgaacttccgagggtttccggcacatcgccgaccggcgagccgttcttgtcaaacacacggagcccgacgtcatgcgtcgaagtcccggagacgtcctcgctcctgtgccagccgaggacgaaatattcgcccgcggtcgtgagttcgggagactcgtcggtgacgctgttcgtcgtcgctcttatcgtcttgcagctgttctcgatgtcagaggcgtttatgtcaacgatcatgtagtagacttcgctgtcgtctccgtttccgaccgagaacgcgagtgacgccgtgccgtcgtcaagcatttccgccgcgagaccggtgacgcttccgttgctgccgttgtagagcgtgtaggtctcatcgctccacttgcttccgtcgtaaatcctgcaaagtatgcggtcctgctcgaactcgtagaggctctcgccgctctgaaccgagcgccatgccgctatcgccttattcccgttcaccgcgatgaccggaaggagttcctgcgtgccgttgtttgtcagtcttgttgtcgtccagcttgcggtatcgccgttccagatcgacgccatgacctcgagaccgtttaagagagccgcctgctgttcaactgtgacctcgcttcccgccttgagcccgagagtagcgctctcgcggagccataccgcgcccgcgaagctatagtctccgtcaagatcgggcgagctgtcgccgtaaccggagaagtcgtccgagccgttgggtatcggtttccgattctgatatccggtcagtgtgccgccggtcatatattctattcttgtagctgtaacatcctcgctttcaccgtcgtctgtcagcacaagtatcgaaccatcgtctgaaatcagctgctcgccgtacggataagcgttgtccgcgatacagtcgagcccaccgttatttccgcgcaccgagaacagcgagatgccgccggtgttccattcccttctgccgccgtcgaggtaatcgcggctctggagcctcgtcacaggctctccgacaaggatttccggttcgtaatagttcgccgcgcggatcatcatccgtccttccggctgaccttccatccatccggtggtgccgagcccgctcgacgcctcgttccagtacttatagatttcgtcccagtcgttgaatctccagttggtgctgtatccgagcgatatgagcgttatctcggtgacaagcggtccgacgccgagcgccgccttgattcccgcctcgccgtcaagctggaggtactgacccttgagatttctctcgtctggattcttcaggtactttctcgttaagaacctgttctcgttgtttatctcaatcgtgccgaaaactccgatcttcgcggtgaagcccttgtcgtagccgagaccgccgaagaactcgagatacgcgtttattctgagcgcggtgaggtagtcgttgaccgcgcgcgccgtctcgtcgctccactcgagcccgagctgctccgcgtatctgacggcggcctcgaagccgaccgttatgccgccgcgaaccttgaagctcgccgtgatcggtatcttcttcgcgttgaacaccttctcgtactcgagctgaccgcccgcggtgaagccgccgccggtcgtgatgacttcccactcgcccttgtcgaagttgtagcggatttcggtgttaagccatccttcgagaatgagcattatcggcattccgatagcgctgctgaccgcgccgtagagcgagctgcggtcgtcaaagtacgagccgtccgccatagcctgaaaatcgctgagctggaaggtgtcgttcacctgcccgaggaagctgtcggtgttctgaccgaaatacgagggctcaagcgatatgccgtggtcgtcgtagttcagatcctcgagctttgtcgtgttgattcccgtccagagataacctgtgtatctcgtcggatcctcggtcggcagcagcaccgcctttacaagccccgcttccgcgccaagctctgacaggaaggtgagcgcgtcgttcatgatagcgtcggagaccacgttcgcgtacttgtactcggtatccgcgccgccgacgcgtccgtatatgccgatattcgccatgagagacagcagggacggtgagtcctcaaccttctcgatagcgttcatgtcgacaagaccgaacgacagcgggagagtgcgcgtgagagtgccgtcgccgccgtagagcgcgatctccatcggcgtcttcctctccgccctgtagtagatgaagctgtccgaatcgatcaccgcgctgttcgtcacgagcggtatcgaggaaaacggataggacgaatccctgaccgtcatcttcgtctgaccggacatagacacggcgttctcctgagagcgcagatcagccgaataaccggtgtcgttcattgaaacgccgtccacgccccagagcatgaccgtgttctcgagcttcgccgccgggtagttggagctcggaccgacgacgccggtgtggtatctgacgctcatcttgcgcccggtgaagtaatccaccgtggcggaggcgatgaacggcttctccccgtccgccgccacaagagtgatgatattctcgccggaacgcatcgtgtcgcggacagaaaggcttccgttcacggtgacaagctcgggataataggttccgtcggcaaagcgcacctcaaagatgaatttcagcgtgtcgccgacgccgaccggatcgggatcgttccggctcgtgaactgctcaagatccatatggactctgagcacaccgttcttgtcagttctgaaaaccatgtcctgtctgccgtcgaggttcgcggtctcgccagccgtgcgcgcgaatctcgcgctctcgcagtaggcgtcgtcgcggtactctgcgaagacgtcgttgcggtagacgccgccgcggagggtcacctctgtattcgcgagcgccgttccgtccggcttcaggagggtgatctcagccgtcgcggcaaggcgcagggaaagcgcgttcagcgggtagagctcgcccttcgtcccgtcgccctctccgctcttcagcgagatatttgagaacgttccgcgataagaggttccgtcgtcagagacgctcgcgcacctgatttccgacgcgattctgtccggctcatatagcgcgagcgagccgtcgtcgttcgagtaaacggtgtgcgtgacgccgagactgtcctcataggatatctcggtcttcaccgccggtgtgaactggaagagatagagctgatccttcagcctgttcacattgaccagaacgcggtcggaaagcccatcgagcgacgcgtgcgaagccgtgacgatattcgtcccgtcccgcagtccgcagagcatcatgacgatctgcggtatgtagctcgtgtaggagaacctttcgagcggctcaaagacgctgccgcggcggtagttgaccgtgacggctctgtcgagctcgcttgtgatttccgcgccctgaccggtggtcgtgctccacctgatcgagtcgttcagcgtgctccagtcgtagtctgagtagtttatgctgatggtctcgagcagtccgagctcgcttctgagcttcgctatagcgtaagcgctcgtgagaccgtcgaaggtctcgccgtcgtgattgacaacagtcggagcggtgctcgtcgcggtgtcggtgatcgtgttttcaagcgtcgtctcgtcgacagactgcccgccgacaagaatttcaagcgcgccgtccttgtatacgacgatcgtacaggacgcggtgctccatgtcgggtcggagctgttcttcgccttcgcggtcacgatgtagtagtctttgagcttcgcgggagtttccggcttgaaagcgatgctgccggaatatttctgcccgtcgccgttcccggcgttgtccgtctgcgcgatgacttttccgtccttttcaatggcgagcgagaactcgcaggtgttcgggttgttttcaaggtctaagttctcgatgatccagccgaaggatatctcgctccccgcgacaaactgcgggttatcgagtccgacgagagttatcgccgcgggcttcgagcggacgattatcttcgcggaagtactgagcggaatatctttcccgtcgaccgtggcgacagccgagagattcagcgtataagccgccgtatctccgcgcgatatctccgtgagaacgcttccgggaacagtcagcgaggtcgcggtgcgctcaagttcagccgtccagacgatatttccggcggagtccttgagcgtagcggtaatctttccgtccttcagctcataattgccgaggttcgacgcgaagttcagcttctgatcattgccctgtctcgcgaaaacggtgttcgctccggtcgggaacagaaggctcggtctgccgccgtccttgacggtgacggtgatcttgttcgacgcttcagtgtgcgtcttcgtgtcgtcactgccgttcttcgccatgagataaatctcggcggttccgaccttattcgcgatgatggcgacgctcggtgaggacgcgagcgtcaggttgtcctcacccaccgcggtggtatacagtgatataacattcggattagagcagacccagtagaactggtcaggatcggagaacgaaatttccgtattgtttgatttcgcgtttatcgtcgcggtggcgatgtcgtcgatgaacacggtattgtccgtgccggacggccagttttcgcat

SEQ ID NO: 2874 - DNA, 25927 bp, Unknown
  16S sequences of unknown bacteria
cgggtgtcctcgtcgccgccggcgtcgtccttctggtgctctggaagctgaaaaagctgccctggatcaaggaataggtatctacgggttaaaaaaacagcccccttttgggacgtttcgtcccgaaagggggctgtttctgcctgaatcaggtttcgaccggcggaatcctcaggatggaggatcagaacatcgggacagcggtctccccgaattcatcgacgatgaactggcgtaccgtgtcggaggtcagagcttccaccagggccgtggtcttcgcggaagattcctgtccctccttcacggcgacgatgttgccgtattttgtggaggagtcctccttgaccagtaccttgtcggtgacgccggcggatatggcgtagttgccgttggcgacggcaaaatccacgtcctgcagggtgcgcggcacctgggcggcttcggtttcaacgatccggatttgatggggattgtccgcgatgtcgttcttggtggcggtgagccccgccccctccttgagtttgatcaggccgattttttccagaagctgcagggcgcgggcctcattggtggtatcgctgggcacggcaatctgcgcgccggaggggatgctgtcgagcgaggcgctcttgccggcgtaaacgcccatcggctcataatggatgttggctacggccaccagatgggtgccgttttcctgattgaaatccagcagatagggttcgtgctggaagaagttggcatccagagagccttcctccaaggcgttgttgggcagtacataatcggaaaattcctggataacgagggtgtagcccttttccttgagcagcggctcggcggctttgaggatctgggcgtggggggcgggggaggcgccgacccggatggttttgtcgtcctgtttggcgccgcaggcggacagggaaaggagcagcagggccgcggccgcagcaatgaggatgcgtttcaggtttttcatgggatatccctctttcttgttttaataggattgttcgtctcttctcagtggttgcgtttgtcgatggcggacgccagcaggccgaaggcgaactggattaactggacgatgatcacgagcagaatgatggtgacgatcatcacatcctgctgataccgctggtatccataccggatggcgatatccccgagcccgccgcctccgaccgtgccggccatagcggagtaaccgatcagggtgatggtggagatggaggtgccccggatcagggaagggacggattcggggagcaggaccttccacacgatctgccagccggtggcgcccatggtctgcgcggcctccaccactttggcgtccacctccttgagggaggtttccaccatccgggcgacaaagggcgcggcgccgatgaccagggggacaatggcggccgtcgggccgatggaggtgccggtgatcagccgggtgaaggggatcagggccacgatcagaatgatgaaggggatggagcggccgatgttgatgatccagcccaggacggaattgagcacgggatggggccggatgccgcctttggcggtcacgatcatcagcacacccaggggaaggccgatgagataggcgaacagggcggaggcagcggtcatgtacagggtggcaccagtgccctcgagcagcatcatgccgtatttgtcccacagacccgacagggtttcaatcatgtctcatcgtctcctttcatccccaacagcattcgtgtcatccggctttgcggtgcggcgaagatggttttagtgtcgccgcattcggcaatacggccctcgtcgatgaccgcgacccggttgcagatggatttgaccaccccgatctcgtgggtgatgatcaccaccgttacccccagccgccggttgatgtcgcacaggaggtcgagaatagcgccggtcgtcatagcgtccaaggccgaggtgggttcgtcgcacaggaggattttggggttgctggcgagggcgcgcgcgatggcgacccgttgcttctgtccgcccgagagctgggaggggtaggcgccggccttatcggagagaccgacaagacggagcagttcctccacccgttcccggatctccggtttggggcggcggccgatttcgagagggaacgcgacgttgcgccggaccgtgcgctgcatcaggaggttatagccctggaaaatgacgccgacctccttgcggtgggcgatcgccgcccggcctttcaggctgcggatatcgacaccctcaatggaaatccggccttcggtcggggtttccagcatggcgatgcaccgcagcagggtactctttccggccccactcatgccgatgatgccgaagatatcgccgggcgcgatgtccaggctgacgtcccgcaaagcggccacatcgccgccggaggggaaaatcttggtcaggtgttcgatgcgaatggcgggttccataggatcacggcctttcttgagtcgatgtgacaggcgggacggacgagcgctccggcaatcccgcgggattcgccggcatgatacgggtgcctttttgaattttcggccggtattccgcctcttcggacggcggccgggcggcagcaggacggcccaaggggagaggagccgccattcgccgccggctggagatttgataagggacaggaacaaaaaggcccccgccgccgaacggcataggtttcaccatgccgttcggggacgagagccacgcttcgtgttaccaccccggtttatccctacctcgcggtatgggacctcatctgctgcgggcaggccctgcctgccgatagcatagcgcggtaacgggcgcccccgtcacggctttggcgccgggttttcccgggctttggccgtgcgactccgagaccatgttcagcggcgttgtcattgcccgttcgcagctgcccgggctctctggaaatgacgcagaggcttactcttctcatccaagtctgtgacactatcgatttagccgcattatacacacgttttgcggtttcgtcaagagggttttgaaaatttccgggattttcatctcccgcgggggacggagacggacagcgggaacgtacggatttcaggaggaatctaggaaattgccaaaaaaagcttcctttttcagcaaaatatgctataatagcaccaaacttttgtttttttcggcataaaaacaggggttgatgttggagaggggggacggcatgtctgcgggccgacgtggtcaaaaatgagggcgcccgggtgtgcttcgaattcaacaagcgcgacatgagcgccgcggagctgatcgccgatctgtccggccaggtgaaaattcggaatttgtccctggaagaacccgacatcgaggatattatcaaaaccatttaccacagcggtgaggaatagggaaatgccggcctgccggtcgtatgggaaagaattccgatgccggtgggatcccggccggggcggaccccgcttaaaaggtcttttatctggggcggcaattgtgttataatagtatggccgctaaaagccctagggacgccgccccttatggtatggacgccgattcgggcaatgccgcctgagccggtgttcaaaaaaggctcccggccctggagcgcgccggtatttatactcgccaggagccggcccggggttcttttcaggaaagccggcgggaacgcggacttcaaactggcgagtatggcataagggctttgtatccggggatttggctggacataaccccataggttccgtatcataccatatacacggcccgggtcgggatacgcaaggagggaaaggcggatggctttcgtacatctgcatgtacacagcgaatatagcctgctcgacggtgcctgccgccttccggggctggtgcagcgggcggccgcgttggggcaggaggccgtggccgtgaccgatcacggcgtcatgtacggcctggtggagttttataaagaggcgaagaaagccggtatcaagccgatcctcggctgcgaggcgtatgtggcggcccgcacacggttcgacaaggttcacggcacggacagcgagaacgcccatttggtgttgctgtgtgagaatgagacggggtaccacaatctcgtcaagatgatctccgccgcctggaccgagggcttctacggcaggccccgtgtggatcgggagctgctgcaggaataccatgaggggctcatcgccctgtcggcctgtctggccggggagatcccccgggcgctgacccagggagactatgaccgggccaaacggatcgcgttggaataccgcgacatattcgggccggagaacttcttcctggagctccaggaccacgggctggaggagcagcgtgccatcagcccgcagatcgtgcgtttgtcccgggagacgggcatcccgctcgtctgcaccaacgacgcccactacctctccaaagaggacgcccggatgcagaaggtccttatctgcatccagaccaacaccacggtggacgagcccaatcccatggcctttgagacggaggaattctacctcaaaccggaggaggagatgcgggcgctgtttcccgaactccccgaggcattcgacaacactgtccggatcgcggagcgctgccgggtcgagctgaccttcggccagacccagctcccccggttcgacgcccccgggggggacagcgccgcctatttccggcagcgctgctatgaggggctgcgccggcattacggcgaacatcccgatcccgcggtcacggagcggctggaatacgagcttgccaccatcgagcagatgggatacgtggattattacctgatcgtccatgattttgtccagtacgccaaggaccacgatatcccggtggggccggggcggggctcgggggccgggagcctgtgcgcctattgcatcggcatcaccggcatcgaccccatcaaatacaacctgctgttcgaacggttcctcaaccccgaacgggtgagtatgcccgatttcgacatcgatttctgcaacgagaagcggcagcaggtcatcgactacgttatcggcaaatacggatccgaccacgtggcccaaatcgtcaccttcggaaccctggcagcgagggccgccatccgggatgtggccagggctttgggcctgccctacgccctggcggatacagtggccaaatcggttccctgggagctgaatatgacgctggaccgggccctgtccctgtccaaaaaactgcgggagcaatatgagggcgatcctcaggtccgggaactcatcgagatggcccgcaaggtggaggggatgccgcggcacgcgtccacccatgccgccggggtggtcatcaccgcgaagccggtgagcgagtatgtgcccctctgcctcaacggggattccgtcgccacccagtataccatggggatcctggaggaactgggtctcttgaaaatggattttctcggcctgcgcaatctgaccgtcatcgccgacgcggtggagatgatccgccgacgtgaacccgggttttccatcgaggatatcccccaggatgccccggaggtctaccggatgatgtcccaggccaacagcgacggggtgttccagtatgaatcccccggcatgaagcgggtgctgctgcagctcaggcccgaccggtttgaggatctggtcgcggtcacggccctgttccgtccgggcccgatggattcgattccgaaatatatccataaccgtcaccatccggaagaggtgcggtatctccacccgtccctggagccgattctgaacgtgacctacggctgtatcgtgtatcaagagcaggtcatgcagattttccgtgagctcgcggggtattccttcggccgggccgatgtggtccgccgggccatgtccaagaaaaaacacgatgtgatggaacgggagcgggcgatcttcctccacggcctgaccgatgaggacgggacggtggtggtggagggttgcgaacgccgcggcattcccgaaaatgtggcggtcgcagtcttcgacgatatggcctctttcgcgtcttacgcgttcaataaatcccatgctgccgcctatgcgacggtatcctatcagaccgcttatctgaaatgcttttatccccgggaatatatggccgccctgctgaccagcgtgttcgattcgggcaaggtggcgggatacatcggggaatgcgaccggctgcatatcccggtgctgcctccctcggtcaacgagagcgtgtcggccttcaccgtggcgggggatcatatccgcttcgggctgctggcggtcaaaaatctcgggcggggcctgattacggaactggtaaaggagcgggaggaaaacgggcccttccgcagcttttacgatttctgccgccggatgaccctttaccgggagttcaaccggcgggccctggagagcctgatcaaatgcggttctctcgacggcctgggcgccaaccggcgccagatgctggaatcctccgacacggtgctccagattctggacgatcagaaccgccggaatctggcgggacagctcgggtttttcgacgatcccgacaatgccgctatgggagaacccgtcctgccggagctgcccgaagccccttatgacgagcttctggccatggaaaaagaggtctccggcatgtatctgaccggaaacccgatgaaaccctatactgccctccacgagcggatgaaggccgcccggaccgaccggatcgcggcgtcctttgaagaggggatgggggaggggccggccgagtacgcagacggggatacggtcctgctgctggggatgctctcgtccgtccatgtcaaatccactaaaagcaacgcgcagatggcgtatgcgacgctggaagacatggcgggctccatcgagctggtgatcttccccaaagccctggcccagtgcgggcatctgcttcaggctggccgggtggtggtggcgcggggccggatcaatgtccgggaagacgaggatccgaagatcctcgtgagccgcctggatgaggcccctccgcccgatgccctgccccgtccgattcccgggctttcagggaacccgtctccacccgcggctccttccgcagcgcccgtccgggcgccggacggccgccggctcccttccgcccggcacggcctgtatctgcgggtgccgtcgtccgaatctccggagtggaaacgggcgcagctggtggtgcgggtgttcgacggcgaggagccgctctacctccgctatgcggattccgggaaattggtgagggctccccatgccctttgggtgaacgttaacgatgtgatgataggcgagctgagggcgatattgggcaaggaaaatgtcgcggtggtggactaaccggacagaattggtgaaatgaaccggattttggcattttccggggcatttatcggtaaaatccagtcttgcacagcgggcggcgggtagtgtataatgagtacattatggaaagcggcaggggccgcgggaaataaggagagagataccgatgtctatcaaaaaactcgcggtactgaccagcggcggggacgctccgggcatgaatgccgccgtgcgggccgttgtccgtaccgctttgagcaagggtgtgcaggtgtatggcgtgtaccgtgggtacaacggcctgatcaacggggaccttgtggagatggatctgcgcagcgtgtcggacatcatccatcggggcggcaccatgctgtataccgcccgtagccccgagttctgcaccgaagaggggatgcagaaagcggtggctacctgccggcagtacggcattgaggggctggtagtcatcggcggcgacggctctttccgcggcgccaaggatctgacccagcgggggattccctgtgtcggcctgcccggcaccatcgacaacgatatctcctgctgtgagcaaaccatcggatatgacacggccctcaacaccagcctcgaaatgatcgataaattgcgcgacaccgcccagtcccatgatcgctgcagcgtcgtggaggtgatgggccgccgggcggggtatctcgcgctcaacgtggggatcgccaccggcgccaccagcatcctggtaccggaggtcccgtatgatttcgaccgggatatcgtggagcggatgattagaatctcggccaccggcaaaaagcattttatcatcgtagtggcggaaggcgtcggccatgtcatggagcttgccgcccggatcgaagagtccaccgggttcgagacccgcgcgaccattctcggtcatgtgcagcgcggaggcagcccgacggtgcgggaccgcgttattgcaagccggatggggtatcatgcggtggagctgctcctcgatggaaagagcaaccgtgtggtcagcatcaaagatgaccacctcgtcgattatgatatcgaagaggccctgcagatgaaaaagcccttcgatttcgagctgtaccggattgctcatgaaatctcgatctgatataggcggatcccccttacacaaaacacatatgacgataggtacagatatcatactattacagggcgaaagcactcgttgctttcgccctctttggctgttgatatggttggctctgcttgtgaaattcccatttgttgtaggaaaaacgcccctataagatatgaactatttatctgcctaagaaatgtgataaaatatgaaaaacattttgtatgattagaggtgaacgaattggtatttaacacatcaatggaaatactgcttaaaaatgttcgtttgcaggatgttcgccccaaagatataggatttatctggatgaaacatagtccatggggtaaatattggggtataggagatttttggggattggaccagttgatacaaacatcagactatgacttaatggatttagagtggcagggaaatgaattatatatcaatgataccaccgatgtttcaaaattgcttttaagcggattggaaaccatggctacttggaaaaaacaaatggaaacagactactctgaaacgccttttgacattattctttcgcttgatgagggcgatgaagatgttccgccgtctattactcttcggttttgggcagtgcgaaatcatagtcattatataataccggcgatcgctgaattagatggtttttcgcaacccgttttaatggaacaagtgaattacgagttataataacgcagacagtggttatagcggtactgcggaaaaatttgtgtaaaggcagattggtcacgggcgtaaaccaggggatcatagtattgaatcagtccacaaaatgctgttgtccggacgacctttatgttcattccccttctgcataaaaatcaactatagtttcatacaaagatagcatgtcattattatccccaagcttgtaaactggtatatgaaaccgctgtataaatctgtcctgaatagataaaaattgattatttggtagtatttttttactgtgaaaagcttttattccagtattttgtaaatccataaatattaaatggagaaaagttgggacattgctatggatgtcctgataactgcaaaaaaggtttttttcaaaaatcaagccggcctttcagacgttttcgtatatataatcaaaaagtaatccctcgcgctgccgcgggggattttactttccggctgtccgtttccgtctgcggatcgggacagacaatagcaggatacagagccccgctacccccagcgcgcacatggcggtgaacagggtacggcctgttccaggattttgactggcgggtgtctccagcgtgctttccaccgtcagatggacggatacggtttcgctgctgctgtttcgcccggcccgaatgagagcaccggaaccgtcgccggagggatcatagcgatataggataggcgccggacatagataccgaagggtcaggacgccggatgggaccggcccatccgaggcgaggataaagcgggagccggccgccgccggcgaggaaatgggggtaccctcctccgataggacgcggatgtgcgctggaaggccggaaaagtccaaggagccgaacggcaggatgttgctttgaatcacatcggtgcggaactcctgttccgtctgtgtgaaccggactgtatccggagacaggtccagccggctcagcgccggcgcagcctcctgtccggcggcgagcagtgcgtgcagataggcggtttgttccggcgtcagatcgggtgattcgtatccatcgtcctgaccggtcaggatccataaggcctgctgcgtcagccggtaggcttcggcgtcggtcaggccgtattgctgctttgctcctccgatattgaagggatagcccgagcccagcagggccagtacctgttcctcccgcacgggaaggggctgtgtgtcttcaagaccggtatagcgacgataggatcccagcggcccggatggagcgtgttccggacgataaaggaaataagcaggacctccgtcgatcaggacttgtgccgtttcggagccgcctgacgctgtgtaggcggccgtgtatagctggccgctgccggagcagactggcggtgaaaaaagaaaaacggccaggatgatgccgcataatggcaatttgagccgcgtgttcatgataatccgctcctttcacgtcggtatcgtgcgcctgcttgttttcgttagtatatgcggggcgatgtttgattctggtgaaaaaatttgtaaaaaggcgaaaatatacggcttgtcagacaaagaaaacgggtttataataaaacaacgatttaaaaaagaggagggcgcccatgaaatgcatcgatatcacccgggaactgctcgggtcacctgtatatccgggcgatccggctccacgtatggaagagctgcgccgtatccggctcggggacgaatgcaatgtgtccgcattgtacgcctgtctgcataacgggacccatctcgacgcaccgcggcattttatgccggatgggcagacgattgacgagctgcctttaacggcctgtataggggaatgcagcgtggtggagggagaagggctcctcctcggcgcccaggcggaggagatgctgccgaaactcaaaaagcgcatcttgttcaaagggcgggtccagatcagcccaagcgccgcgttcgtgttgtccgatgcggggcttgagcttttgggtgtcgaagcgcagtcggtatccccgccggaatgtacggccgcggtccatcgccagctgcttggggcgggcatgctccttctcgaggggctggatctctcgaaggcggcaccgggcacctattttctgttcgccgcccctctgaaaatcgcgggggcggacggcgccccggtgagggccatactcctagagcgggaagggatcgactggcgggaggatctgtggaaataagcggtacaatgagaaaggacagcctaatggacgtgttgtgtctgacggcgctgcgggactgcccggaccgcctggacgaagccgcctgctggttccacgaaaagtgggggattcctgcggaggtgtaccgggacagtatccggcagggaatccggcaaaaggccggaatcccccaatggtatatcgtgcaaaaggaagaaggggagatcgtggcaggtgtcggcttgatcgatcatgatgatcacagccgtcgcgacctgactcccaatgtttgtgcgctgtatgtggaagaacattaccggaggcggggaatcgcccggttgcttctggaccatgtgaaaaaggaagcggcggagatggggaccggaaccctatatctggttacggatcataccgcattttatgaaacgtgcggatggcattttctgaccatggcagaggatgaagaggggaaccccatacggttgtatgccgcgcagacaggggaatgaaaaaaatcggctttcgtccgcttctggcggtgaaagccgattttttgcgctttggattcggtagggagccacctggatcggtctgctctggaaatataaacgcgcgccgcgcggccggatggcaccggctaccgcgagccgcggcggaagattttgtttttgactgtccggagcaaatggaacagagcttcgtctttggttgcgagcaggacggtaccgtagaagacggcgcaaacgccgaccgagatcacgacgatagtgaaaaaacgcatgtcgtagcggaactgcagcccgccgaaccggttgatcaggatcacgatcggatagaagcatagggcggtgagcagatatttcagggtgtgccagtcgaaaacgcgaatggatttgccgaagttcagacgcacacatcgccactgaagcaggacgagcacgatctcggagacaatggtggtcaggatcatccattcggggcgcacctgacggaatacgaccagcaggctgttgagcagcaggttgaccgcccctcctgtaaaatagatgcgggtgagcagggactccttgccgtggacaaaaatcacctggttggccagcacgatatcgcacagccacagcaggcagcggacgccgaaaatggcgagcgtgaggccggccggcagataggcctcgtttccgtaaataaacatgatgggatatgccatgacgctgatcccgatcgacatggggattcccaacatgaaaaaggtgcgggaggaggaatgcagcagcctgtgatagtcttcctgccggttttcccccagataagcggccaggcgcggaatcgtcgccagtacaattgcgttgatgacgttggtgatgagctgcgtgatggtcagcgagaaggtgtaaaaggaggtgtacgcgggagtatccttggcaaatacggacaaaaacaaccggtccagcgtggtgtagaacatgctggcgttggtcagcaggagcatgaccagcagaggcttgatcagtccggtcagatcccgtttgccgatccggcggaaccgtaccttgcgtttgacataggcaaagctgcacaggttgttgaccagaaggacgagggaggcaatgaaggtatagggcaggatgtctccggacttacggacgaatataaaaatgctgatgacatacagtacgcggataatgagcgttttatagaggatgaacccgtaattttcaaatgcctcgttcatccactccacgaggaaggcactggcaaccagctgaatggagagcaagagataaagcgggaccagggcggccgacgggacgaacagcgcgtagagcagataaacgccggtcacgagcgtggtgctgatcacccccatggtgaacagggaggtgaaaagggtttccagacggactgggtcttttttggcctggctgatgacccggatcccgtaattgtatattcccaacgaggcaaaagggataaaccagctgatgagagcgaacgcacggttgtactggccatagagttcgacatcgaggacgtgtgccagataggggccggtgatgagcggcaggacgacattgaggatattgagcgccatcttggccatcatatttttggtgacggatttcgacatttacatccctgcctttttcggcggaccgatatattccgcgtaaacctgaatcgaaacccgaacaccgtcagacacggcgtgttggtccggattcgggatggggcaattaccgttttgcgcatgaatgggccgcacggtaccgataaaagggtcttagagaggattcgcggggactatcatcgggcggcctcggcgcatatgacgggatactgctaaaagaatgcccagaaattatacgcatcaacaagctgaatgccggccatgaaggctgtggggggaatgagcagggacagaaacaaataccggctgcgtttttccgtgcaggcgaaaaaatcggcaaacaaaggaaagccagcgaacaacagaaaactgacgcaacggtcgaacagaagcgggataaaaaccgaccccaggatcaggagcatggatatttcaaggaacgcataatatcgctgtttgtcggcgatggcctgccggttgtgtttgtggaccatgccgtacatgaacaacatcaacgcgaataacaggaaacgcagcacaaccttgcgcatgtcaaactccatatacagaaaatacacttggattttggctccgatcttctgtacgatgccgataggaacaagggtgagcagacgcgccgcaaggccggagatgagcccccagccgacaagaacatatttccagcgccgcacatagccatacaggcgccgggagcataatacgcggatgagcaaaaagaacgccagggaaaaatgcgtaaaggtagccgtcagataaagcacccagttcagcggtccctgttttttcagcgcgaattcccgtatgatcgcataggcgaagagggcgaaagccagataattccggatgccggagagcgtccagcggaaaaacaggaaggagaaatgcacgatcaggaagaaaaggagggaatagggagacgtcttataccgattctgtatctgatacagcgaggcgaacagcaacgaataaatgatcgcgatggacagggccgggaggagctgaaagacccccgtccaggcaatcagataaaaatacaaattgacaacgacgtcagatgcataaatggactccgtcaaggtccaacgcagcccattctggcgcatctcctgcaacagctgataataaaatgtcaggtcgtcgtccttatacggtttggtgaaaaaggcgatgatggacagcgagaggatgaagccgaacgtcagggcatacagttgtgtggccttgatgcgcacgttcttgcacgcggcgacaatatagatgaggacaaaagcggccacgtagatcgttgaaacggctgttataaagttcaatcgctcacatccctcatatatagagcacacgcggttcggaaaaaacgcttatatggatcaaacgaggatgaccccgagaatgtcggtcttttcccccataatggaacaggcttcccgtatcgaggaaaccgacgattttttcagagcctccacaaaaatcgtctcccggcatacctggagaagggggcggcttctttcctgtgaaaggatttcatcacagggatgaaagacaaacgcgcaggccgcgtccttgccgccgtcgacgcaggctgtgtggcccatggccttcagccgctcgaccagcagggagcagcagcgcgccggttccccggaacgaagggtgctgaccacggcgatatgccggggcgtgtcgccgcccagatgaagcagggtcccggcgatattgtctacggcttccgcggtggaacagggcggttcatatacgccgtccaggcggtctatccaacggtcgatacaattcaacatgtcgataactcaattcctttctagagaccggggagttatgccggtcccggcgaagccggaaaggcacaaaacccgtttgaaagtaaggcggtgcctttctttcaaactatttgcccttcgtctgtttcttcgacagagatcccagaactttcaggcccaaatcctttttgagctgaccggcgtgacgcagccggggatccatgatgtccagcaaaaacgtcagcaaaaacgcgatgagcagcccggcggcgccgccgagtatgccgtatttgatacaggaggagacgctgaaactccctgtgaccggcgcggtccgcagctgctcctggaccgcggtcagtgccgtctgcagattggccagctgggtttccgcctcgctgcgccggagcagactttcatccgtataggtcccgtaaaccgattcgcccattttttccagggtgtaggcggatgagaaggcgccggacttggagaaggtgctcgtcaccgtctgataggccgcgtcggctatggccttggccccctcccgcgtggaatagacggaacgcagcagcagcgcggccgtatcgtccagatattcaatggaaatgagttccttgacataccgctgctgggcttcatccaagccgagggccttggatacggccgaggcggtgtcgtcccccagaagggcgccgcgcagcacatctcccaacgcggcggtatgacttttgagctggaaggcgtccatctcagaggaaagggtttgacggggggcgagagtcagcacgatctcacaggtttgcagctgccagacatccaaattgaggtagaggctgttggccaggtagttcccctgctcctcgatctggactttcagcatcttttcctgattggtcagccgctcatattgctccgccgacaggcttttttttccgtccggttcagaggaattccggacaaagctgaacgcccgcagtcctgcgccgacgaatgcaaacagcagcagacaaaggagaaaaagtctccaccggcgcaaaatggataggatgaagtccttaaagtcaaacgtatcgttgggattctccactaaacgacagtcctttcaaaattcttacacaatgtacaacggcggttgcatacggcaaagcggccgcggggcggaccgcaaggccgggatgcggaacgatgaagctgctccacacgcgattcctaacgtatactgacgcattatagcacaaagaaagaaggcgtgtcaaccgactccgcagccagcccggatgccggttgccggacgggagctcccgacatacccgccccgccgccggaccgacagggggggcaggcaggcgggggagccgttcggcaaccctccgaaggcacctgcccaaaggcggccgaacaggacgccggatggcgtttggcgggaattcatcaaaaagcccgtgacaaacgccccacgctatgctataatgatttggctttgtgctgctgtcaaaacggacaggatggtccgcgaagcggcgcgcgcgggaatgtgaatcggcgcggagcgtgtccgctctctgtcggccaggaggatgttttatggaaaaaacgcggttgctgtttgtgaccaatcatctttttgtgggcggtgtggataaggtggccgtcgacatcgtcaacgggctcgataaagaccggttcgacgtgacgctgctggtccttttccgctatgatccgggccggtaccacatcgacccgcgcgtccatgtccagccggttttcaagacctatttcaaaggcctgtcccatctggtatcgctgttgccgcagacatggctgtaccggcggctggtgcgcagagaatatgactatgaaatcgccttccaggcgggggtgccgacacggatgctgtccaaatcgcccagccgcgcggtcaagctcgcgtggatgcatgggctggatacggatcatctgaaggaacaccagcggtttgataagatggtgttcatttccagcgaagtcatggaggcctttgcgccgctgtacggccggccggacgacctgatcctgtgctacaacccgatcgattacaaggctatcgaggaggccgcgtccgaaccgatcggggaggaggttcgccgtgacgcgccgatcctctgcaccgtcggccggttcagcccggaaaaagggttcctgcgcctgctcgcctgtcataaggccttattggacgagggggtccggcagcagctctggtttgtcggggatggacacgaacggaaaaacatggaggcctatatccgggcccatcatctggaagactctgtccggctttggggctatcagaccaatccctaccggtttatcagccggtcggacgtttatgtctgctcctcgtttatcgaggggctgagcgtggcggccaccgaggccgtcctgctcggaaagcctgtcgtcaccaccaatgtatgcggggcgaaagagctgctcggggacggtgaatacggcattgtgacggaaaacagcgaagaggcgctgctggacgggctgcggcggatgctgccggaggagacccgccggcattacgcctccaaggccgaggaacgggcggattcgttttgccgggtcgaccggataaagccgatcgaggcgctgttttcggggcatattgcagggcaggctggataaaaggcttgcaattttgagaagagcgtgttatactgtgtcttgtcgtttggaattcggtgatatcccggaggacagcgataagcagtcggtgccgatggcggtgggggtacacccgttcccatcccgaacacggcagttaagcccatttgcgcccacgatactcggctggaagcggcccgggaaaataggcaggcgccgacacggagaacgctcgacgaacagtcgggcgtttttctacatgcaagagggggtcgcgtcagcatggatgaaagccgttatcagctcaaaatcccgaagggataccgcccgcagctggggattgccgaaaccgaaagggccatcaagtttctcaaggatacctttgaaaaccggctggcggacgcgctgtccctgacccgtgtgtccgcgccgctgtttgtccggccggaatccgggctcaacgataatctgaacggggtggagcggccggtcgtcttcgacatgcggtatgacggcgggcggaaggccgaaatcgtccactccctggccaagtggaaacggcatgctctcggccgttatgggatccgggccggcagcggcctttataccgatatgaatgcgatccgccgggacgaggtgacggacaacctgcattccctgtatgtggatcagtgggactgggaaaaggtgatccgatccgaagaccggtcccccgcatacctgcggaaaacggtggagacgatttaccgggtcttcaaggaaaccgaggcggcggttgcggacaggatcccgggcctgccgcgcctgcttcctgaggccgtccatatcgtcagcacccaggagctcgaggaccgctatcccgctctgtctccgtctgagcgggagaccgaagcggcccgggaatacggcgcggtctttctgaccgggatcggcggcgcgcttcggtccgggcgccggcacgacggcagggcgcccgattacgacgattggtctctcaacggcgatctgatcttctattatccgcttttggaccgggccttcgaggtctcgtccatggggatccgggtggatgcggacgccttgcgccgccagctcgccgacgcgggatgcgaggagcgggccgcgcttcctttccagagagcgcttttgaacggcgaactgccccagaccatcggcggggggatcggccagtcccggctgtgcatgtttttcctcggaaaagcccatattggggaagtgcaggcctccctttggccggagggcatggcggaggagtgcgcggctgccggcgttccgctgctgtgacagaaaggacggtatatccatgcgtttgacgctctattgtggcccattgacccgttattacgcccacgactggccgggatcccccgcttcggacgcgcttccgccgctttccagaatcgaatccctcgcctgcggctggcgggacatggcctgccaagcggcgctggacgctgtgggggagccggtctattgggaggaaagcccggacggtgcctgtgtcaccgcggagcccgggtgggaggggtggtatggcctgctcctctgggctttgtaccgggatcagcagaggaagccggagccgttgccggcggattggctggagaggctcgagaccctgccggttttccaagcggcacagaaacgggatgcctgccgttatcccacggtggcggccaattgcgaaatgttcctgccgtacgatgcggatgtggtacttaccggccccgatccggccggggaggaggagatcccgattggctcggcggcgcagcttctcagggagctggaggcgctcaaccgggacacctggaaggcctccgaagcggagattgcctcctgggaggcgttggaaaacggaaaaggcgggcgggatctggactgctttgccaaacggggctttgcggcgctgctgcgggtggcccgcgccgccgtttccatgacgcagccgatccgcctggattacgacggctgatcccggaaggggcctgtcctgaaatttttttgaaaaagtcagaaaagggcttgattttttggcgggtattcattataataattgagcgcctttgggcgtggacgctcaaaggcccgatggagagttggctgagtggtcgaaggcgcacgattggaaatcgtgtgtacggtaatcccgtacctagggttcaaatccctaactctccgccatgtgaattcacggggcttttgctccggttatccccgcccccgtcctgtgcggcagggcttctgaaagaggtgacacgaatgaaagaggccatccatcccaagtatgagaagacgaccatcacctgcgcctgcggcgaagtgattgaaacctcctcgaccaagagcaatatccgtgtggaaatctgctcgaaatgccatccgttcttcaccggcaaacagaagctcgtcgacaccggcggccgtgtggaccgtttcaagaagcggtttggtatgaaggaagacaaccaataagaaacgattggccggggcagcgcatcagcgctgcccccttctcgtccgtctcggcgattggaaaggagcggggcaccatggaggcataccgtacggttttgaaagaagcggaggcggaattcgtagaaaaacggtcccgctttatcggctgtatccggccggcggccagcgaggaggaggccctcgcgtttttcgcgcggctcaaaaaggcgcattggaacgccagccatcatgtcacggcgtatgtcctgcgcgaagggcaggtccgccgctattccgacgacggggaaccgcaggggacggcggggatgccggtcctcgatgtgttgctcaaggcgggccttgccgactgcgccgtgatggtgatccgctatttcggcgggactctgctcggaacaggcggccttgtgagggcgtattcccacagtgcttcactcgcggtcggcgcggcaaaaccggtagagatgcggccgtgcgtccgcctgatcctgcgctgtgattatgcccgtgtggggatggcagagccgttgatcctctcctgcggcgggatcctggacgggactgcctatgccgaggatgtgacgctgcgcttccatatgccgttcgaccggctgccggattttgagaggcagctcaccgaaaaaagcgccggacgccttgcggcggtgcgggaagacgaggcattttacccgtttgatctgccttaatatcgaaaaaaattgtggaaaatcggggaaatacacggaatggaaaaaaagatggcctgtccggcaggaaaaaccgacgctgtctgcgtatagtacttatagaagcggtcctgtcgcgggacggcggacagaatggaatgagaaaggacgaggaaccatgacggcacgggaacgccaggaggaagtcgaacggatcgtgttgtctccccgcgctgctttgtcggcctgttccaagggccgggaccgggaagaggaaccctgcgcctatcggcccgcttatcagcgggaccgggatcgcatcctgcattcgaaagcgttccgccgtctcaagcacaaaacgcaggttttcctgtcgcccgaaggggatcattaccgtacccgcctgacccataccctcgaggtatcccagatcgcccgtaccatcgcgcgggcgctgcgcctgaatgaggatttgaccgaggcgatctccctgggccacgatctggggcacacccctttcggccatgcgggggagcgggctctcgacgctgtcatggagggagggttccggcattacgaacagagcgcgcgggtggtggaacggctggaaaacgacggacgggggctgaacctgaccgtcgaggtccgggacggcatccgctgccatacccgcggcacgccggccatgacgctcgagggccggatcgtccgccttgccgatcgggtggcgtatatcaaccacgatatcgacgacgcggtccgggccggtgtgctccgggagaccgatgtccccgccgatatccggaaggcgctgggggaccgccgtaccacccgcatcgacaccctcgtgcgctccattgtggagaacagcggagaggatatcgggatggcgccggagatccaggagcctttcgaccgcctgcacgcttttttattcgaatccctttaccgcaaccccgttgccaaaggggaagagagcaaggtggaggggctcatcacccgcatgttcgccttttttgtggagcatcccgaccgtctgccttcggaataccgtgccatacgggagaacgagggggttcaccgcgcggtctgcgattatatcgcggggatgaccgataattacgcgctggaggtctatcacgccctgtttatcccccgcagttgggaggtaaaggctgacggctttacataaatagttcttttttgggcaagaatacccgtaatccggtgtttttttccagtataccccatcccgcggctccggccgcggccgggagcgtgagcggaggtgatcggatgccgctgccggagtcgtttttgcaggagctgctggaccgcagcgacatcgagagcgtcgtttcctcttatgtccgtctcaaaaggagggggcgcaatctcgtggggctttgcccctttcacggggaaaagaccccttccttcaacctctatcccgaaaccgcgtccttttactgcttcggctgcggcgcgggcggagacgtcatcaccttcatcaaaaaaatcgaaaatctcgactatctcgacgccgtcaaattcctggccgaccgggcggggatggcgatgccggagaacaagatgaacgacgcggcgtcgcgaatgcgcctgcgggttcttgaggccaatcgggaggccgcccggctctatcacgcgctgctctacgcgccggaggggaaggcggggctcgattactaccattcccgcggctataccgacgccaccatccgtcatttcgggctgggatacgctcccgacagtttcgattttctgcgggattcactgcgaaaaaagggatttcacgacgaggaactgacggctgcctggctgtgcggccggggccggaacaatccgaaccatctctatgacctgttccgcaaccgggtgatgatcccgatcatcgatatccggggaggcgtgattgccttcgggggccgggtgctcgacaattctaaaccgaaatacctgaattcgggcgagacgctggtgttcaaaaagaccaacaacctcttcgctctcaattttgccaaagccgcgggcgggcggcagctcatcctctgtgaagggtatatggatgtgattgcgctgcatcaggccgggtttaccaacgcggtggcggcgctcggcacgtccttcaccgccgaccatgcccgtctgctcgcccgctatgccgacgaggcggtgctcgtcttcgacgccgacacggccggtcagaaaggggctcagcgcgcgatagggcttctgcgggagaccgggctgcacatccgggtcgtcacggtgccggacggcaaggatccggatgagttcattaaaaagaacgggcccgaacgcttcaagctgctgcttgaaaaatccgcgaacgacgtggaataccgtttgatggagctcggccgccggcatatcctgaccacggcggacggccgggtggcgtatctgagggacgccgcgcagatactcgcggagctgcagaaccctgtcgaacgggatgtgtacgccggtaaattggcgggggaactgtcggtttccaaggaagccctgctcgaacaggtgcgctacctgatggaaaaacgccggaagcagcagaaggataaacagatgtcggccattgtccggaaagccgaaggcctggtcaaaaaggccaaccccgaagcggcggcccatgtgcgggccgccagtgcggaagaagcgatgctcggacttctgcttctcaatcccgatttgcttccagaggcgggccgccttctctccgcggatgagatggtgactcccttcaatcaggatatataccgccgtctcctggaacggcaggcgggcgggcagccggtggagctcggtttcctcgccggggatgtggatgaagaggggatgggctacctctcccgaatggtacgggatgccagggagcgggctggtgccgatccgcgggaggagcttcgccggtatgccggcattatccgggaggaaaaccagctgctgggtctcgacagccccgcggagctgacacccgaacagatacaggaaaagctccggcaaatgcgggagcgtaaaagatagacccaagtcgatgtggaaggatggatcggaatgaatcaaaacgagtccaagatgattgaggaaatcagcgaggatttggacatggcggcggccgaggccattgaaatgccggtcgtgaaaaaggataaaaaggtgcaggtcagcgacctggtcgaaatggggcgcgccaagggcaaattgacgactcaggagatcatggacgcgctcgaggatctggacttcgatccggagcagatggataagctctatgaaactctggaaagccagaatatcgagattgtggacgatttcgcggacaccgcgttcgacgacatcgagttcgtcctcgaagctccggagaacgacgaggcggagccggcggtcggcgctgacggtatcgccatcgacgatccggtcaaggtctatctcaaagagatcggccgggtacccctgctctcttcggaagaggagatcgagctgtccatgcggatcatgaacggggacgaatacgcgaaaaagcgtctgagcgaggcaaacctccggctggtcgtcagcattgccaaacggtatgtcggccgggggatgcagttccttgacctcattcaggaggggaatctcggcctgatcaaggcggtggagaagttcgattacaccaagggcttcaaattttccacctatgccacctggtggatccgccaggccatcacccgtgcgatcgccgatcaggcgcgcaccatccggatcccggtccatatggtggagaccattaacaaggtcaagaaggtttcgagccagctcctgcacaagaacgggcatgagccggtagcggaggaaatcgcgctggagctggatatgccggttgataaggtacgggaaatcatgcgggtcgcgcaggagcctgtttctctcgaaacccctatcggtgaggaggacagccatctcggggactttattcccgatgatgaagcccccgcgccggcggatgcggcatcccataccctgctcaaagagcagctcggagacgtgctgtccaccctgacccccagggaggaaaaggtgctccgcctgcgcttcggtttggaggatggccggccccgcaccctcgaggaagtggggaaagaattcgacgtgacgagggaacggatccggcagattgaagccaaagcactgcgcaaactgcgccatcccagccggagcaaaaaactcaaggattttctggattgaccgtgatcggaaaggatgtgcgggtgtgcatatcaacctggaatcggattatgcggcgcgaatcgtttattgcctgaccaaggtggacggacgtctcgacgctcagtcgatcgcggaggaaacctgtgtgtctctgcggtttacactcaaaatcatgcgcaagctggtggcggcggggatcgtgcggtccttcaaaggagccaaaggcggttatcagcttgccagggggccggaatcggtcacgctccggcaggtcatcgaggcggtggagggcccttaccgcttcagccgctgcctggacggggagtacgactgttcctgttcggcggtaatgggttgcccgttccacacggtttttgacgacgtaacgaagaccgtcattgagaagctggatgcggtgacctttgccgatctctgaatctaggcgggggatggatacataatctgtctcttatacacatctgacgctgccgacgaatagagaggtg

SEQ ID NO: 2875 - DNA, 32759 bp, Unknown
  16S sequences of unknown bacteria
aatggtgcagaccaaactacaacagcgccgttgccaccttctgcaacaataccgcgaacgatttacccataatcgtaaatgaccgaaatactgagcttgaactgctttacatagacgatttggttgccgaaatgctggacgcgcttgaaaacaacgaacatcgttacgcggatgatacaaaatactgtatagtgcctacaacccacaaagtaaccctcggtgaaattgtggatttattggagcagtttaaaaaccagccgaaaacgcttttaatgcccgaaataccgaataactcctttgcgaaaaagctgtattcaacctacctttcgtatttaccgaaagaaaaggtcagctttccgctaaaaatgaatgttgatgaccgcggcagctttacggaactgcttaaaaccgccaattgcgggcagataagcgtaaatatctcaaaacccggtatcaccaagggtcagcattggcataactcgaagtgggaattttttattgtggtatctggtcacggacttattgaggaaagaaagataggtagcgacgaggttttgcgctttgaggttacaggcgaaaaaatagaagcaatacatatgctgccgggctacacccacaatataataaatctttcggaaacggaagacctcgtaacccttatgtgggctaacgaacagtttgacccgaatcaccccgatacgttctatgaggaagtgtaatgatggatattaaaacagattacagcgatattaagtttaaggataacggcaaattaaagcttttaattatagtcggtactcgccctgaaataataaggcttgcggcggttataaataaatgccgcgaatattttgactgcatattagcgcatacggggcaaaactacgattacaaccttaacggcgtgtttttcaaagacctgaaacttaaagacccagaggtatatatggacgctgtgggtgacgacttaggcgctaccgtaggcaatataataaactgctcatataaactgatgaatgagataaaacccgacgcgcttttgattttgggagatacaaactcctgcctttcggctattgctgcaaagcgtttgcatatcccgatatttcatatggaagctggcaaccgctgtaaggatgaatgtctgcctgaggagactaacagacggattgtagatgttatttcggatgttaatatggcgtattcagaacacgcgcgccgctatcttgccgagtgcgggctgccgaaagagcgtacatatgttacgggctcgcctatggcagaggttttacaccaaaatttagaggaaataaagcagtcggatattcttaacaagctaaatttagagcctaaaaaatatattttgctttcggcgcatagagaagaaaatattgacaccgaaaagaactttttatccctctttacggctataaacaagttagcggaaaggtacggtatgcctatactgtattcctgccacccgcgctctaagaaaagattggagcaaagcggctttaaacttgataagcgcgttattcagcacgagccgctcggtttccatgattacaataagctgcaaatgaacgctttttgtgttgtgtcagacagcggcactctgcccgaagagagcagcttttttacaagcacgggcaatccgttccctgccgtgtgcatacgcacctctaccgagcgcccagaggcgcttgacaaggcttgctttatactggcgggcattgacgaaaagagccttttacaggcggttacaaccgcaatagatatgaacgaaaacggtgatataggcacacccgttcccaactataccgatgaaaacgtttcgaccaaggttgtaaagctgatacagtcctacacaggcgttgtggataaaatggtgtggagaaagcaatgaaaaaagtaaaacgctctgttaaaataataatagcggtcgcgcttgttattgtgctgctgctttcaagcggagtaatattttacctttcaaagctgaatttaattaaattcagcaacggcaaatttacatggaacggtttgcccgatatgagcgacagcgaaacgctggacgaagaaagccgaatgaacgaggccatagccgaccttgaagaaaaggacgctattgacgctacgggtgaaatttataaggataaaaggtttttgaatattctgcttataggcacggacgaatgtaccgaaagcttcagcgaaaacgcccgcggcgacagctgtatgattatgtcgataggcaaaaaggacggctcgctgaaactcgccagccttgagcgcggtatgggcgtgccgatacttgatgggaaatataagggtcagtacgactggcttacccacaccttccgctacggcggcgcagaccttatgatgcgcgaggtacgcgagtgctttaaggtggatgttgaaagatatattcgcgtaaactttgcaacatttaaaaaaggcatagactcggtgggcggcatagatataaacctgaccgctgcggaagtaagctatgtcaattggtatgtaggacaaaaaaacaagtactctgcgggttggaatcatttggacggtcaaggtgcgttaggatatgcacgctgccgtaaaatcgacagcgactggcacagaatagaacgtcagcgcaacgttattcaagcggtagtaacaaaaacaaaggatctgagtatcggcgagcttaatacgctgttaaataatgttcttccgcttgtgcaaacaaaccttacaaggcttgaaattactgagttgctgctctccgcgccgaaatatcgcggggtgcagatcaagcagactactattccgataagcggcagctacggcggaatgagagggctcggcgggcgcagtcttttctcggtggattttgataccaacgcaaaggagctcagagaatttatttacggtgttactacggaataatataatgttttaaaaaggagactttcatgccgaaagcctccttttatgttgcatacttttaatactctgtaatctacaatctcaaaaattgcgctgcataaaacaaagaaaggcagaagaaattatttccgtattttatcgtagtaatcttcaaaggagattttttctttctcggcagcatttctcaaatttgatgcaaagcgcgaccattcttcaaactgggcaacagtcattttattttttaaataccgtgcatagtgcgctttataagcacggttgtatgtctgccatacaggatcatttttgcacttgtcgtcataccgccgtctgctgccgacatcacgacaggttttatccggctcgtttttgaggggacgattgcaatagttgaaatattttccgctcttgattaaaaagaatctgccgcacagcttacagcaattcggaatgtatttatttttaattcctttccaaaaatcaaaatataaaaaggattgcaagtcgttgaatgtaatttcttcgcacaaaatgggattgccgtcggtgttttttaaaaccttatatccaaaggaatccatagaacattttatttccgaaaaattctttatgtaatcaattttaaatttatcataacaaactgcaagttctgcatctgaaataaacgtttcatttttattaaggtatttttttataaacggcttgaaaatatcctgcacagaggcgtagtgaaataaaagagcaatatattcatcaaagaacgcagtgattttttcattcagctcttcgaggtgtgcaatcttatcaaaatcaaaaaaataaatttcttcgaaacttatgggtacgaatttattgagtaaaatataaaataccccgttatcgtcgcagtcacctacaccgttcggtgttacggtctcccaggttatcgggtcctcgatttctgaatcatctctgccgtcctcaaaaaagagactgtattcattaagcaattcatcaaaggtatatattctgccgctcaaaattttattgtaaggcgggagaccggtaatccatttgttcaccttatcaaatgattcaatagcccagtcaacgtttgaagaatacttttggtggtcttcataatgcatattacgcgagatcagaagtctctttttcaaatatcttaagtttcctataatttcatgagcctcaataaaattactgttaagatacgcggtcagtatttcattggcagcgtatttgtattgcccgtttatatacacgtcgttattccagaaatatgcttttaacgaaaacattattttcccccgcactaataaagtagagaatacacaactgaaaatagagaataaaattttatgacgctacttctattgtgttttttgaatggctctgttaaaattattatagacaatatgaatgtatattgcaatatctattatcgtcaggaggttcaaatgaaagagtctgtttataaaagttatgatgatctgcctctgtttctcaatacggaaaccatagcaaagctgttgggaatatcaatttcaagcagctacgaattgatgcatggaaaagattttccgtccttgaaaatcggctcaagactgctcgtaccaaaagaaaaattcagtgaatggattgataaaaagacaggagataatctgtgaaaaataataatcaaaggaaattccttgagaattattttatgttaccgaatgagatttttaatttgaaattgtgcagcggcgagattgcggtttatgcttatctgttatactgtgaaaacagaaaaacatttagctgttatccaagtcataaaacaatagggaaagcaatcggtatgagtcgtaacaccgtcaagaaatatgtggacagcctgattgataagcgactgattaccgccgagccgacttctgtcattacccaaaaaggagaaaagcgcaacggcaatttgcgctatacaatacgcccgattgcggaagcaatagaacagtattacgagcaacaactgatactgctgcacgaagaagttcggcgtcaggcggctttgaaaaaactaaccgaatttgaccgcaaacacgaaaaatcggcagttttacggctcgtccgaaaacaagcaggagaaagccgaggggttgcgatgcttcccctcgacggttcacagcgggcggcaacgccgaccgcataaggctttgcgggacttttgataacagcaacaaaaaatgcgatttaggggttgcttgaattttaacctcgccgatttaggggttgctgattttttcgcagattttgctggatattcagggaagtatgtggtattgtgttgtgcttggaaaggaggatttttatgcagaaaaaactggtaacaaacggcaatgcatttaagcgtacagacggtcggtggtgcggtgtggtatggtatatggacgaacacggcgagagaaaacgaaaaagcttttccggtacgaccaaagcagaggtaaataaaaagataaccgaatacattgcagactttgaaaaccaactgattgaatctgatgagtccaagaaaacactgcaagacagtatgcaaaattggttgcaagtgttcaaattcccgtcagtagaacaaactacctatgaccgatgcgaatgcagtgctaaaaatcagatatatcctctgctcggtgaaaaacctgtcggagatattacagcggcagatattaaaaacctactcaactattggatgaacaagtgctatgcctataccactgtcaagaaagcctatgtgatattgaacgaatactttcggtatctttaccgagaggaattgataccgaaaaatcctatggcaaacattgaaatgattaaaaagagcaatttcctgtcggcacagaataaagagaacttacctgagtgtgaaacggtaacgattttcactccggaggaaattgaaaaatttaaagccgaagcattcagcacattcaaagacggcaaacgtaaataccaacaagccgccgcatatatactaatgcttaacaccggattgcgtacaggcgaattattaggcttgctaaatagcgatatagaccttgaaaataaaacgcttactgtaaggcaaggcgtaaaggaaattgtaaaccgtgacggtgttgggaaagcggcaatgaaaataaaagtcggaaagcctaaaagcgccgccagtaagcgcacagtaccgctgaacaggacagcaatggatatgatcgaggatctgcgcaaagaagcctatttcggcgaaaatacgccccttgtggcagacggaaacggcgactatacaaaacctgtgaattttcgcaagcgttactaccgaattttgaaggtagcaggaattaagcgaaaaggcttgcacagcctgcggcatacattcgccacaaacttagtgaacggacaaaaaaagcctgacgggacgattaaggcgctatcgccaagacaagtagctgatttactcggacattcaacttcgcagataactgagctctactatgtgaaaaaggatacttcgaggcttaacggtataaccgagggctttgagatttaagtcaaaatttataccgcagtaaacaaagaaaagctccggctgatatccagtcggagctaaaattttgatgctttattgatgatgtaacagacggaatcgttgtaagcggatgccgccggatggtaaatccgcacctgtttcgggcgtcaaaatgcggcaaaacggaccgtgtgctaatcttaaacagcaaaagaaaaacggctcaaaactgcacggttgagccgttttccactggcaggggcagaagggatcgaaccctcggcactcggttttggagaccgatgctctaccagctgagctatacccctataataaaaaaatgcttgttatggtggaccatcacggactcgaaccgcggaccgaccggttatgagccggttgctctaaccaactgagctaatggtccgaacaagcaagatatattataacacaatttttatatttgtcaagtagaaaacactataaaattaaattattttttttgagtcgaaatatgcggtattaaccgccgttttcggcgggcaaataagcctgttttaaatatactctgattgtattgtctaatgtataaaataattgaaaatatgcattaaacagtgcaatacaggaaaaaatacattcggtgatattatgcaattttttaaaaagaaaggcgtgcttacggcgggcgcggggctggctataggtattattaacggtcttttgggggcgggcggcggaatgattgcggtgccgcttttgcaaaaattaggacttgaccgcaagcaagcgcacgctaacgccgttgcggttatactgccgataactgttttatcggcggtgctttatttagtgaatgggtatgtttcggttaaggattcgctgatttttattccgggcggaattgcgggctcgctgctgggaacgtttattatgcgtaaaatttcctcggtgtggctgaaacggatattcggcgggtttatgatatatgcaggcgtgcgcctgctgctcaggtgaatattgcagcccttttagcagggcttttatcgggaattatcggcgcaatgggtcttggcggcggcgcggttcttataatttatctatcggtttttaccgatatgcctcagctaaaaagccagggaataaacctgttattttttattccgatagcaatagccgccgttgcggtttacggttttaaaaagcaaattaaatggaagcttgtcgcgaaaattgccgcttggggacttgtgggcaccgcgggaggattacttttcacaaatttactgggaggggatataaccgcgaaaattttcggcggaatgttaataattataggtataagtgaaatagggcttttcggtaaaaaggaaaaataacgcgtgcgcggttcttaaaaaaacagttgcacaaaacggttgataatggtataattaaaagaacaaaagttcggaggtttcacaatgtctaaatcaccacttaccgaaaagcagttggctgtatataattatcttataaaggaaatggcgggcggttttccgcccactgtaagggaaatatgcgccgccacgggaataaaatccacctctaccgtccattcaattctgagcattttggaggacgaggggtatattgtaagggacgcgaagtcctcccgcgcaataaggcttgatatggaatacgattcatcgcttgtgccggttgtgggcagaattaccgccggtcagccgatattggcggttgaggaaattgaggattatataccgtacccttcaaaaaattccgaagggctttttgccctgcgtgtttcggggctttctatgcgcgacgccggaatacttgacggcgatattattattgcggataaaaacctgacctgccgaaacggggatattgttataggaatggacggggacgaggctaccgtaaagcgtctgcttattaaaaacgggcagataatttttatgccggaaaaccccgattattcgccgatctaccccgaagacccgcacgttataggaaaagttataggctgtttcaggaaatattgaggataattatttatgaaaaaatacattgagctttttaccgacggtgcgtgctcgggaaatccgggtcccggcgggtggggcgttgttttgcgctatggtcagcacgaaaaggagctttcgggcggcgaaaaggaaaccacaaataaccgaatggagcttaccgccgcaataaaggggcttgaggcactgaaagagccctgcgtggtaaaactggttaccgattcaaaatacgtagccgacgggattattaagggctgggcggaaagctggcagaaaaataactggataaagtccgataaaaagccggcgcttaattccgatttatgggaacgcctgcttgagcttttagaaaaacacgaggttaaaatcgagtgggtaaagggtcatgcggggcatgccgaaaacgagcgctgcgaccgccttgcggtggaatattataaaaatatgaaagagatgtagagaaatgtccaaatcacgtgaaagaataaattacataataacgggcgcgattatagccgccttgtatgtggaccttacatttttaagcaatattttcaatctcgctttcggtcccgtgcagttccgtgtttcagaggtgcttactattttgccggtattcacatccgcggcaattcccggcgttgcggtcggttgctttattgcgaatattgcgtcattcaatccgcttgatatgattttcggcacttcggctacggttatcgccgcgctgcttacctattttttcagaaatattaaattcaggggtatacctctgctttcaatgtttccgcccgtaataataaacgcgcttgttatcgggcttgaaatcgcaatattcttcctgcccgagggcaacctgctgtggggctttgtaatttccgctttgcaggtaggcctcggcgaacttgttgtttgcgttgggctcggaatacccttttatttagttatagaaaaaaacgggctttttaaaagaaaacccgaaaacggtgataggctatgacctacaataaaaaaattacacttaaaaacggtgatatatgcactttaagaaacggcactgagcatgacggggaacaggtgcttgaggttttcaacctaacgcacgccgaaactgattttatgcttacttatcccgatgaaaacagctttatcgcagcgcaggaatcggattttttgaaagaaaaaaccgagagtaagaacgaaattgaaattgtggctgaaataaacggcaaaatagtcggaacggcagggattgacgctgtgggcggtaaattcaaaataagccaccgcgcagacttcggtataggaatattaaaggaatactgggggctgggcataggctcggcgctgactgacgcttgcatagaatgtgcaaaggcggcgggctatttgcagctggagcttaatgtggttgccgaaaacaaatcggctgtggcgctttatgaaaaattaggatttaaggaatacggcaggaacccgcagggcttccgctcgcgtacaacaggctttcaggagcttatttatatgagactggaattataaaaagtggggttgagggcgtgaatattttacatttgaaatatgctgtggaaattgcaaacacaaaatcaataagccgtgcggcggaaaatctttatatggggcagccaaatttatcccgcgcaataaaggagcttgaggaaaatcttaatataactattttcaaccgaaattccaagggaataacaattacccccgagggcgaggaatttttgcagtatgccagaagaattataagccaggttgaggaggttgaggatatttataagaacgggcgcaagccgaaacagcgcttttcggtttgtgtgccgagggcaagctatatttcatatgcctttgcggaatttgccaaggtcataaaaaaggatattcccgccgagattttttataaggaaacaaattcatggcgcaccgtaaataatgtggtaaagggggactataacctcggaattgtgcgttttcaggttacttttgaaaaatactttaaatctatgtttgaggaaaagcacctgaacgccgaaattataaccgattttaaataccgtttgctaatgtccgagaacaacccgctggcaaataagagggaaatattctgcaaggatttaaagccgtataccgaaataagccacgccgacccgtatgtgccgtcacttccgttaacggacgttaaaaaggaggagctttcaggcggggcggacaggcatatttatatttttgagcgcggcagtcaattcaggattcttcaatcggttaccgattcgtttatgtgggtatcgcccgtgccggaaagtctctataaaaaatacgatttgatacagcgggagtgcaaggataacgataaggtctatatggatgttatgatttaccgcagcggctataaattatccgagtttgacagcagttttataaccgaggtttgcaatgctaaacgtaaatatttgtaaatgctaaaaaaatacaatattgtggtaagggggaatgggtgtgcgaaagtacaaatttttcttgacaaacaaaagggcttgtgctaaaatgataaagccgcatattgtgggctttgtaagctgcgctttcgcgcacgcctaccgtagcgagactggaatttggcaggtgtaataaaaatgtatgcaattatcgaaacaggcggaaagcagtaccgtgttcagaccggcgacgtaatttatgttgaaaagcttaacgccgaggctgatgaggaaatcacctttgataaggttgttgccgtttgcaacaagaccttaaaggtaggtaagccttatgtaaaggacgctttcgttaagggtaccgttctgaaaaacggcaagggtaagaaaataaccgtatttacttacaagccgaagaagagcagctcccgcaagatgggtcacagacagccctacactaaggtacagatcggcgaaataggctgattatgactaaggttaggttttttgccgatgaaaaagggctttacggctttgaaataaagggtcacagctcgaaaaactgtgatgatgagctcggcaaaattgtttgcgcggcggtttcctccgcggcgtatatggcggctaatacagtaaccgaaataataggcgataaagcggcggctgacgtatcggacggcgctatgcgctttgaggttacaaccccctgcgataaaacccgtgcggttttagaggggctgcggctgcatttaggcgagctgtcggcagagtacggcagcaatatcgtaattatcggaggtgcagattgatgttaaagataaatatacagttattcgctcataaaaaaggtatgggttctaccaagaacggccgtgacagtgagtcaaagcgtctcggcgttaagcgcgcggacgggcagttcgttttggcgggcaacattctcgttcgtcagagaggaactcacattcacgccggcaacaacgtaggccgcgggtcggatgacactctgttcgctttggtggacggcaaggttaagttcgagcgcgtaggcagagaccgcaagcaggtcagcatttacgctgttgagcagtaagaaaaagcaaatccgggcggcggctgctacccggatttattttttagaaaggaaagaagatttatgaaggtttgtcatgtttgcaaagccgagtgcgatgacgctgcggagctttgcccggtttgcggcgctgaccttacggcggaaattaccgaggaagaggaaaaagaggaaaaagtaattaacaacccggtgcttttggcgacgcttgacgatgttgtgtcggctgaaatactgaaagacctgcttacggaggcaggtattctttacagcagcgattcgggagaagacggcacaatgaaagtgaccttcggcggttcgtttgtggcagatgatatttatgttgacgagcaggattttgacgcggcaaacacgatttatgaggaatttttaaattccgagccgcagtttgacgaggaattttttgaggacgcggagaacgaaaactaatgagttttttaaattggggaagaaaaaaggaagaagagccggacgaaaacgagccggttttggcggcagtaattaaaaatcccgtaacctcggaaatatttcaggacatactaaaggagaacggcataccgtttatatgccgtcaggacggcgcgggcggctctgtcaagctgcttttgggcgcgggagttgtgcctgataatatttatgttgcggcgaaaaattacgaaacggcaagaggactttacgaggcatacctgcaaacagaggtagagccggaagaggaaataacagagtaatatgtttgtagatatagcaaaaattcatttaaaagcgggcgacggcggcgacggcgcggtttcctttcacagggaaaagtacgttgcggcgggcggacccgacggcggcgacggcggcaggggcggaaatattattttcaaggctgacagtaatttatctacccttgcggacttccgctacaagcgcaaatatacggcgcaatcgggcgaaaagggcggcggcggtcgctgctcgggcaaaaaagcgcctgaccttattataaacgtgccggttggcacgctggtaaaggatgcggaaagcggcagaataattgccgatatatccgattcggagcccgttgtaatagccaagggcggcaacggtggctggggcaaccagcattttgccacgcctacgcgccaggtgccgcgctttgctaaaaagggcaacccgggcgaggagcttgacgtaacgctggaattaaaactcttggcggacgtggggcttataggctttccgaatgtgggtaaatccacacttatttcggtggtaagcgaggcaaagccgaaaattgcgaattaccactttacaacccttacccccgttttgggagttgtgcgtatgggcgagggcagctcgtttgttatggcggatattcccggacttattgagggcgcgggtgagggcgtgggcttaggccacgaatttttgcgccatgttgagcgctgccgtctgcttttgcacgttattgacgtatcgggcagcgagggcagagacccgattgacgattttaataaaataaaccgcgagcttgccgttttcagcagcgagcttgaaacccgcccgcagataattgtgggcaacaagtgcgatttgaccgaagatgatgaggttcgccgcatatcggattactttactgaaaaggggtataagttcttccccgtaatggcggctatcgccgagggtacggatgagcttataaactatgttgcggctgagcttgcaaagctgcctccgataaagaaatacgaagccgagccgaagccgcttgaagaccttacggtcaagaaaaagcgcgactttacaatacgcgtttgcgacggggtctactttgttgaaaactgcgagtggataatggaaattatgaacactatcgaccccgaggactatgagtcgctgcaatattttgagcgggttttgcgctcaagcggaattattacagcccttgaaaacgcgggaataaagcatggcgacaccgtaagcgtttacgatattgagtttgagtttgtgatgtgatgaaaacggaaaatcccaatcttttaagcccctccgtgctcgcttttgtgggcgacgcggtgtacgggctgtatgttagaaccgccttggcggcggtaaaccgcccgtcgggcgagttacataggctctcggttacaatggtgaatgccgccgcgcaggcaaaggcgtattcggttattgagccggagctttccgaaaaggaaatatccgttttcaagcgcggcaggaatttccatacatcttctacgcccaaaaacgcctcgaacggtgattatcatatcgccacggggctggagtgtcttttcgggtggctttacctttcggggaataccgcccgtgcggatgagctttttgaaaaaatatatcatgcataacacagcgcgtatatccggtaacggatatacgcgctgtgttattttcaacccgtgacaaatgttttttgtacgatgctttttaatcaaaattcagttttctgatttcctcgggctctacatttcttaaatttatattcttcttaaccgcaatagctgccgccgcgccgcacgcttcgcctattccaacacatataggcattgccctgaagctggagtgtgccatatgtgttcccgaaatatttctgccggtgagcaagagaccgtcggtttttacgggcaccatacagccgtagggaatagtatatccgctttgctgcttaaagtgcttttgcacgcctgtttcatcaagcccggaacccgaaatattatgaatatcaaaattaaaccacgccccgcgcacaacccggtcttcaaattgcctagcatcaattatatccttttcggtaagctgccttaaacccacaaaatgccgtgtttcacgaatacctataagcgaggctgcgcttataatatagcagttttcatagcccggaacatattcccttaaaaattcggtaatcggctccatttgcgagcggcatacaatttccgcgcgggtgagatcctctgcctttgtgccgtctatctcggtgcagtttgtcatattgcaggtgactatacccggaatggttgaggcatacagcagcacatgacctgccggatacggcagcagtttttttgcaagcgcctgcagctcgcccttatcggtttcaaccgttgtttcaaacgagggcgggaataccgcacgtgacatatccactccgcccaccttgaacataagtgtagcgggctgcatttttccgtcgctttcgcggcccttgaaatattccgcacccgcgcggcaggctaaatcgccgtcgcctgttgcatctattaaaacatctgcaaggtatgcccgccttccgcttttattttcggtaataaccccgcaaacgcggtcgccgtttttaataacatcgcaaacaagggtgtaaagcagaatatcaactccggcagcctgcagcatttcaagatatgtattttttaaaagctccgggtctattctgaccttatcatcgcatttaaaaaagtcctgcttgtgagagcgttctaaaatttcactgtaaagccggctttcaaccctgccggtaaagtggctcataagtccgcttgtggatatgccgcccacactcgactgcgcttcaataatcagcgtttttgccccgtttcttgctgcggtaacggcagccgcaaagcccgacggaccggaccccgcaactattacatcatatttaccggctatttcggtatgcttttctgcctcggttataaagctttctttcatttaaaacacctcaaaaccgaaaatattaaatgtttccgctccgtaagtctcaagaggtaaaagcttaacgcttaaaacctctcccttaatatcgagttttaaaaatcgtgtatggatattacggaacgggtgtgtctcggtatgtccgtccttattggtgagaataatatcaaaatcctttataagggttttcggaagtttaaagcgttcctctttaagccttatacaacagggcatattctggtagtcacggtttaggtcgctgtcaaaaacaattcttacccccgaaagcttaaacggtctatcacttctgtattcaaggtaatcgcccttttcaccgatccaccggttctcgtctccgcgttccttaccgtttattacaatatcattgttgcattttaaatccaaagaaagttcggaaacacttcgattttttcccggaagccaacagtcgtccgccataaggctgtcctgaagtctttcaatatctatattatcggtgttttcgccgtactgtaccatttgagcaacagccgttcccactgcctgccccaacagcgcacaggtagccataacgcgcgaggaggaaagcgcggcatgggtaacgcttatatttctgcccgcaaacaaaagattttcgatattttcggagcataatgccctgaacggtattccccagggcgatggcgccggatgaaacacggtcgggtaggatgttttatgatttatacccgccggagaatgatcgtccatcgaccaaccggcataagcgataatatcatcaaaatttccgcctgcctcaacatcgttttgagttactgtatattttccgacataccgcctgctttcacgttttcccggcaaaattccgacccattcaagctcataattttcggcaccgtggtcaccgtgatttttaatatgatcccaaacgccgtatgcaatctttaaaagctcatcgcggcatttatcggtatcgtgtatgcagtcgccttcgccgcccgtttctatccaccaaaagtttgaggacagatcgtgttcacggaacgggatatcatcatcggtacagtatttatatgcccattccgggggagtgaatttctgcggtttgtcggtctcgcgtacctgaaacagacaactcattcccattgtttttttgtcagcggttttcggctctatactctctccgaactcggactccgcctccctgccgtagcgaaaatgtgcgccggtaagtgttgataaaatgctgtcacccgaacaatcggcaaaataacgtgctttaattgtatgcacggtttcacacggcgattgccacgctgtaatgctgattatttttccgttttccgtatttgcgtcaaggcagcttgtgttaagcaataaagtaagattgtcctgtcgcgctgttttatcaaacaataccatatcccataacgaatagcttagctgtggattctgaaaaaagttttcaagcattatttcttcaataatcccggtttctctgttatctttcccgtgcgctccgcaaatccacattcttatttcgcttgatgcgtttccgcccaaaactcctctgtcctgaaccagcacaacctttattccgtgccttgctgctgaaattgcggtgcaaattcccgccattcccccgccgataacacataaatcggtaatatgttcgatgtttttcatatttaccctccactttgttataataaaatcttgactcattctgttatttctattataataaataaaaagaaaaaaacattcgaatttgaatcggttttttacaaaatcgtgcaaaaggtgataaatatagaggtaattattcaagacataacacgctatattgattttctgattgaaacaaataaattttcagtcactttgcatggctcgtttaccgcaatacccgggcttattcgttataattttcaccttaatccttactgccgttttgtgaaaacagtaaccgggaattgggatatttgtgttgataagcagagtaaggttttcaaaaaatgtgaagcgggtgattttttcggagtatgtcacgcaggagtaggcgaatatgtttatccggtgacagtcaacgaaaaaaatgtcggttttatctcggtcggcggtttcaaaggtaaggacgaaagcgaggcgcaaagtaaggcaaagcattttgctcgtaaaaatcatattgattggcagaaaatatccaatttgcgaaacgaatttcttaacgccgatattccggataaagaaaaaatcgatacggttatacatcctcttatgcttatgcttgagacttatttgcaaaaatacgaggaattctccggaaaggaagaaaaagacgatatttacaccagtcttttaagttacattaccacaaatcataacacgcgaatcacaatgaaggatttgagtaaaaaattcaattgcagcgtttcaacgctcagtcatatttttaaaaaacgctcgggggtaagcataagcgagtatattgaaaatctgcggcttgacgaggcaaggtggcttttaaagcaaacttcatatacggtcactgaaatatcggatagcttggggttttgcaatcccgcttatttttccaacgttttcaaaaagaaattcggagtatcgcccagacggtacaatgctatgttttcttgacatatttttcaattgaatatatacttatatttcagggcggatgagtcttttgaagaaaaaatcaagatacaatactgcgcgcaggtttcttattttctggatgctgtttataggtataggcgcagtttcaggctctgttatgatgttagcagacccaagcggaaaaattatggaaatggacgatatattaaaaattcggcatacatccttaaaaagtatacgctgccgaaagggtgtatttaaggaaattaaggggggataagcattgcttaaaattgagaatttaaccaaaagctacggcgaaaaaaaggcggtaaacgacctgagctttaaggtgaaggagggcgaatttttcgcgtttttgggagtgaacggcgcgggaaaatccaccacaatcaacattatatgcggtcagctttcaaaggatagcggagggtggaaatctgcgggactgatattgataaggaccccgaccgcataaagcgcagtctcggcgttgtttttcaaagctcagtgctggataaggacctttcggtaagggataaccttgaaagccgcgcggcgctttacggtatacacggcgcggaatttaaaaagaggctttcctatctcagcgggcttcttgaatttgaagacctgctccgccggccggtaggtaagctgtcgggcggtcagcgcagaagaatagatattgcgcgggcgcttttacacagccccaaaattcttattctcgatgagcctacaaccgggcttgacccgcaaacacgcaagcttttgtggcaggttataggcacgctgcggcatgacacagggcttacggtatttcttaccacgcactatatggaggaagcggcggacgccgactatgttgttattcttgataaggggcaaatagccgccgagggtactccgctgcagcttaaaaataaatatacgggcgattttataaccctgtacggagaaacagaggaaacggtaaaacgccttaacgcaccgtatgaggctatacgtgatgcatttcgcatatcggtgccgaataccgcggcggcaacagagctgattattaaataccccgaaatattccgcgattatgagataaccaagggtaaaatggatgatgtttttcttgctgtgaccggcaaaagactaacagggggtgagcggaaatgacaggactttgggcacttgtgaagcgtaacacaaagctgtattttaaggataagggaatgtttatatcctcccttattacccccataatactgcttgttttatattcaacatttttgaaaaaggtgtatgacgattctttccgctcggcactgaaagcggcgggggcgtccatatcggacgcggtgctgaacggctgcgtgggcggtcagcttatttcatcgcttttggcggtaagctgcgttacggtggcgttttgctccaatcttttaatgataaaggataaaaccggcggtgcccgacatgacctgactgtttcgcccgttcatttcggcacattgggactcagctattacatatcaacgcttatttcaacccttattataagctttgcggcgctgggtgccggttttatatacctttcggcggtaggctggtatttatcggcggcggatattgcgcttatgatactggatgtttttctgcttacaatgttcggcacggtgctttcctcctgcataaatttctttttatcaaccgatggtcaggcatcggcggtaggcacaatagtgagcgccggctacggctttatatgcggggcatatatgcctatttccaatttcggcagcgggctgcaaaaggtgctttccttcctgccgggaacctacggcacaagtcttttgagaaaccacgcaatgcgcggcgtatttgccgaaatgaaaacacagggctttccggctgaggtggtggaggctatacgcggcagtgtagactgtaaccttgaatttttcggcacaaaggtaactgtaggcgcaatgtacgcaattcttggcggcagcatagcgatgcttatatgcatatatactgcaatgaacataatattcagcaaagcaaaaaggggctgagaaggcagtattgacattttaataaataactgtaatgtaataccgaaatggtaaggcgaatttatgaaaaagcttttatcagtagttattgcgtctcttgtagtgtttgcggctttaccgtttgctgccgcggcggatgaggcggagcttgtgcctgtaagcatttcggctgttcagggtaaacctctgcttgaaggggtagaggggcatattgaaaacctgggtgaagaaaacgagtgctttgtgtatgatttgtatttagccgagccgataatatttgaaaacgtcgaaactaaagaatacgaatacggcaatgagtttgaatggtacgacccgtccttcgctgagcctaccgtaacacttgagcttgccgacggcatggttgaagaatatacatatgacaatttttatcggatttatgaaaaatagatggtatggacgctttgaaatggaacaagatattcaggaatattcaaagaaaagaaaattggccgctgtaaagaaaaatacttgacatacaagtaaatatatgctataatctcacctgtaaagctctgaactttacaggtgaggtgcttttatggagaaaaatttgcatatttccgctttgctggatgtttacggcgcttttttgggtgaaaagcagagaaagctgactgcttattattataatgacgatttgtcgctttccgaaattgccgaaaacgagggcataacccgccagggcgtaaacgaccagataaagcgtgcggttaaaagccttaacgcgtttgaagaggaatgtcgctactgtgagcgctttgaagagctgcgcgccgtactttccgatttaaaagcgggggataaaaaggcggcggaaaaggctgccgaaattatagaaaagctttaggagtgtgtgtaaatggcgtttgataatttatccgataagctgtcaggcgtgttcaagcgcctgcgttccaagggaaagctgagcgaggcggacgttaaaaccgcaatgcgcgaggtgcgtttagcacttttggaggcggacgttaactataaggttgcaaaggactttaccaacgccgttaccgaaaagtgcataggcgaaaacgttatggaaagccttaccgccccgcaaacggtggtgaaaatagttaaggaagagcttaccgctttaatgggcagcgagcaggcaaggcttaaaatatcaaataaaattcccaccgttattatgatgtgcggtcttcagggctcgggtaaaaccacccactcggcaaagcttgcaaagtatttgaaatcgcaggggcacagaccgctgcttgtagcctgcgatatttaccgccctgcggctattgagcagttaaaggtggtaggcaaggcggttgataccccggtttttgaaatgggaaccgaaaagcccgaaaaaaccgcggtaaaggcggtagcccacgcgcgggattacggttatgatttcgtaatactcgatacggcgggcagactgcacatagacgatgagcttatggcagagcttaagcgcataaccgaggcggttgaggtaaacgacatactgcttgttatagactcaatggtaggtcaggacgcggtaaacattgccaaggcgtttaacgatattcttgaaattgacggcgttattttaaccaagctcgacggtgatacgcgcggcggcgcggcgctctctgtaagggcggtcacgggcaagccgataatgtttgtgggcgtgggcgaaaagttagatgagcttgatgagttccaccccgacagaatggcgtcacgaatactgggaatgggcgacgttctctcgcttatagagcgggtagaaagcgaaatggaccagaaaaaagcggaagaggcagcaagaaagctcgaagaaaaccgctttgatatgaacgaccttttggagcagttccgccagataaagaaaatgggctctttaaagagtatactttcaatgctgccgggtatggataagcagctgcgtgatgttgatattgacgaccgccagttgctccgcattgaggcaattataaaatcaatgaccaaaaaggagcgcgaaaagcccgatataataaatgcctcgcgccgcaggcgaatagccgcaggctcgggtatgcgggtagaggacgtaaacaagcttttgcgccagtatgagcagatgaaaaagatgttcaagcagatgaacacaaagggcggtaagcgccgaatgatgcataacctgagaacatcgggcaaaaacggaatgggtttttaaaatgtgtgttacgcccgacagggtgaaaatgcacatattttaaacatagataatatgaatacggaggtgtaataccatggcagtaaaaatcagacttcgccgcatgggcgcaaaaagggctcccttttaccgcgttgttgtggctgattccagatatccgcgcgacggtcgctttatcgaagagataggcacctatgatcccacaaaggatccggcagctgttaatattgacgctgaaaaggctaaaaagtggatatccaacggagctcagcctaccgacaccgtaaaagcgctgcttaaaaagaacggcgttctttaatattcttgtgaggtaaaacaatgaaagagcttcttatttgcattgcctcggggcttgtagaaaatcccgacgaggtaaacgttactgttgatgagccgaatgaagaaggcgttaccgtttatcatcttcacgttgctgaaaatgatatgggtcgcgttatcggcaagcagggcagaattgccaaggctatacgtgttgtaatgcgcgccgccgccaacagggaaaacggcagaatatcggttgaaatagactgattatcaaggggtcggacagcgcttgtccggctctttttctttcggaggatttatgattaaaaaatatcttgaaacgggtaaaattgtaggtacacacggcgtcagaggtatggtaagaatacagccgtgggctgattcgggcgaatttctgacgcgctttaaaaaactgtatcttgatgaaaacggtgaaaacagcgtgaccgttttaaaggcgcagccgcacggcggcgttgtaattgcaagctttaaaaataccgaaactatcgagcaggcggagaaattgcgcgggaaaacggtctatatcgaccgtgaggacgcttgtcttccgaagggcagatatttcgttgaagatataataggctgcaccgcatatgacgcggacagtgaaaaagaatacggcacggtgacggacgtttcggttaccggcgctaatgacgtatggcatataaccaaaaacaacaaggaataccttattcccgcaatagacgaggttatagtatcagccgagcctgaaaacgggcgggttattattcgcccgatgaaaggaatttttgacgatgaggattgatattcttaccctttttcccgaaatgtgcgaaacggttatgagcgaaagcataataggcagggcgcgcagagccgaaaaggttgaaatagtttgcacgaatatacgcgattttgcggggaataagcacaataaggtggacgatatgccctacggcggcggaatgggaatgataatggcggcagaccccatttacaattgctacaaaagccttgtttccgaaaccgaagaaaagccgcgcgttatatatatgtcgccaaagggcgaaaaattcacccaggaaaaggcaagggaattatcccgtcttgaccgcgtaatgctgatttgcgggcattacgagggggttgacgagcgcgttattgaagaaatagtggatgaggaaatttccataggcgattatgttttaacaggcggcgagctgcccgcgctcacggtggcggacgcagtgtgcagaatgttaccgggcgttttatcggacgatatttgctttgaggaggaaagccacttttcggggctgcttgaatacccgcagtatacccgccccgccgtgtggcacgaaaaagaagtgcccgaggtgctgctttcgggcaatcacgcgaaaattgccgaatggcgcagaataaaatcgctgcttataacaaaggagcgccgccccgatatttataaccccaccgcagaggatataaaaattcttaaaaaggcgggatataaggaggaaaccgaaatatgaaaatactgataatccgccacggcgaccccgattatgaaattgattcggttaccgaaaagggcaaacgcgaggttatgcttttaagagacaggcttttaaagcagaatataggcgatatttactgctcgcccttaggcagagccaaagccaccgccgagcctacattgaaagctctcggcaaaaccgccgaaatatgcgattggctaagggaatttgacgggtatataatcgacccggtatctggtaacaagcgtattccgtgggatttattgccgcgctactggacggcggaaagcgactattacgataataaaaaatggcttaaaacgccgcttatgcaaagcggaaacataagggaaaaatattacggagtttgcgcgggtattgatgaaataacgaaaaagcacggctatgtgcgtaacggcaatatatatcaggtagagcgcgaaagccgcgagacggttgcgcttttctgccatttcggggtcgagtgcgtaattctttcacacctgctcggaatttcgcctgtggtactgtggcataacttttgcgcgctgccaagctcggttactacccttgtaaccgaagaacgagagcagggtgcggcggctttccgtatgtgcggcttcggggatttatctcatttatatgcaggagacgaagaaccgtcctttcaggcacggttttgcgaaacatactcaaattttgaagaacggcactgattatgaaaaacgatgtgattattataggcggcggcgctgcggggctgtgcgcggcggttgcgcttaaaaagcgtaacggcaatttaagcgtaaggcttttagaggcaatgccgcgcgtgggcaaaaagcttgccgcaaccggtaacggcaggtgcaacataacaaataagaatattgatatttcccgctaccacggcaagcgccccgattttgccgaatatgcgcttactagctttaacagaacggtttgcgaagagtttttcaaggaaatcggcgtagattttgtgttcgagggggataaggcttaccccgcgtcgcttcaggcggcttcggtagtggattgcctgcgctttgcggcggagaaactgggcgttacggtgtgcaccgaaacggcggttaccaatattcaggttcaaggcgggctttacaaggtaattgcgggaaatatgagctttttggcaaagaacataataattgcggcggggctgctttcgggcggcgaaaaatatggctgcacaggctctgttttgcagattatgaaaaaagcggggtttgatacggtggaaacactgcccgcaattgttcagcttaaaacccctacggatattgtaaagcagctaaaaggcataaaaatcaacgcggacgtttctttgctcaaaggcggaaaggtgctgcgcaaggagtacggcgaggtgcttttctgcgattacgggctttcgggcccgcctgtgttgcagctttcgggcacggcggagagaaacggcggctgcgaaatatcgcttgatattatgcccgacatagatttttccacgcttgaaaacgagcttgatataagggctgaaagacttaaagagcgcagacttgacgaattttttacgggtatgcttaataagcggctcgggcagataattgtaaagagcgcgggtcttgccttatcaaattcagtaggtactcttacaaagcaggatataaagcggataaccgcgcttttaaaggatatgcgctttaaaattacgggtactacgggctttgccaattcgcaggtgacagcgggcgggcttgatacggcgcagtttaattgcaaaacaatggaaagccgcgataataaggggctgtatgccataggcgaaatactggatattgacggcgactgcggcggctttaatttgcagtgggcgtggtcgagtgcgctttgcgccgcggaaaatattgcgggagcgaataacaaatgctgataataaataatgtaaagctgccgcttgattacgatttttccgatttgacatatgctgcggcaaaggcgcttaaaaccgacaggaaaaatataaaaagtgcgtcgcttttccgtaaatcggtggacgcgcggcataaaaacgacgttcatttttgctgctcgctgctcgtctcaaccgaaaacgataagcggtttgagaaaaacggcgcgcaattgtaccgcgatagcgggtacatttggcaaaaggcgggtaaattaagcgcgcgccctgtggttgcggggttcggccctgcgggaatgtttgccgcattggcgctggcgcgcgcgggtatgcgacccttggtgcttgagcgcgggcaggatgttgacacccgcatacgcgatgttgaaagcttttttgcgggcggggctttgaataccgaatcgaacgttcagttcggcgagggcggcgcgggaaccttttcggacggaaagctgaatacgggaataaaggacagccgctgccgcgagatattaaaggtgtttgtaagccacggcgcgcccgaaaaaatattaaccgacgcaaagccgcatatcggaacggatatactctccggcgtggttaaaagcataagaaaagaaataacagcactcggaggcgaggtgcgtttcggcgcgcggctcgataaaataaaccgcaaaaacggcggtatttattcggttaccgtcggcggtgatgaaattccctgcgatacgctgatacttgcaacgggtcattccgcaagagatacctttagtatgcttataaacgaggaatttgagcttataagaaagccgttttccgtgggggtaagaatagagcatttgcaaagcgatataaaccgcgccttgtacggcgattttgctgaccaccccgcgcttgcggcggctgattacaagctttccgcccaccccgataacaggggagtatacaccttttgtatgtgccccgggggcgaggttataaacgcttcaagcgaaaacggcggcattgccgtaaacggtatgagccgcagccgccgcgacggagtaaacgcaaacagcgcgcttttggtaagtgtgctgcccgaggatattgagggcaacggcgttttgggcggctgcgagtttcaaagaaaaatagagcaagcggcatataatattgcgggcgggggcgtgcccgtaagcacggtgggggcgtttgttttcggcgaaaaggcggaatttacgcgcgttaaacccaccgtaaagccgaacccggttatatccgatttcggcggtattttccccgaatttgtactgtcggggcttaaaaacggaattatgctttttgaccgcaaaataaagggctttgccgataaatcggcggtgcttaccgcccccgaaacaaggtcttcttctcctgtaagaatagtaaggaacgaagagctttgcagcgtttcctgccgcggcgtttacccctgcggcgagggagcgggatatgccggcggaataatgtccgccgcggcggacgggcttaaaaccgccgaaagaataatagagaacagcaacaggtgacaaaatggatatactaaaagcattaacagaagaattttcgcttaaaccctttcaagttgaaaacacggtaaagctgatagacgagggcaacaccataccatttattgcgcgctaccgcaaggaggctacgggctcgcttgacgaccaggttttgcgcgagctggacgaaaggcttaaatacctgcgcaatatggacgaaacgcgggaaaagataaaggcggcgatagaggagcagggcgctttgacggatgaattatccgccgcaatagatagcgcaaaaaccctgaccgagcttgacgatatttacagaccctacaagaaaaagcgtaaaacgcgggcaagcgttgcaaaggaaaaagggcttgaacctttggcagagctgatttatgagcaaagccccgcgacacctgagccgatagcaatagccgccgactacataaacgaggaaaagggcgttgaaacggcggaggaagcgcttgcgggcgctatggatataatcgccgagaaaatatcggacgacgcggatataagaaagcggctgcgttttgtatgctcggcgcacggcattttaaatgtaaaggcagcggcagaggacaccggcgtttacgaaatgtataaggattattccgaatcggtcgctaaaattcccgaccaccgcgtacttgcgataaaccgcggcgaaaaagagggaattttaaaggtatcgcttgagcttgacagcgataaagcgatgtttattataggtaaaaaccatataaaagagggctcgcccgccaccgagaccgtaagggcggcggcgaccgacgcatataaccgcctcattttcccatctgtcgaaagggaaataagggcggctttaaccgaaaaggcaagcaattcagccattaaggtattttccaccaatcttcgccagctgcttatgcagccgcccgttaaggataaggtgactatagggcttgaccccggctacagaacaggctgcaaggtggcggttgtggacggcacgggaaaggtgcttgatacgggagttatatatcccgttccgccgaaaaacaaggttgaagaggcaaaggctataataaaggcgcttgttaaaaagcactccgtcagggttttcgccataggcaacggaacggcaagccacgaaaccgaggtttttgccgccgaggttataaaggaattaaatgacgggctttcgtatatggtagtgtcagaggcgggcgcgagcgtttattccgcctcaaagctggcggcggaggaatttcccgattacgacgtttccctgcgcagcgccgtttccattgcgcgaagattgcaagacccgctggcagagcttgttaaaattgacccgaaggcaataggcgtggggcagtatcagcacgatatgccgcctgcgcagttgggcagcgcgcttgacggcgtggtggaggactgcgtaaactccgttggcgtagaccttaataccgcgtccgctccgcttttatcccgcgtggcgggtctcggcgctgcggttgcgaaaaatattgtgacctacagggaagaaaacggcaaattcacctctcgcgcgcagcttaaaaaagtgccgaaattaggacccaaagcctttgagcaatgcgctggatttttgcgcataacaggcggaaaacagccgcttgataacacgggcgttcatcccgaaagctacgcggcagccgaaaagcttttaaagctttgcgattattcggaaagcgatgttaaaaacggcagcgccgttggtttagccgaaaaggtagaggcaaagggtgcagaagaaaccgcgcgcgagcttgaaataggtgtgcccacccttaacgatattgtaaaggagcttgagcgcccgggcagagacccgcgcgacgaactgcccgcgcctatgttaaggcaggatattatgtctatggaggacctgaagcccggaatggaattaaagggcacggtgcgcaatgtaatagatttcggcgcgtttattgatataggcgtgcaccaggacggacttgtgcacatatcgcagataacaaaccgctttataaagcacccctccgaggttttaaaggtcggggatgtggtaaaggtttgggtgcttagcgttgacgtgccgaaaaagcgtatatccctcacgatgagaaaagagaagttgaacaatggagaaaaataatttaaagggaagcttaattctttgccttaccgcccttatatggggtctggcttttgtggcgcaatcggacggcggcgagctcgtgcccccgctaacctttaacgcgctgcgctcccttatagccgccgcggcgctttacatattttacaaggttacgtccttaaaaaaagaaaagcactttttcccgcaggataaagcgcttaaaaaacagtatattacggcaggcgcagtttgcggcgcaatgcttgcaatttcggtcaattttcagcagttcggaataagcgcataccccgcaggcgcagcggcagaggcgcgcagcgggtttataaccgcgctttacgttgtgtttgtgccgctgctttccttcttcttcggcaaaaaggtaagccctgttatttgggcgagcgttgccgttgcggtggtagggttttatatgctctgcttatctggcggaataagcgaaatttacactgccgatatattggtatttatctgcgcgttttgctttgcggggcagataatatcggttgataaatttgtggggcttacgggcggcgtaaagctttccgtaatgcagtttaccgttgcgggggctttatcggctgtgttcgcggtaatttttgagcgcccgacaatggaaaatattattgccgccgccccgcagatactttacctcggcatagtttcaagcggtgttggctataccctgcaaattgtggggcagaagtacgccgagccgtcggtcgcatcactttctatgagccttgaaagcgtttttgcggcgctgggcggttggcttatttcgggcaatacactcacgggcagagaatttataggctgtgcgcttgtatttgccgcaataattgtggcgcaaatacccgaaatggcaggcagccgaaaaagggctaattccccgtaaaatcattatcaaaggttataacacagcaataggtactgtctgtttttttggctgcggcggatatttcctgccgcagttcttcttttttattattaaattcgggcggaataaccacatcgaaaataagattggtgcggctttccgataacggcgtcattctgaaatcgtgcagcgacattctttcatcaatttttttaagctccgcagtcaaagccttgcgcgctgctttgaccgcggggctgtttgtgtctatagggtccatgtgtattacaagctgaatattgtatttttcgtttatcagcttttcgcacaaatccacctgctcgtggcactttacaaaatctgaatcctgcggcacctcaacgtgaaccgtggcaaactgcctgccgggtccgtaattatgcaccataaggtcgtgtatgcctataaatccctcaaatgacagcacggtgtttttaatttcttctaccgtttctttatcgggcgggttgcccaaaatcaaattaagcgtatctctgccggttgaaaagcccgaatacagtataaaaagcgataccagcaagcccattaccgcgtctaaattaaaggacagcttaaagcagagcgataccgcaaccgataaaagtatagcgccggttgacataatatcattaaacgaatcaagtgcggtagccttgaaaacgcccgactccacctttttgaaaagcttgcggttgaaaatatacatccaaaacttaataagcattgaaacggcaagcacgactattgcggcggcggaatagtcggggaatttatcacccgcaatcagcgcgccgacggatgattttagcagctccgccccgactaagagtataagtaccgcaacaataaaggctgacatatactccattctgccgtgaccgaaagggtgatccttatcggcgggtttgcccgccattttaaagcctataagcgttataacggaagagcccatatcggaaaggttgttaagtccgtccgccgtaatagaaatactcgcggtaagaagacctaccgcgattttggttatgcataaaattaaattgcagaaaattcccacgccgccgctgagcgttccgtagcttttgcgcacggcggggttttcggtatcgccgctgtttttaacaaacagccttattaaaagccttgtcatttaaagctttgctcctttagcgccctttgccccgaaggaaacgcccgataaaatattggtatcaatagtaaaggtaaggttttcgcgctcgcgctggcggcggaacgcaacctctgccaagcggtcgatcatatcggtgtatttaagccccgtagcttcccacaaataaaaggcgagagagccgggtatagtgttaatttcgttggcgtaaaccttgtcggtatcgcagtctatcataaaatcaattcttactacgccgcttgcgtttatcgc

SEQ ID NO: 2876 - DNA, 11317 bp, Unknown
  16S sequences of unknown bacteria
gagccgcagccgccgccggccgctgccttgacgacgatcgtaaacgtctgatcctgcgccttattgcccgcggaatcgctcgccgaatacacgatcgtataggttcccgcctcctgaggcgtaaaggaattgttcacgaccgcgacgcttttgccgtcgggtcccttcacgctgatcttttccgtaagcccgctgtcgagatcgtccgtgaccgtcgcgggaggcagaatgaccttttccccgaccgtcccttcggtgggtacgcccgaaacggtgatgacgggaggcgtggtgtcctcgacgacttccgtcttctcatggctgagcgcggtgagcgtaaagcagcgcgtctgcacgttgggaagtttctggtccgcatcgtcgttatcgtaggcggaaagcgcgagataggtacagttgttcgcgtccacgaggtccgaataatatacttttttcagattttcgtggcgcatttccttgccgttgacgaacaggcgcacgccctcgtccttcttctggatctcgatggtcacgtcgccgagcgcatcggattcgttggcaaacgtatcctcgatggcgatgtcttccgcgccgaacggcgagaaataatgcacggaaacgagcagtttgccgtccttattgttgagccgcacatagagtccgtccgcggcaaatccgccgggcgcggtgatggcgggtttgttcacgaaaccgaccgcgacccacgcgtcggtggaagtcgcttcgtccgtatcgttgccgtcccaaagcccgttgatgtggaacgttgcgcgcagtgcgccttcgttcatggacaggggaagtttgtaataactgtgcgcgaacacctgcatacccgcatccacggcgctgacgccgccgtaaggcgcgtgccagttgttcatatccttgatggaatccatcgaaagcgcgtcgtcgggatctacgacggtgatcttgtaggtattggacgctttgttgcccttgctgtcctcggcgctgtacacgacggtgtattcgcccttgactgcaggcgtaaatttgccgtctgtcaccgcgacgtcgctgccttcggggtcggtaaccgtgatatccgcagcaatctcttcgccgtccgcctgcaccactttgccttcgggcagcgtcacggccgtgccgaccatgccgctttcgggcatatcggaaacctcgatatagatattttctttggctttgatatcggtggtgatgccgagtacttccacattgttggtcgactggtcgccctgcacgaaactgccgaaactgaaatagaaacagccgttttcatcggtgaagtccgcaaaagtgagggcgtcgaacgtctcgtgcgacacgactttgcggttgatcgaaaagaccattttgccctcgacttcttccatttcaatggtgatcttgccgaggccgaaatcggtcgtctttaagaccgcgccctcgccgccgaacgcgttgatctcgggctgcatcgcgatctttcccgcctggttgcgcatcatgatattcaggcccgcctgatttgccgtgggaagagcgggcattttgccgaacccgagcgctatccatgcatccacgttgccgatgatcattttcacgtcgagcgtgagttttaagtatttggaagacatatctaccgcgcgcaggtactgcgcgctgcccgtgagttgcacgccgcccgacacggccgaaatgcccgcacccgaccagttgcgcacgtcttccacgccgccgagcgtcgaaatgctcgtgaatttcagttctttgagcgtcccctcgcccgctgcataacttgcggtattgagatacgtcctgccgtaagcgtcggaaatctgcgcgcgggaaatgttggcaagttccgcgtgcgattctttatcgtacacgcacgtcttgtcgccctgcgtgacggttatgctcggattttccccgaacagcgcgatatccaccgtaaagggaacgcccgcctgcaagccgccctcgacgggcagcgcgccgagcgcgatatccgttctcgcgagcgcgccgtccttttctttccaatgaaagacgttgaaattcatgctgtccgcgccgggttgcatcataatgacgaaacaccccgtgttcggtcccgtatgcaccgatcccgccgaaaaatccgcattgttcgcaaacgcgagcacgtaccagaaatcggtatcgggcacgatggaaaattgcattgccagagaaatcgtctctccgtacaaaggcaattgaagattcgcgtccgcgccgatgccgataccgtcatcgtactcttttgcctgcccgtaaaagtccttccattcgctcttgctcatgccgaaaccgcgttcaccctccgcagaggccgaaaacgtcatgccgacaaagaccgagcacagcagcgtgaccgccgctaaaattgcgataagttttcttttcatcttgtttcctccttttattccactgttataaaagtacatctgtttgcgggaagggacagatcgacgatcgtttcctccccttccgtgcggacgctgatcagttcgaccgcgccgccgtaaacgtcccattgccgatacaaatctccgatctcgttgagacgcacggtgatattcacgttctgcggcgacgaattgacgaacataaacacggaattgttcttgtatttatgcttgaccgccaccacgtccctgttgctcttttccagcaccaccgactttacgcccagttcccgaagataatcggatacgttcgtagcggtcttctgataagaaaaattcctgctcgtcgtaatatcgtcgagcgcctgagtgagcgccgcctgccccgcggccgtgttggacagaatgccgttggtattctgcatgatcaccgaaacgccgcccgcggcagcctcggcgagtttttgcacggcggcgtcttccagcgccttggtgcggggaacgacgatcgccttgaaccgctcgccggagggcgtgacgagcgcgccttcttccacttcgcacgcggcgagattgaccgcgtcgagaatgtcgtaatcgatctgattcccgacgagcgtgcgcacaagatcgctgaaattcgcgctcgtgcttctgaccttgtcgttaaatcggttgagatgcgcgggcggcaatgtatcgatgtagatgccctcgatgggataatacaccgccacgttgctctcgtgcacgccgccgtcgagcatatagcccatgcgtccgatggtatcggtaaacaggcggttttcctcttcgctcatcagatgcggacggtaaaacgtgccgatctggttgacgcccatcgcgtactgcaccgccaccgaaccgagtttcgcatacatatcgctcgtttccacggcgtcgaaggcggcggaaacttcgctcatcacctttgactttccgccgaaatgcgcggcggacgcggcaaatttcgccgtcgtcgaacaccagttcacggccgtggcgggattcgccgtcagaaggtcgatccccggcatctgcatattcgacagattgcgcatgatattgccgttgaagatcgggtgcatatagatatcttcttccagaaggaagtgccccgtcaggctcacgccgttgtcctcgcaccaggcgccgatctgccccgaatagttggaagccatcagttcgcccaacgtcttgtagtaatcccagcggaaccgcttggcggcgtcggattccccttcatagagatatgaataatagttttcgggggaataaccgcgcagtttcagaaacttttccgtcatatcgctgctgtaattggcagtgggaaggagcggaatgtccggatctacggggtctttgacgccgggcgtcgtgggcgggccgtcgaaatacgttcccagcatggacggctcgtcggtgaaaaacgcctcgatgccgttgccgaaatatttgcccagacgcgatttatactgttcgtgcgtcacgcggataaattcctgcacgggttcggctttcaatacgttgatatagcgccgaagttccgcccagttgttgaccgcgtgcgtaccctcgtaaaaatacttgacgtactgcaccgccacgaccctgtctttatccgcctgccaggtgagcgtgccgttcttcacgcgcggcatcagatccacgcagtcggaaaggtccatatcgtccacgcccgtgcccgcaaaggcttttgcaaaggcgaacgaatgcccgtgcggcgcggaaatctcgacgcgcgcgcccgcggacacgatcttcgtgccgtttacgagcccttccgcctgccattcgggatgatccctcaaaaccagcccgcccgcggcgccgctggggtaatgcaattcgtcgtacagccagacgcggaggcccagttcttcgatggcatactccacgttggatacgagcgaatcccacatctcctcgctttccagataattttcgagaaaggaaacattggtcgcaacgccgccgtagccgtattctttgagcatatccagcgtcgctttatccactccgttcgtttcgaattcgctcgcgtgaatgatgggcagcgggcggaatttgagcgcggggtcggaaatcgcctcctcgtcgaaagtacgctcgttgccgacgatgggcggcggcgtgagtttatcgtccaccttgccgcagccggacaataaaagcgcggcggcggtcaggcaggcgagacagactgcgattgttctcttcattatacctccttatgttttcggaaacctcgtcacgcggcgcacgtattcgcgcgtgaacgcatccgcgtccacacccgtaccgacgagaagtttactgctgctcacgtcgtgccgccagttgaaatcggacaggttcacgacgtaaccgttggcgaatttcgcctcccgctcgaccgcgcagaccatggggcggaacgtaacgaacgattcgtcgaacgcgcacgtgagcgcgagcggatcgtgcaaatatacgtccgtcccccactttttgcgcatacggttgagcatttgcaggcaggggtgcgggtgcgtctgcacctcgtttaaaagttctccgctcagtttgcactgaaaggtgatgtccacccccacgcagagtatgggcagaccgctgtccatcacgatcgcggcggcgtcgggatcgcaggaaaagttgtattcgccgagattcatggaaaatgcgccgcccatgatgcacaacttttcgatctttccgaacaggtcggggcgcttttgcaaaacgagcgcgatgttcgtcagcgcgccgagggtcacgagcgtgatctttctgtcgctcttttccagcgtaccgacgataaaggagaccgcgtcgtcgccgtcatattcggtcgcatcgtattcttccgcgtacgagtgcggcttttcgccgtaatcgagcgggcggccgtgcacgctctcgcgcacgagcggcttcgattcgcccgcgtacacgggcacttcgcagaacccgcccgcgttcaggagcgactttgccattttcgcgcggtaggcggcgcagcggtgcaccgtggtgacgcccaaaatttccagttcgggcgactgcatggcgaggcacagcgcgaacgcgtcgtcgatatcgtcgcccagatcagtatcaatgataacaggtattctttctttcatgcgttttctcttttctttgattttttacattttaatcgcggcgccgacaagtccctgaatatagaatttatttgcgaaaataaacaataagatcaaaggtgaagatgccaccagatatcccgcgaacatgacgggcatattggacgtgtattcgctcttgaacgtgagcagcagccccgccgaaacggtgaatttttcctcggacaaaacgagttgcggccagatatagtcgttccacacgttgacgatctgcatgatcgtgatcgtgcctaaaatgggcatgctcaaagggagcgcgatggcgtaatagcagcggaacagcgacgcgccgtcgatctgcgcagcctcgaacagatctttcgggagccccgaaaagaaagtcgtgagcaaaaacaccgcaaagatacagccgcccgtccagatgggcagaatgagcgccatcagattgtcgtggagccccagcgtcttgtacagaatgtaactgggcacgagcgtgagaacgccgggcaccatcatcagcgccagaaccatggataaaaagaacgaacgccctgggaatttcattttcgcaaaggcgaaggacgcgagcgacgagatggcgagcatgcccgccgtgcccgccacgccgacgaccaccgtattgagcatatatttggaagtcatgtcgaacgcggtggaaacgttccgtatgcgcagcggcagcgtgggataccagcgggtatagtcgtaggcgatgtccgatttgaacgcgttccagagcgccattgccagcggatacagcatgataaacagtaaaaagacgagcacgacgtgtaagaccgtctgcgctacgggaaactttttacgccttgatttttcgatattttccactacaacgactcctggtcaagaccctgtatattcttgctgctgacgaatttgaacgcaaacagcgatacgaccatgatgacgacgaacatgaccgagccgatcgccgaggcgtagcccatattgtcgtgcatgaaggcctgctgatacatataatatccgggcacgtaggtagagtaacccggcccgccgtcggtcaacacgatctgcgtgctgtaatcctggaatccgccgatcagcccgaagatgagaaaataacgtatctgcccgatgagtagcggcagatcgatcttccagatacgcacgagcacgctcgcgccgtcaagacgggaagcctctaaaacttcgctggagatccccatcagccccgacatatagatgagcacgctcgtgccgccgatccagggaaagcccataaagatgatggagggcacgacccagttgggatcgcccagccagtcgatgacctgcgtagggcccatgaacccgagaaggcgcgcgaccgtggtcagaagcccgctcgtgggatcgaaaatatttctccagataagcgtgccgacgacgcctggcgcgacgatgggaaccaatacgagcacgcggtacaaactctgcaatttctgcgatttcacgccgaaaatgagttccgccatgacgagcggcaccacaatgccgatgagaaggcgcgggatcatgatggcgaacatcgtgggtatggagcgcaaaaacacggagtcgtgaaacagatcgatatagttgcggaatccgacgaaagacatttccccgacgctgtgtttttcgaaaaacgagagcgtcagcccgtaaacgggcgggtaataggaaaatatcaataatccgataatgaggggtgcgataaagagataagcgagttttctcttccagatctctctgcccagccccgcaaatttttgtttcaagcccgacgcggcatgaccgatcttcatagcgcacctcctgtcgttttgggtttcggctgtaaatcgatgacgaattcgaagcgcgtgttgatctccagaaacaccgaattggattcgtcgatgacggagatcgtgacgggccttgcgggctgcaaactggtcgccgaaaagggaatgtagataaaggaggcgacgccctcttcgtccgtttcggcgcggttgcctttaaacgtgcctccgtttttcgagatcgcgaacagcgagtgcccctccacgcccttgccctttttggtgacgcgcagtttgatctgcacctgctggcgcacgtccgccacgggtttttcgggcgtgagggagacgacttcgatggtataggtttgggcgcgcaccgtatcgaacagcgcgaatgcgccgaatacgagcacgatcgccaggaccgcgatgagcgttcttttcagtttcatacgtaccttttaattccagccggaagtatcgatgttcagatccctgatgtaagcgtccgcgcccgcctgctgtatggtgttgacctgctcgaagaatttatcgtcggtgtgccttcccaaaacccattcgccgaacaggcggttgagtttgtcgttctgctcggaattgaaagcgagcggccagttggtttcgggcacgatgggaaaggactggtcgagccaatcgtccagaacgctgttgtaagtggatcccttgacggcgcccagactggacccctgctcttccacgatcatggagatattttcgggaacggtcaggaatttcaggaatttgaccgccgcggcttctaatgcgggatcgtccttgaccgcgggtttcatgatattgaggatcatgtcgcctttgggctgataaggtcccttttcggtgtatttgatctcggtggtgtacttcgtcgtcgaactatccatgagcggcgcggggaatacgccgaagtcgaattcgcgcgcggtgttgttgtactgcggatacagcgcccacagcccttcttcgtacatggcgaccttgcccgaattccactggggcgtgtagtcggtgctcatccaaccctcgcggagaagttcggtaaaatagcgcttcgcctgcacgtatacttcctttgcgtacggctgcgtcacgggattgtacagccccgccttcatggcgcgcagttgttcgaccgtggaagtcacgttatccttgttgtagtcggtctgctccatgatataactcgcgatgctcggcccgatggtgtactgcatgatccagttgtcgagcgagatcttcttgaaatacgaccagggcgcgaccgccgtgatctcggggtccttgttgagttccttggcaagcgttacgaactgttcccagtttttggggatctgcgtcttggaaatgaggtcggtattgtaataccagcccgtggcgggacccgcgtacagcgtgatgggaacgccgaccaactgccctttgatgtcgcgcacggtggaggtttcgaagagataatcctcaaagagatcgctccacttttcgttgccctcgacgtattcgttgggttcgttataatatttcgtcatatccacgtaatagtcgcggtcctgatactgcgtgccccaggaaaaggcgatggcgggacagttgtcgcccgcgatctgcgtgacgaaccactgcgaaacttccgcttccagcccgcccacgggcttggaacgcgcccatttgatcttgatatcgggattttccttttcgaacgcctcctgaatacgccgcgtcgccaaaatcaccgtaggattttccgtcgtgggttcggtattcagcgtgggcatcagtccgtgcatatccaccaatagttcgatctttccgtcatctttctttccgccgcacccgacaaagagcgccaaagcgaaaacaaaacagagcaatattgcaacgatcttttttctgtccttcattttctacctccgaataatttttacgtgcgtcttaaaaagacagatacagtatatagtttcatagggggtttttcaatatctttctggttaagtatttttcaaatatggctgaatttcggcaatttttttgtcaattttggtaatatctgtgaaatcagttatattttttggttattttcctgttgacaaacgcgccgccgccgtttacaataaaggcatgaaacttccgaaattcgagtatctttactgttacttccacaataaagacacgtacgtgaaaccgcactaccacaattgttacgaactgacgtacttttgcgacgggaactccgtatccgacaccaacggcgagagttacaagtgctttgcgggcaattttctcatctacccccgtaaccgtccccacaacgaatcgcacttgagcaaagtcaaagtcctgtgcctcggctttacgcccgccgaagcggacgcaaaactgcaatgcgataaactgtacagcgaccacgacaaatcggttttaaaacttctggaacagatacagaacgaaacgatcaacaaggaatccgacttttatttcatgtgttcgcttttgacggggcaacttttgctcggtttgacgcgccagaacgacgccccctattcgcagaacagtttttcgcccgtgctgcgctatatcaacgagcagtacacttcggacatcgatctcggatatcttgcgaaactttcggggtattcgtacgaccatttccgccacgcgttcaaaaaaaagacgggcatgagcccgctcaactatatattgcagaaaaagatagaccacgcgaaacttttgttgagcaattccaccatctgtatcgcggatatcgccaccacctgcggattcgccaatatctcgcagttttccgtgaccttcaaaaaactgaccggacaaagcccctccgaataccgcaagcacgcggaaccttcccctacatagaaaaagagcgcaaaccctttcggtttgcgctcttttatatttttgttatccttgatttttcagcgcgatcgtcgcccgcacgaacataaacgcgcccagcgcgacgatgagcaggcagacagcgccgcccgtgaccgcgttgtaaaggctcacgtccgcttcgggcgagaacgcctgaaacatggcggtctgcaaggcgagcacggaaaccgccgcgtcggcaaagttgatattccgcaccgcgcgtatcttgaaatcgctctgcttgcgcgccttgacaagattatacagcgccatgatgatcttataaaatgcgtaggcggcggaggcgtaaatcatcagccccgcgtattcgaacgcgcggtttgcgtacaccatctgtacgacggccgccgaaagcgccagcgtgagcacgatgaggaggatcccgcccgtacggtagacgcggatgcgcagcaaattcttttcctcttccgtttcgcccttgcgtcctcgcaggatcacgccgccgcgcaggaatgcgagtaccagataataccccgccaacgcaccgaaccagacggaatgggaaagcacggcgagcgtgccctgaaacagggcgtacgccacgctgaccgcccaggtgacgagcccgaacgccaccgtgcgatatccgtaatcgtgtaaaagtttatcggtaaattcgtaattctgcgcccaacgcgtaatattcgttttcattttcggtacaaaacaaattactacgtatatgagatagacgagagagagcgcggaaagcgcatagaacacgtaggaaagaatttgaaaccacagatcgggcaggtgcaacgcggcggcggcgaccgcaccgccgatacagaggatcgatacggcgatcagcgcggcttttttcgcgccgcgcacgcttttcagtcgatcggtaaatttcacggcgctccccctttttttggattttcccctgtat

SEQ ID NO: 2877 - DNA, 4297 bp, Unknown
  16S sequences of unknown bacteria
tcccgcggtcgtgcagaccgttataatgctcgtgaacggaaatatcggggcgggcgtcgccgtcgcgggcgcgttcagccttgtacgcttccgctccgcgcagggaaacgcgagggagatcgcgtcgatattcctcgccatggcgataggacttgccgccggaatgggatatgtggttcttgcggcgatactgttcgttacggttgccgccgtgatacttatacttaccgctctcaatttcggcgcgggcaactccttcgtccgcatactgcggataacgattcccgaaaatctcgattacgacggacttttcgacgacctgttccggacgtatctgaaggatttctccctcgaaaaggtgaaaacgacgaatatgggaacgctctacgagcttcagtaccgtgtgacgctgcgcgatgagcgcgtgccgaaggagttcatcgatgcgctccgctgccgcaacggtaatctgaatatcgtatgctgccgcgaatcgtcgtccgatacactttgagttattgattttcccgaaccgatacattataataatgaatgaagatgtccgccgctgaaatcgcggcggacgggacggaagtgtgaaatgaggcttcttatagcggaggacgagccggatcttgccgaagtgctgtgcgcgttctttgagaaaaaccgattttcggtcgataccgtgaacgacggattttccgcatacgaatacgcttccgcgggggagtacgacgcgatagttcttgacgttatgatgccgaagatgaacggcgtggacgtgctccgacggctccgcgaagagggggtaaaaacacccgtcatgatgcttaccgcaaagactcagaaggacgaccgcataacgggcttcaacgcgggagcggacgattatctgccgaagccgttcgagccggacgagctgatctgccgcgtgcgtgcgatgcttcggcgcggcggcggatacacgcccgatatcctcactttcggcgatgtctcgctcgatacgtcgtcgggcatgatgacgggcagcggcggcagcgtccgcctgagcggacgggagtttcagcttatggagatgttcatgcgctcgccaggtgttgttttttccgccgaccgcataatggagaagatttggggctgggacagcgacgcggagatcaatgtggtgtgggtgcatatgtcgaatctcaggaagaagcttcgttcgatcggctccgacgtgacggtacacgcaagccgcggactcggatatatgcttgaaaaacagtgatcccccgacctcgggaggatcgccgaaaactgccgaaagggtgagacgatgatcagacggcttcgaaaacgctttatacgaattgccatgctggcggtaacgtcggttatgcttcttctgtgtcttatcgtcaatatcgcaaattacgtttccgtggatgccgagcttggcgatatgctgaacgtcatatgtgaaaatcagggcaaaatacctcatccgcctcacggagagggtccgggtgcgggaggtgacggacgctttacacccgaaacgccgttttccacaagatattttgtcctgcgctataccgaggacggagagcttatcaaggcggatcttgagaacatcgccgccgtaacggaggatgatacgggaccttatcttgagaccgcgctcggacacggcgagggcttcggatatacctcggggtacaaatacctcgtcgccgacaacggggacggacggcatatggcgatcttcctcgactgccatcaggagatgcgcggagttctcatgacggcgcttctttccgtgtgcgcatctgcattctgcatccttctcgtgtatgtgatagtcctgctttgctcgcgccgcgcgatcgatcccgtggtcagagcatccgaaaagcagaagcagttcatcaccgacgcggggcatgagcttaaaaccccgataacggttatcgcaacgagcctgaaggtattcgagttggaaaacggacctcagaagtggatcggcaaggcggcggcgcagacggagaagcttacggagctcgtgaattcgcttgtggtgctgtctcgcatggacgagggagagggcgctttcagattttccgaattcaacgcgagcgaggcggcggaggaaattgccgattcgttttcggattacgcgctttcgtgcggtcatgcgctcgatgcgcatatcgagcctgacgtcatataccgcggagacgaatacgcggtgcgccgcctgatctccgtgctgctcgacaacgccgtgaaatacgcctccgacggttcgcggatatccttttcactcgacagatcgaagaagggcatagtcataaaaacgtcgaacgaatgcgacggcatcggccccggagatcttgataagctgttcgaccgctttttccgtgcggacagatcgcacagtagcgagaagagcggcttcggaatagggctttcgatcgcgcgcgcggtcgccgaaggccacggcggatcgatatgcgcaaaaagccccgacggaaaaaccgtggagtttacggcggagcttaagtcggcgccgcgcaaaacgcgcaggatgcgctgatttcacaggacaaacggcatatgtcgaaaaagcctccgcacttcattgaagtgcggaggctttctgcgtaaatcttaaaaaatcggtgcgcggctgagccgatcgctcccacggaaagcccgtgccgaccgcggggtaagagagcgtccgccgttgaattcgtttttctcctcacgcggttttgcggcgatttatctgtaaactatgccgcagcgctccgacagccgcttgagtacgaaggcgattatcagacaaagcccctccgcaacggttacggtgtaccagacaaagccgtatccgaagatcagcggaaggaagttgatgcaggcgaaattcagaacgatgctgcggcatacgtttatcggtatcgcgtattttgtgcgcttggtggagaacagatacgcggcgatcacggcggtaagggcggcgaaaacatagttgagacagtatttcgggagcgaagcgcagactatcgggagagtttctccgtccgcaccgaacattttgcagagcggtttgccgacggcaaaggttaggagaaataccgcagttccgccgacaagcgcgataagcttgccgtttcggaaatagtatttcagatccttgtcgttctttgcgccgtagctaagcccgtaaagcggctgcagtccgcttgaaactccccacatgagggaggagaacagggagcttgcgtaggtgatgaccgaatatgcgtttaccgcggtgttgccgaggtgatttatcagaatgttgttcatcgagaaagcggtgacgggatttgcaaactgtgatatcatctcgggaagcccgcgcagcatgatcttccggtaaagccggaacgacggtctgaatccgcatatccggagacgtcccttcttgaaaatgaagtgggacagcccgacaagcatcgcaagcagattcgccgctccggtcgctattgccgcgcccgcaactcccatcttcagcggatataccataagccagtccccgaaaatgtttgctgcggtgcaggtgaaggaaaccgccagcgacagtccgggatttccgtcgtttctcgcaaagcagttgaagcacggacctatcatggtggacatgagaaaaacggagtaccagaaaatgtagtccgaaaccatatcgatatatgtttcgtttgcgccgagaagggacgcgacgtttctcgaaaacagcgttccgatcagggttattgctgcaaaaagaacggcatttgccgaaagtgaatgcatgaacgcttggtttgcgccttccgtatcgtctcgcccgagtctcaccgaagctaccgcaactccgcctatgttaaaaagggtcgaaagcgcccataccgtgtttacaaacggcatcgcaaggctgaccgcgccgagagcgtccgtgccgacaccgtttccgacaaacattccgtcaacgattgtcagtatgaaaaagctgatgtttccgatcattgcggggatgatgtattttttcagattttttctctgttcgctcattgtgcgctcccttcatttaatgtacgaccgcggaattacaattataacccatggcggtgcttttgtcaacgtcggcagaccgagagacttcttttcgtatgcggtgccgatgtaaaacggtcggtgtgagcttgcttgcgcggcaataaaaataatatgcgaaaaaagttcaatattcattgactttatgatgtgcggaatgttataataagac

SEQ ID NO: 2878 - DNA, 32759 bp, Unknown
  16S sequences of unknown bacteria
cgatggtgccgatgtttacatggggcttcgtacgttcaaaatgcgctttcgccatgggaaaccgacctcctgttcaattacagtttctgtatttatccggtatggtttcatgcggttggagcgggtgatgggaatcgaacccacgtagccagcttgggaagctggaactctaccattgagttacacccgcacgcccgcattggccgtagtaccagacatgggatattgtaatagttttcttccttattgtcaaccgcttttttcctgaattgttttttgttcgtacttttagggtgcttttttacaaaatttattttgtgtgaaataatacattgacagatgaagtacttcgatgtacaatttacaacggaggtgaggttatggcactttctgcggatcttcttcgcggatacacggataccattatcctgaaacaattatcggatggcgacagctacggctatcgcatcagcaaggccgtggccgagcaaagcgatggcgggctggagctgaaggaagccaccctgtacactgctttccgccggctggaagccgccggctgcatccgctcctactggggcgacgaacaaagcggtgcgcgccgacgctactattccctcacggacgtagggctggaaaagctgctcaaggactgcgaaacctggcgggaaactcgtcaggtgctggatcaactgttgggaggggagtcaaaatgaacgataccatcaccaagatcgtagcgcttttatttgaagatttggaagaaaccgacgagactgtcgcgctccatgatgaaatattgcaaaactgtcaggagcgctatgccgacctgacagcgggcggcatgacggcggacgaagccaccaaggccgtcatcgacagcctgaacgggatgcaggaaatgctggcggactatccccgcaaaaatgcccgtcccgccgctccgcaggctcctgtctcccccatggaggccgaagaaacggagacggcgcatggggaggaagaagacgatgcggacgagcggacggagctttacaccgacgttcattataccgagcttcggctgggcagcgccgacctgcaggtgcgccgttccccggacgaaactgttcgtctgacctttcacgaccccaatcacgtactgaaggctcgcaccgaaggcgaccgtctgatcgtagaacgtcaggcgaacggcgcaaagcccgcttcttcccggcacatcaagatggacagcggcttcaagtggaacggcaatctgaaccagctcatgaacagcgtcagcaaaatgatctccggcatttccaaggagctgggcagcatgggtttttcctccggggaagaagtgacgctggaaattccggacggtctgtttctgcaggcggagacttcttcgggcgacgctttgctggaagggctgacgctggaagaactgtcgatccgcactgccagcggcgatctgatcttggaggacgtggtcgttgaaaacagtctccgtctcgtcaccaagagcggcgacgcgcgctggtccggctccgccgtgcaggccgaaataagcagcgccagcggcaatctgacattggaaaacgtccgtgtgcgggatcatgcccggctcgccagcaccagcggcgacgtgatctggaatggggaatgcgatcaggtggatctgagcaccaccagcggcgatctgacgctggacgggctgaccgtccgccagcacgcccgaatcaccagtaccagcggcgatgtacgctgggcaggccaatgccccgaaacggagatcagctccatcagcggtgatctgacggtggaaggccccttccccgccctttccctcaacacggtcagcggcgacgtgcagctgcggcctgacggagcctttcagcgcatcgcgctcaaaagcacctgcggcagcgtggaggtggagctgtcggaagacgttcatccccagatccgctgccacaccgtttccggcaacatcgaccgcatcccggaaagccagccggacagcgccagtctgctggatgtgaacaccgtctccggcgacattaccattcaataagtttcgatcatcagggaggaatgcctcatgaaccgccgatccaccgccgaggtgaaaatccgctttgcttccgccggagggaggaacgagacgttccgtccccgcccggaagacgcttatccccaatggctgttcggcccctgccaattccggggtttctgaacctttcaggcggctggccgttcgcgaccggccgccttgctgatgggcaaaatgtagcttcctttcgcggccgcttcgttctcggttttttcgggcgtttttttctgtttttctttatttcacggcttgacagtctgaaacactggtgttatacttgcttttgtaagaagaagctgcccgcttctcaccgcgtagcgatgttgcgtcggtcatggcacataagtccatggggtgcttgcggcgggtagtttgtgcccggcgttttttgttgtctgaaaactccgggcttccgagcccaaaaaccatttggaggtgtatccacatcaacgagccgatgatcaatgaagaaatccgcgacagagaggtacggctgatttccgccgacggcgaacagctgggcgttatgcccacccgtcaggcgctggaaatggccgaacaggccggtctggatctggtaaagatcgcagcgaacgctcagccccctgtctgcaagctgatggactacgacaagcaccgctacgagcagtccaagcgggaacgcgacctgcgcaagaatcagcgcgtcgtaacgctcaaagaggtgcagctctccgccaccatcgaggaaaacgacgttcagaccaaattccgcaacgccgtcaagttcctgcaggacggcgacaaggtcaaggtcagcatccgcttccgtgggcggcagatcgctcatgcggacatcggcatgaagatcatgcaggatttcgccagccgcatcgaggaatacggcaccatcgagcgccgccccatgctggagggccgccacatgatcatgattctgggacccaaggcggaaaagaagagcttcgccgaaaagtctcaggcgcgcaaggaaaagcacgccgccaatcaggccgcagcggccgaagcgcccagggagcccaagccgcagcccaagaaaaaggtcaagcgcgaaagcgaaaatatgatttgacccatggaatggccatcctttgccggggccaagccccggcatttcatggatagcacacggaaggaggacaacccctatgcctaagcagaaatcccatcgtggagcagccaaacgcttcttcttctcgaagaacggcaaagtgatgcataagcagatgaacgcgaaccatcaggtgcatttgaagaccaccaagcgcacccgtcacctgcgtgcggacggtgtggtggacaacgcggccgaagcccgtaccatccacaagctgctgccctacaaataagctttgctaacgattcaaggaggataagaaaatggcacgtattaaagcagccgttaacgcccacaagaagcgccgcaaggtgctcaagcttgccaagggctactatggcgccaagtccaagcagtaccgcgccgccagcgagcaggtcgcccgcagccttcgctatgcttatgaaggccgcaagatgcgcaagcgcgacttccgccgtctgtggatcacccgtatcaacgccgccgctcgtctgaatggcatgagctacagcgtgctgatggatggtctgaagaagaagaacatccagatcaaccgcaagatgctggctgatatcgctgtgaatgatcccgccgctttcaccaagctggtggagaccgtgcgcggctaaggaaaaccgttctttcacccccttgagcgccccgcgccgagggggttttcttatcaccgaaaggaggcccgcccatgccgtccgttaccacgcaggggatcgtgcttcgctatgccaattaccgggagcatgatcggatgctgaccattctcagcccggattatggccggatcgacgcgctttcccgggggtgccgccgtccgaaaagccccctgatgcccgtcagcgagctattcgtcagcggcgagttcgtcctctatcagagccacgatcattttaccctgacctcctgcgctctggcggacagcttttatcccctgcggttggagccctaccggctgacctgcgccagctacatggcggcgctttgtcaggcggcggtccagcccgggcaggaatcccgtggtctatacgcccttctattgaaagggctatactatctgacctacaacgccgacgcggacgcgctggaaaccacatcggcctttctgcttctttttgcggtggaatgcggctaccgtccccggctttcccgctgcgcccactgccgccgtccgctggacgtgacctccggtgggcgtttcgatgtcgaagcgggcggactttgctgcccggactgttccagccgttccaccattcccgtcacttccgcccagatcgactggatgaaggagaccattctaggtggtttaacggttcgtccacgcggcgaaggctccaccctttttgatcttctccgccgctacgtcgaatcccgtctggacgccgtcatcaagcccagccaccttctgcaggggggctgagcccctttcggactgcgcgcctgtggcgcgcagggcgctcgagggacatgcggcttggccgtgaagctaccgccgctcggcaacgggcctcgcggctcgccggtctggcaggggatgatcccctgcaccccactccgcgccatagggcgcgggggcgtagagagacatgctggttggcttggttttaccgccgtggcacgacaggtgccacggctcgcgggtttggtgcgattttccgtttattggcaagagaaggccgccattgccccgcccgctgtatcgaaatcgtgaccttttttgccactgcttgcaggttttttctttcttttctcgttccattttatgacaacgctttataatggaggggtggtcatgaaaaagttgcgattggtctcactctgtctttctctgctgatgttatggccgacgctggctatcggagagggacgctcctactccattcgagagttgtccggcgtgacttctccccgttggcaggaaatttatgaggcttacggacgaacgattcctgtcgatggggagatcgaaattccatccgtggaaactgccccggtgattctggtgcaggctgcatctccgctgcctgacgcgcgtgtcgaggagcttcaagccttttgcacatcggccatggaaacggacgaggtcaactcctacagctttcaatcgacccctttttcgacggcttacgatcacgcaacgccgcccatatggggaaaaacgcggaaggacgacgcttcctacaatcaggctgtcatgggttgggactctcatcttttgtcggattaccgcatggacgcggcttacgcggacaacaatgcccttcttttgggggatgctgttgcggctgcgaaaaaacaggtctcggaattatttccaaacgactcgctggatttaaccaacgtcgccgtttttgaccgcgctttttccaaaaagaccggggatcccatcagcgaaaaaggctattatcacttggaatttcaccagatcttccacggcattcccttcatggggagcgttcacagcaccttctccaccaaagccgttggggatgaaaactatctgctggaaagccgtggctgcgcttctgtcgatgtctgggacgaagattcctttttactcaagtgtgtcttttatgaggaaaccgacgttgtacgggaagacattcccctgcttccgtttgaatgcgtcaagaacaaagtggaagagtggattgacgcgggctacattcgggcggtcgatcgtgcagcgcttggatatgtgcagtatgatacggagaacccgcaggaacagcttctgctgccttcttgggtcgtgtgggtcgaatatcagcaggacggccccttggcggaaagaaacgggccgttctacacggacggctggttggaggatgagccgtattatcgaccgatcattctcaatgcgcagaccggcgaaatgatcgacccggagaatactgaatatggacgatgccttgcaccgtcgatcattcaatagaaaaaggcgagcggaaattttccgttcgcccttttgctttatgttgcgcctgtcaggctgattcccccgccgcttcttccagtacaattcggcaaaggccctctaaacactccacattgctggcgatcaccgccgtggacaggtcaaagtccactttctcgttcaacggcatggtaaatgcgccgcccgcctccgtcaccagcagcgcccccgccgcgatatcccacggtttcagacgcagctcaaaaaaagcgtccatgcgtccacaggccacgtaggccagatccagcgccgccgagccggaacgccgcagatcgcctgcttcatgcagaagccgataagcgatcttcatggtagcgcggctcagttcttcatagtagggagccgtgccgaagccgatcagcgcgttattcagcggacgatgggagacggcgatccgctttccgttcagccatgctccgtgccctttttccgcgctgaacagttcctccgtaaagggattgtagacgcaggccagcacaggcttccggttccgcagcaatgccaccgaaagggccgaatgatggtagtggtggatcaggttcgtggtcccgtcaatggggtcaacgatccacgtttccccctccgagagcttctcgttttccttttcctcgcaaataaacgcagcatccgggagcagcgcgctcagttcctccatcaacatccgctgaacccgcacgtccatatccgtcacaaaattggcgtggccttctttttccgtcaccgacaattccgccgccgtgaccaccgtttgcccaatgcggcgaacaacggcttccagttgttccagcatatcgtttcccccttcgtttttctatagcgattcatcaaaaatccggctgcccccaacgggaacagccggatcggcttatagcattccgagaatccacatgaccagcagactcatgccgccgaccaccagcaggcagggaatcacgatcacaaagaacgccgtcaccaccatgatgaccttgtcctgaaagggtacgccttccatgcgctcgctaaattccttctcctgctcaggagtgacttttttcagacgcttccagatcatgcctgaggctcctgcgccgcggtacggttggacttcttctccatcttgggcagctcgaagaggtagttgccgttctcatccagcttcttttcggggaagtggcaggccaggaaatgaccgggttccacctcccgcagctccggcgggacgcgcttgcacttgtcgcaggccatgtagcagcgggtgtggaacttgcagccggacgggggcttgatggggctggggatgttgccctccagcaggatgcgctccttgtccagactgtcggggtcggtggtaggaatggaagacagcagcgccaccgtgtagggatgacgcgggtcgcggaagatggtttccgcatcggccagctccaccacgttgcccagatacatgacgcagatacggtcggagatatagcgaaccaccgacaggtcatgggaaatgaacatgtaggtcaggttctctttttccttcagctcctgcagcaggttgatgatctgggactgaatggacacgtccagcgcggagacgcactcgtcgcacacgatgaacttgggctgcaccgccagcgcgcgggcaatgcagatacgctgccgctggccgccggagaactggtggggataacggtgcagcatataatcctgcaggccgcatttctccatcgtctcaatgatgtactgccgcatggcttcggagccgtgcttgtagaagtggtgggtcaccagaccttcctcgatgatctggccgatggtgaagcgggggttcaggctggaatagggatcctggaaaatgatctgcagatccttgcgcagcgcccgctgctccttatatttcagccgggacaggtcaacgccgtcatcccgcatggcttcatacttggcaaattcgggattatcggcatacttctgccgaagcgccgtcagagaagcctccacatcggcgatctgctgatcctgaacggcaatctcactgtccagcgccttgatcttttcttccagcttttccacgccgccggcgttgctgcccttgcggtgctccagctctaccgacagctccaaacgacgggctgacagctgtgcacgtttagcgctggcttcgtactccctcaggatcagctgacgcccctgatcgttgtcatccacggcaaagaagccgccgacgatcttcaccatatgatccaggcaggtctgttcgtcgcagcgggccagattccgatcctgcagcaggtagaagtcggccttgtcctcgccgatttcttccaccttgcggttgagctcggcggccttttcctgcgccttcttgtacttctgacggtacttatccagatgacggagcgtatcctccatgtagctgggcgctacttccgccagcgtcttgccgtagtacatggtgctgccggccgtctggggatagagctgcagcagcacccggcccagcgtgctcttgccgcagccggactcgcctactacgccgatggtctcgccctcgtagatgtccagcgaaatgtcctcgttggcgcggacgtactgctgggtcttctggaagacggaggacttggcgacggggaaatactttttcagattagtgatggacagtaatttctttgtgtgctgcactccgtctcacctccttctccgggtagaagcagcggatcagctgcccgttccccatgtccttcagctcgggttcttcttccatgcacttcttcgtgcagtatttgcagcggggcgcgaacttgcagcccttgggcagggccagcgggtggggcaccacgccggggatgggctcgatcttgtccttggaatccagccggggaatggagaacatcaggccctcggtgtagggatggctcattttgcagtcggagaagatggtgcgggcggaagccttttccaccacctgaccgcagtacatcaccgccacgtcgtccgccatttcgttgatcacgcccagatcgtgggtgatgaaaatgatgctggtgcccttttcttcctgcaattcgttcatcagacgaagaatctgcgcctgaatggtcacgtccagcgccgtggtaggctcgtcggcgatcagaatcttcggacggcaggccagcgccatggcgatcatgacgcgctgccgcataccgccggacagctggtgaggatactggcgaatgacggcttccgggttgggaatctgcacgtccgccagcattttcagtgccagctcatgggcttctttcttggttttgccctgatgaatgatgaagggctcgctcagctgacgatccaccgtgaacacggggttcagggaggtcataggttcctgaaagatgacggagatcgcattgccgcggatctggtacatttcgttcagagacagcttggtcagatccctgccctcaaaaagcacctcgcccccggcgatgtaaccgttggcgtccagcagctgcaggatgctcatggcggaaacagacttgccggaaccggactcacccacgataccgatggtcttgccgggctcgagggagtaggaaacatcattgacagccttcacgataccctttttcgtcttgaaataggtatgaaggtttttaacttccaacaacggcatttctctttcccccttacttatcaatgttggacttggggtccataacgtcgcgcagcgtatcgcccacgatattgatgcagatcgtggtgatggccaggaacagggaggtaaagagccactgccaccagtagttgccaatgatggtggcgttgttggcaccgttcagcatattgccccaggtaggccgcggatagtgaacgccgaagcccagatagctcagggaggattcggtcagcatacagccggcgaagtccagcgtcagggtcaccaggatgacggagaccacgttgggcaggatgtgcttgaaggcgatcgtccgctcgctgacgcccatggccttggcggcggtgacgtactcgctttcgcgggccaccagcacctgaccgcgcaccagacgggccagcgacggccatgtcagcacgcccagaatgaccatgataatgaagatacgcatatcctcgctcaaggtcatctggctcatgacggagctcaggatcatggcgaagggcaggaagggaatggcggtgaagatctccgtcacgcgcatcagcaccatatccaccttgccgccgaagtagccggacaggcagccgatgatgataccgatgatggtggagaagataacggccacagcgccgatggtcatggtcatcttaccgcccgcgcagatgcgctggaagatgtccgcgccataggtgtcggtgccgaacaggtagcccttcagaccccaggtgccaagcagtttgccgttttcatccacggcgtagttctggaaggagccggtgaagacctgcgccgcgccctgcaccttggcaggcgcatttgactggccgaagtggttcttgccccaggagtacacatgacccttgttggtaatgccggtgtaatgataggtaccggcgctgatgctgccgatcaggaagtgctcgtcctcttccaactcggggatctccacgcagtcggaggtgaagtcgccggacagggcgatagagccgtcgctcagttccagacagagggtatcgctggtggccacgatccgctcgatggtgcgtccgtccaggaaatccttagtcttttgggactgggcgtacacgttggtgcgcagggtgccgtacaggccgcgggtgccggtgtaaacgctggtgccttcttccttaatgccgacgatgtagttcagcaggaaggccacgtccttcaggccgtgattatcgaggaatttgtcgatgttggcgtaggtcagcttgttgccccacatatacagggtgccgtcgttcatcagaatggcggagcactgatagccgcaggtcagcttcttgacgttggccacgtcaatgccgccctccaccatgatctcttccggcatcacggcgatattggggttatcgatcatttcctgcgtgcggccgtactggcccagcttgttattgccccaggcgtaaaccttgccgttttcgccgatagctacaatgtgatcgataccggcggccaccatggcgatcttggtattcttgacctcgtcgggaatgttggccacgttgacgccggtagtgccgatctgggtcgcgccccagacatacaccttgccggcgttggacagacccacggtaaagctgccgttggcgtcgatcatcttaatatcgtcccgtagctcccggggcacggacatcatgctcatggtcgggggcacgctcttctgggtgacctcggtgtagctgtccgaatagttagtcaggaacagggggccgatgaacacgaacaggaacatggcgatgaccacgcacagcgcgaacacggccagcttccgttccatgaaattacgcaccagctgacggccggggctgacgatctcttctacatcgttgatgcggttttcttcctgctgctgcagcgtttcctcggcgtactggcggctggcgcccatgaaggcgcggctgatccagcggaagggcgcaaagccctttttggaggaggactgctgattctgctttttgctcatttgcttctctcctccttacttgctgacgcggacgcgcggatccaccagaccgtacacgatgtcgataatcagattacccaacagggacagcatgacgtagaacatctgcagcagcatgatgacgtcaaagtccgccgtgcgcagggacgaaatcatcaggtcgcccatgccattcagggcaaacatctgctcaatgaccacagagccggagaaaatgcccaggaaccagcccaccaccagcgtgacgatgggaatcagggcgttgcgccaagcgtgagaatagatgatggccttttcccgaacgcccttggcccgagccgtcttgatgcagtccatggacagcgcttcgatcatggaggcgcggacgtaacgggtcatgccacccagagagcagaaggtcatgacgatcaggggcagggccaggaaatacatccggtcggtgaagaacttccagcccgtgtagctgctgcccggggtcttgatgccgctgggcgggaaaatgtgcagcagcgagcagaagatccagatgaataaaatagcgatcaggaaggtaggcaggctgtagccgatgatggtcagcatctgcacggcctggtcgccccggctgtttttcttgacagcacaatggatgcccagaggaatagtgatccccagagccagaatggttgcgaatatattgataaatatggtgttgcccatgcgaggcttcaccacgttgatgacctcgtcgcgggcttcatatgaataaccgaagttgccctgcagcaggccgctgtagcttccgtcatacaacggatacaggcctacccagcggagatagcggatcaccatgttattggtgtccgtgccgtaacggcgctgatatttcaggtatagttcctgaaaacgggtgtccatgtccgcggcggacatgccttttttcatggtctggatctcagccttggcgtccgtataggcacgattgctgggaaccatgttgtaaatgataaacatcaaaaaggacaaaataacgagaactagcagcatatagccgattctcttaacgatatatctacccattgatcattcctcgctccgactcctgtccgggaaagacatcgttggctttcctagaactgtaatatccccaaggcaggggatgaaccctgccttggggtgagggagcgaaacgctcccgaaccgggtctcgtttttgttgcgattacttcagccagtacacgtcggcctgatccttgatgtagtacgcagaatagtcgtcgtacatggcgggatcgatggtcatctggtaggagtagtcatacgcagcagaggtgaaaccggtcgcgaagttgaacacggagtacatggggctgccagaatagtagccgtacaccgcagcctgatacagttcgtccagcatgggcgagaagtcgccgatggtgtactgcacgttgaagccggcggcgatcacgttgtcgttggaggcgaaaccggtcatcagctgatcggtgaaggggttgtcggaggtgccgtaccagttcaggaccagcggcatatagtagtcgtcgccgaccttggtggtcacataagcgccgtccttggacttgtagttgatgtcgttctcggtagcgatatcgccggggatcttcttgtagcggacgccatcgacgtagtcgttgccctcagcatcgtacacccagccgccctcggtcagcacttcgatggcgctgtccacggaggtagcataggcgttcaggatcatgccctgatccacagcggccttgtacatccagctgccggaatagtaggggccgtccacaacgccgccatagccgccggtgaagtccttggcgaacttggcgcggtccatgcagtaggcgatcgcctggcgcacttcggtgaactgagcggggccgtagtcggcgcggaagcccagcttcccatatccggcgcggctgtagtgggtgtagacgtacttgccgtcggagccgtcagccagcgccagcgcttcgttggtctcgtcgccgccggtgatgcccgcgatgacgtccagcgtgccggccttcaggtcctccagctgagtgctggaaacgatcttcttataaacgaccttggcgatggtgggcttcacgccttcgtagttgcccttgaagttggggttcagctccagcacagcggacttgtcggcgctgtcgtaggacttgacaacataggggccggagtagggataggtggtgtcggtattctggctggcagtcacgatgtggtcagccatcacgtacttgtcgccttccttggcgtagaagtcgtcggtgaagtacacgccgttgccgtcgtccttcacgtcggcgtcgccgatccacagggaaacgtcgtaggcagacaggccggcgtaggagatggcgtagaagtagttggcgtaatcggcagacacggtgatggagtaggtgtaatcgtcgatcatccgcagaccggccagctccttggtgccggagccctcagtgccgtcataggtgttgaaggtcttgaagccctccagcgtcatggcggactggtgatccttgccggcggcggccacgcccacagggctggagaacaccatggggaagaccacgtagttcttcacggtgacgggggtgccgtcgctgagcttcagatcgtcatagatggtcacggtgtaggtgcgggtgccgtcctcgttcatggtctcttcgtgagacttcacaacggtggggttccactcgaagccgccctccttggtggtagcgacggtttccagaccggtggacaggttctgcacgtccagatcggccgcgccggggttggtgccaccgaaggtcgcgtaacggaacttgccggacagatcggtggtgttgcccataatgatgctgttgtcctctttttcggaggtccagtcgatcagagcggcggcgggagaccagtaggggttggtgggatgctcgtccgtgcccttgatctgcgcgttgtacagatcgtagtactcgttggcgtacaggggaatttcgggcatcaggtagttccagcgctgcatgtagtagcgccaccaggtcgcgtacacatcgtcttcggtatcccagccgtcgacgacctgggtgttgtaaaccatggccatgctcaggaagtcgaggcccagctcgtactccacgccatccttttcgatgtagcacaggccggtttcctcatcctcagtaacgtcggcgatggtggtatccttgccaaactgagaatacagagaggtgtaatccacgccgtattctttgccattgatgctcttggtctcagcttcctcagcgaaggcagcgggaaccagagagagcagcatcgcagcggcaagaaccagagagagcagcttcttcatgttcagtgtccatcctttcttttcgcttcccgtcgaacattgtttcaggaatgtacagcggttattcctgattttacgtcatactgaccattttgtcaatgttctttcccgatttccagcctttttctgcacaaagccatcacattgttcgcaataaacgtcttgatttccttcacttgtcaaaacgaatggtttttttcgcaggctctttgaggctccccagccgttgactcagccctgttttcagctcttttcagccgaatttccgcctgtgctcatttgcagtttgttctcggattgtattcaattttggcttacgggtctgtccgctggggaggacgtcccttcccatcttcccggaaatgttcggaaaaacgccattcaaagaaaagcagtatataaatatatagaaacaaaaaaacgaccctttcgggccgtcttttttggttgcaccattacgcctgggcgggagctcccacggggcaggtgccggcgcaagcgccgcattcgatgcacttatcaggatcgatcacgtacttgccgtcgccctcggagatcgcttccacggggcactcggactggcaggcgccgcacatgatgcactcgtcagaaattacatatgccatcgtcgtttacctcctgtattaatggcaggcttcttttgggaggtctgcttagatgaatgataacacgaaagcggccaagttgcaagtacaaagcgcccctgtttttccttccatttggaatttgaagcagctgctttccgtcaggctttttccggcgcgggaagctctttttgtttctcccgcagggcggacaattcttcgtgaaccttcgtcatcacagggatcgccatatccaccgctgcctcgggggacagattccgctcgcagagcaccagctccggctttttgcccacagcgaagcgcagccgcccgtccgctttggtgatggcttcaaacagctgatcgggctcgggcatgtgccgctcatccagccgcaggtgaacgccgtcgggccgcagggacagatggctgacccccaacttgcgggtcacgccccgcagctgggcgatgcggatgaggttctccaccggctcgggaatatcgccgaagcggtcgatcagctcctcctcgatggacaggcggctctcctcgtcctccaccatggcgatgcgcttgtatacctccacccggaggcgctcctcccggacatagctttccggcagatacgcgtcgatgttcagctccacccgggtatccagctcggggatctgctccttgccctgggcctcccccaccgcctgctcgatcagcttgacgtacatgtcgtagcccacggcgctcaggtggccgctctgctccgggcccagcacgtcgcctgcgccgcgaatttccagatcgcgcatggcgatgcggtagcccgcgccgaactcggtgaactcccgaatggcgttcagccgcttctgggcggtctccgacaggctcttgttggcgcggacggtgaagtaggcgtaggcctgacggctgctgcggcccacccggccccgaatctggtacagctggctcaggccgaaatgatccgcgtcaaaaacgatcagcgtgttggcctcgggcacgtccagcccgctttccacgatggtggtgcacagcagcacgtcgtaggccccggcgtagaagtccagcatcacgtcctccagcgcgttttcccgcatctggccatgggccacgccgatgcgggcctccggcaccagcgcctgtatgcgctggcgcatctgctcaatggagcgcacccgattatataggaagtaaacctgcccgtcccgctgcagctcccggcggatggcctcccgaatgatgccgtcgtcgtagtccatcacataggtcttgacgggcagacgttcctccggcggcgtttccagcaggctcatatcccggatgcccaccatgctcatatgcagggtgcggggaatgggtgtggcggacagggtgagcacgtccaccttttccttcatatttttaatggcttccttgtggttcaccccgaagcgctgctcctcgtccacgatcaaaaggcccagatcgtgaaatttcacgtccttgcccagcaggcgatgagtgcccacaatcatgtccacttcgcccttttccagctttttcagggtctccttctgctcggcggcggtgcggaaccggctgagcatctccacccgcacgtcgaagccggaaaagcgcttcttgatggtgttgtagtgctgctgcaccagaatggtggtaggggccagcagggccacctgcttgccctccaccacggccttgaaggcggcccgcagggctacctccgtcttgccgtaccccacgtcgccgcacaaaagccggtccatgttgtgagggctttccatgtcggcctcgatctgggccacggactgctgctgatcctgcgtcagctcgtaggggaaggcgtcctcgaattcctgctgccacggattttcgtggctgaaggcgtagccggggtttttggcccggcgggcgtacagcgccgccagatcgaaggccagctttttcagccccgccttgaccttgctcttttgacgctcccactcgccgccgcccagatggttcagcttgggcaggctgtgctccgcgccgatgaacttctgcacccggtcgaactggtcggcgggcacgtagagcttgtcgtttccggcgtactgaatttgcagatagtcccgggtcacgccgtcgcccttcatctgggtcacgcccagataaacgcctacgccgtgcaggtcgtgcaccacgtaatcgccgggcttcaggtcggtaaagctggaaatccgctcccccgcgttctgcttcttccgggcccggtgataggcggagccgaaaatatccgtatcgctgagcacgcacaggtgcgcgtccgggtgcagaaagcccttgttataggagaccggcagcagcaccacctcccgcaggatgatgttgccgtccagcgattcgcagtacacggaggggatgttcatctcctccagcgttttctgcagcctgcggccccggttctcgccgccggtcagcaggatgatggcgcagttctgctccttccacgccctgatgtccttgcccagcgcggccagctggttctgatagggcatgggcggcttggagccgaaggcgatcagcttatccggcaggagccgtcccagcgaggtctgcacgttgtcgctcagtgataccacgggccgcttttcccagtcgaccagcagctcgtcataggagaagcgcaggctcttctgcccgtcgaaggcgtcgccccgcagccgggcgtcctcataggcctcggcaaactcctcctgcaataccttcatgcgcccggcgtactgctcgggccggtcgcacagaaggatggggtcgtccagataatccagcgcggaaaccgtcttctcgcacagcacgttcatccacatgggcgcggtgcgcagggtctgtcccgcttccaccagcgcggcttcgtccagatggcgacgctcgtcgggcacgtccttctgaaatgcctccgccggttccgcttccttctcgggggcgctttccttcgcccctttggctttcctgcccggccgggcggctttcccgtccagcaggtcttcgctgagctccagcgcgtccagttcggaaaggaactcgtccagcgccggcagcgtatcgccgttatccagcgtggtctcctgggcgtgaagctcctccgcctttgcccgctcccccgcgccggtctcgatggcccggcgaagccgctccgccgccgctttccggtcggtcacaaggcattccgtggccggggcgatacgggccgtggacagccgctcaatgctccgctggctgatacagtcgaaccggcggatgctgtccacttgcgtgtcaaaaaactcgatgcgcagggcgttgccctcgttgggcgggaacacgtccagaatggagccccgcatggcgcactggccgcagccctccaccatggagacccgctcgtagccgctagccagcaggcggttcatcagttcctccgggggataatcccggccttcctccagcgcgattacgctctggcggaaaaccgccttcggcacgcagcggtccagcaggctttccagactaaggcacagaatgcgcgcgtttttccggcaaagctcgtccagattgcgcagccgcagccacgtgctttcccggctggacgcggcgcggctgaactgcagatctctcggcggcaacacgccgcatttttccccggtcagccgctcaatgtcctgcgcatagcgctgggccaccagctccgtggagcacagcagcaccaccgggcggcccgtcttgcgccgcagcgccgccgccagaaagggccgctcgccctcggaaatttcataaacggacgtacagcccgcccggcccagccgttccaccagcgttttccactcgtcccggctttcgtaggcgctgaaaagcccctcgttcattcttttccttcctccgcctgctccgaagccgccgcgtcgtccccctccggggccgctttcttcgttgacttctccttctttggcttcttggtattatagcgattcatagcgctgttaatcccgtttttcagatattccagcgctgcgtcggcggcctgctcgtaggccctgtcggcgatctcctgttcctccgccgtctgataatgactcaacacccagtccgccagattccagccgaggccccgctggcccacccccacgcgaatgcgggggaaatcctccgtgccggtctccgccacgatggaacgcatcccgttgtgggtgcccgcgctgccgttgggccgaatgcgcaccgtgccctgcggaatgtcgatatcgtcatagatcaccagcacgttttccggcggaattttatagtagtccatcagttccttcacggccagaccgctcaggttcatgtaggtctggggcagggccaaaattaccttctgcccgtccacgaagcagtcggcggtctgggaatagcccttttcccggctgatagtgacccccagctttttttccagcacggccataacgtcaaagcctacattatggcgggtatgggcatactgctggccgggattgcccagcccgacgatcagatacattcttcccgttccccctttacggacaaacacgttcggcggggaccgcattgccgcccccgcttttcgcagctattgtagcatgaaagcgggctttcggcaagggaaagcggcccttcctccgctgaaaaagcgtctcccccatgcttgctctttggggagacgcttcctttattcaatttactgcaaaataagccttttttagcagctgtgcgccattcagcggggccagcttacttttcccgcttgaactgccggaaagaaaagtcgccgatcagaagcggaaacaggacttgtccgtaattcacaccgccccagccccttgccccaatccccctcggccaaagagaatactccctccacgcagaggatcagcgcgatgacgataacggccaaatatacttttttcatgcgcattcttccatccctctcaccttgacggctcccggagctttttccccatttcgatccgcacttcatgccgttccgggtcgttgttggagtaggcatacagatcgaagccaatgatggaaaacccgtttttccgataaaacgcaatggcgctttcattgcaggactgagtttccagcacgatcatccgcgcgccgctggcctccgccgtttcagtgatacggttcataagcgccgttcccactcccccatgccgccgggcagggtcgaacacgcagatattgctgattcggaaacggttgttccagctttctatcgagccttccacaaacccgatcagcttttcgccctcaaacgcgccgaaggcgaccggggcttccagctccagccactctccaaaaaactcatcctcctcaaaggacttctccgccggcgtttccagcgggatatatttcatcgaaaagccctgttctgaaggttcaatatcatagtatccgccggtttgataccgaaccgtaaatttcctgcccgcgtaggtcccgggattcagcggcagaaggatcatggggcgcacacctccataaactggaatttatcccgataaagtcctcatttgtcgcagcagacagaaatgcctttcaaataatcttcccgggtcaattctaaatgaatgattcggtcaagtgttccggtttcccgaaaaccaaccgctttgtggatacgatatgcagcaacgcgggcatcctcaaaatcgttgtgcaaacaggatactccgtccaccttaaacgcacgatccaacaataggcgaagtccttgtttgccatacccttttcctctctccggcgcgaaaatcacaattcccatatcacaccagttctgtttcggattatgatgataattcacgtctccgacaaatcccccgtcgttcttcctttgtagaaaagcgtagaatctctccggggctttcccgatccaagatttctgcagttccacccaccccgaatccgggtcaggaatacatccgtcaggcggaaaccaaggtgcgttataagccattgtctccggatcagacatcattttcacatagaaccatccatcctctgaacgaggaatatatagctgtaactcgtctatcatttctattttctcctcagcaaattccgatttcggctgcgttcccatatcccgctttccgggcagagccatgtttctgaaaccgcccgttatggcagcgtgaaagcagtctgcggcctctcattcattttgctgaaaatcagctgtttcttatttttcggacgttgcggttcatcaagtgtctccccagattccgatacataaacgccttaagggccgacatttcctgatggtgctcccgcagcagctcgtccggagaatcatagaccccgaaatcctgattgatgccctcgctctgaatataggtattgtttcggtcaaagtcgatggtcggatgctgaaaatccttcactgccacgccgtagccgcaaaaagcgcccgtgcagtcgctgtacttcttttgcagcctgtgcagataatcgctgtccagaataaacgcttccaactcgtaccactggtcttccagacagacctccacccagctgtggaagacattctgcggagcgtttcgatacacaatgcccgtcatcgcgcccttttgaagcttcttatcaatggtgaagccgtggactctgcaggggatcccgcaggcccttaaaagcgccatgaacagcgttcccttcgtgttgcactgcccgtacccatccgccaaaacccgggaggcgggaacgccgtcgtccacattatacccgaactgtatctcatcccgcacaaaaagatagatggatttcagacgctcaaattcgcccatttccttccagccttttttctctatcaactgccggatttgggcgtttgaatagtccagcataggggtttccatcaaatagcggttcatacgtcctcctgaaattcttaactgttctttctgtttttcactcgccaacatccgccccggcggaatgggaaagtccaacgcctgatatgcccgaaccgtgttcttcttccagcaggttgtgaagaacctttgtaatcgtcgattctccctgatgattccatatgaactgaacgtcgctgcccacgactggcttttccgtcgtggcacccgctaaatgggccgaaatgagcttttcccagtaccgaacggaataaacgccgtcctgaatcgcttccaccacgcctaagtgctgcccgaaaatctgctggaagccctcctgagccttcaccttccgatattttggaaattcctcgccgatcctgttcagcgcctcctgaccgtccagcttttcaaaatccgggctttcgatcagcttcccatggatggaagaaaaatcgtcattcaagggaaagaccatcagcgcgtcaggagaattgccccaagcgtccgtaatgccgaactccgcccctctgcggaagccgaagcggggataataatacggttcccccataatgataatgcccgcagcgccgaatgacccggcaaggccaagagtttcccgcaccagtgcgccgccgatgtcgttgccctccatcatcggctccaccgccagcggcccgaacgtgacgacctcgcgccgggtatcgccgtccacgatccatgctcttgtgtagtagatcgccccgacgatctgtccgttccactccgcgacgcggctcagctccggcacataatctcgagagtctcggatgatccgcgtcagcagatgctccgtgcatcccggccaatacttgttccaaaagctgcgcatgaccatctgttccgtctggtgatagtcggcaggcgtttcctgtctgataatcagatccttcagcattttccggctccttttctggatgaaagcggcgtttttccgaatgcagacttgcgtccccgtctagggaatatcctatcatacgttccatagaatggcaatgacgcaaaacggccgcagcatatttccatgccgcggccgtttgaatttctatgcgcccttcgtctgaaaaaggcgtttggtttttacttgcggtacagcacttcgctgcgcttgggaccggtggagagcatccgcaccggcacttcgatttccttctcgataaattccacgtacttgcggcagttttcgggcagcttgtcccattcggtaatgccgcgcacgtcgctcttccagccgggcagcacggtgtacaccggcttggcccgcatcagggaaggcgtggaggggaagtcccgcaccagcttgccgtcgatctcgtaggcggtgcagaccgggatctcatccagataacccagcacgtccagattggtcatggcgcactcggtagcgccctgcgccatgcagccgtaacgggtggccactgcgtcgaaccagcccacccgacgaggacggccggtggtcgcgccgtattcgcccgcgtcgccgccgcggtcgcgcagttccttagcttcatcgccgaacagttcggtagtgaaagggccagcgcccacgcagctggaataggccttggtcacgcagacgatgtcgctgtaggcggtcggaggaacgcccgcgcccacggtgccgaagcccgccagcggagaagaggacgtggtatagggatagatgccgtgatcgggatccctcagcgtacccagctggccttccagcaggatggtcttgccttccttcagggcctggtgcaggaagctggtggtgtcgatcaccatgggccgaatctgctccgcctgcttcttcaggtgagcgatcagggcctccaaatcgatctcgggcttgtgatacaggttgcgcagggtggcgttcttctgctccaccgcgctggaaagccgggcgcgcagcatgtcctcgtcatacagctggcagacctgcacgccgattttcaaatacttatcgccgtaaaaaggagcaatgccgctcttggtggagccgaaacccgccttgcccagccgttcttcctcatacttgtcaaaggccacatgatagggcagcagtacctgtgcccggtcgctgatgtacaacttgggcatgggcacgccgcggctgaccagactgttcagttcctccacgaaccgctccacgtccagcgccacgccggggccgatcacattgacgatgttgctgtggaacacgcccgagggcagcaggtgcagcgcaaatttaccgtaatcgttgataatggtatggccggcgttggcgccgccctgaaaacgaaccacgatgtcgctgttctccgccatcacgtccgtgatctttcccttgccttcgtctccccagttggcgcctacgatgcttcgaaccataactgatctctccttcactcgcttctgcggccgggacaaaaataagcataggccattcccctttatactatatttaagcaagaaatgtcaagcggacagaggaggacttttgatgaagaagagccgtcttttccctaaaaagcacctatcggggctgctggtgctggcacttgcggggcttttgcccctttccggcgcgctggcggcggactatgccgacggcgtttaccaagatctggccccgggctacaacgacgacgtgatcgtctccgtcacggtgaaggacggcaggatcaccgagttcgacgcgaaaaaccgcaacggcaacgaatccgaatatttcgggaaggcgctggagggcatccggcaggccgtgctggaaaagcaggggttggaaggggtggacgcggtcagcggggccaccggttcttcggacagtatgctgaccgccatgaaaggcattctggagcagcttcgcgcaggcggcggagagggcagcgtcagcagcgaaaacacgccgtctgcccagccttcccccatggtcgatcccgccacggcgcaagtcttttccgggcttggcagcacggccaatttccgcaacggccccggaaaggacgcggagggcacgccggtctattccttcaacatcgccatggcgaacgcgctctttgaccgggagggcaaaattctgaacgtatttgtggacgtgtatgaagtatccaccccaaattatgacggcgaaaccatgcctcatttcagcggttggccgggccgggaaggctacaacgtcaccgaccccgccaccggcaaggtcacgggcgtcagccagaacaccgaagaaagcgccgccgaggagctttcccagtggaaaaccaagcgcgaccggggcgacggctacggcatgaatccctccaacgaatggtacaaacaaatgaacgcctaccagcagtggatgaccggcaaaaccgtggcggagcttcgggactggtatggcagctccacccgcccctccacgggccgtcctcttgacccggcttcaaatggcgaggaggatcaggaacggctgtctgccctgagccagcaggaaaaggacgatcttgccgacctgcgcagcatggccaccatgagcctcagcgacagtcatggtctgcttctggaagcgatcgagaaggcgtatgaaaaccgagtgccggtgggcggggtagcagtagaataatgagattggccgcttttctgcattttcatttaacatatgagtacaagaaaatatgtgttgatttgtaccgacaagggagatggtcagagacaccagacggagtaaacgaaaaacgatttcacgatacgattcggacttgggttcgcatagaagatgtttgcgaaccagaagtcctgaggcataaaaaccagaacaaagtatggacagcagaaaaaaatatgaattggtagccaaagttttagctggtgcatcgtgtagagaaacggcaatttcggtcggaatcaataacggtctcttgtatcaatgggtcagatactatagaaatgaaagggtatcaaggattggccgctcaacgaaaaggatgaccacccaaggagcctgacatggaaaaatgtattggcagagttaaccccatccgaacgagaggaaatgattcagctcatagctgagaacgaacttctcagagcggagaatgccgtaataaaaaagaaatcgccttgagagaagaacgatgcgcggcgcaactcaaggcgaaaaagctgcgctcgtccaaaaactgcgcaaagaaggatacgaactgaacgatttgttggatgcaaccttcttcctttctgccgcttaaaaggttctcaatctccccgccccaaaatcttcctttgttgattgagcaattccgtcttttggcaaaattgggatcaaaaagtcgtgattgggcaatttatccagtaaaaatgtacgtataattcaattgacggtcagaaatgacaaattatatactgataacatcaattaaaacttcaaggagggtaccccatgaaacgtctcgtcgctattgcactgactctcatcctgtgcctcagcctctgttctttcgctgcggcggaagaaacggacgtgtacggcaagtacgaagaacccatcaagctcaccattctaagcgaggacttcaagaccggcaacaccaactatgatgcgaacgacccccgccgcgcctccgctacccagaacgtgtggatcgacgcgtacaaggattatctgaatattgatgtggaacgccagatcgctgaagacgaaaccgcgctggcagcactcatcaataccgccatggcctccggtgacctgcccgacgtcatcatctgtaacaaagccatgttctacacgctggtagaaaacggcgtactgcaggatgtgcgcgccgcctatgagggctaccagcagaaacgcctggtaaaggacgccctggacagccttgatatgtgggatgcctgcactgtggatggtcagcttctggccgtgccctgcgtgaacaacttctacaacaatacgcagatcctgtggatccgtcaggactggctggataaggtgaacatggaagccccccggaccctcgacgagatgatcgctgtggcgcaggctttcaaggacgccaagctgggcggcgaggataccatcggcatcgccatgaccggcaccaccagccacaactacgacgcgatcctggccgcctacggtgccatcgccggctgctggcagcccaaggaagacggcacctatgaatacgcttatgtcagtgacaccgcccgcgaaggcctgctgaaaatgcaggagatctatgagaagggtctggtcgtgcccgatatggccgtgtgcgacgacaagaccgtggccgagcagatcgccaacggccgagccggtatgtattacgccaccggctggcacgtcgtgaccgacatgaagaccagtatggtcaacgatcccgaagccgtttggacctgtgtggccgctcccagcgtggacggcgaacgcttcaagcagtggaccaatgcgaactgccacactttcacctgtgttactaccgcctgcaagaatcctgaagccgtcttcaaaatgatggaactggaacagcatatgtacaccgagcccaccgatgaagaaattccgaagtattatgccgaccccgacgacgctttcctgtactgggatctgcgtatcttccgcaacttcggccgcggcgacttcgacttctaccgttccaagctgatcaacgaagcgctggaaaagaacctgaccgtggacgaagttgctcccgtgatcaaggacttctatgctcagtgcctgaaggccaaggagggcgaccgctccatgctgggccgcctgatctgccagaccgaggcttacccgctgcagaatagcttgctggaaggcggctggctggtgcccgcctataacggcccgctgaccgagaccatgagcgtgtatgaaagtacgctgctggacgacctgcgcagcgccatcgccaaggtcatcaccggcgaggatatctccgtgtgggaaaaggccgtgcaggattggtacgctaacggcggccagaccatcaccgacgaagtgaacgaatactacgccagccagaagtaaccggcggatcaacgatcccccgtctcagggctccggctccgggacgggggatttttgaaaagatttgtcctgaaagccgcctgatcttatcgcttattttcactttgggaggaattttcatgagccaacagcaaattgccgcgcagcgcagcctcaagcgcaggaatcaattccggcggaatctgcccctgtatttgatgctgcttctgcccgttctgcttctgtttatctataactacattccgatggctggcatcgtgatcgccttccagaagtttctgcctgcaaagggcgtgcttggctccaagtgggtgggactgcagaacttcaagaccctgttcggcatgcccggcttcggccgcgccctgtgcaacaccctgaccctgtccgtgtggaagatcgtgctgggcgtggtggtgcccgtggcctttacgctgctgctgaacgagttgggttccagcggtttcaaacgcacggtgcagaccatgatctacctgccccacttcatttcgtgggtgctgctggcgggtatctttgtgaagctgctgggcggcagcggtctggtcaataagctgatcgtggcgctgggcggcaaaagcattatctttttgggcgacaacaaatggttccccttcacgctgatctttacccacatctggaaggaattcggctatggcaccatcgtctatctggcggcggtcaccggcgtaaacgtggatctgtacgaggccgcgtccatcgacggcgcgggtcactggaagcagatgctccacgttacccttcccgcaattgtaccgaccattatcctgatgaccgcgctggccatcggcaatatcatgagcgctggtttcgaccaggtgttcaatatgtataacgaggttgtttacgagtccggcgatattctggatacgctggtataccgcatgggcttcggcgcgggcggccagttcggcctttccaccgccgccgggctgttcaagtccgtcatttcctgcacgctggtcatcgtgtcctaccgggtggcctacaaaaccagcggataccgcgttttctaaaggaggtcgttcgtcatggctcaagccgctgcaactttcagcgccccgaaaaagaagatcaaggtttccgcagggcggcgcgtgttcgtggttttcaactatatcttctgctttctggtgggcatgatctgtctggtgccggtgctacacattctggcggtgtccttcagcggcatcgacgcggtggtctccaacaaggtcacgctctggcccattgatttcaatctggaaaactatgagatcgtagtgggcgacgcgcagtttttccgctcctatctggtcacgttcctccgcgccatcgtgggctgggccgtttccatgctgatgacggtgctggcctcttatcccatgtccctgcggcagagtgcgtttcccaagcgcaaatatttcgtgtggtacttcatgggcactatgcttttcaacggcggcatgatccccacctatctggtggtccgatacacgggccttctgaataccttctgggccatgatccttccctgcgccgtgggcacctactacatcatcctgatgatgaacttcatgaagggactgccggaggccatttccgaatccgcctttatcgacggcgcgggccactggaccacactgacccggatcatcctgcccctgtgcaaaccctccatcgccacggtgtcgctgttcatcatcctgcagcactggaactcctggttcgacggtatgctctacatcaaggacatgagcctgaaacccctgcagacctacctgcgctccatcgtcatcgtggacagcgcggtgggcgagaccggcatgacgctggaggacgcggtagccaacgccacggcggacggcgctaacggcgcgaagatctttctggccattttccccatcatgtgcgtgtaccccttcctgcaaaagtatttcgccaagggccttgtccgcggcagtgtgaaggagtaagatagaaccatccaaatgagactgcacggcccgccggaacaggcaggccgtgcggcagcatcagggggcggcgggttttgttcagacggacggcgtttacccggctttttgttatttttctggtctgccttctggtgctggagggcgctttgtttgcgctgatcgcgtggagccgcggcagcgttcagcatgagctgaaccagtccacggccaacagtctgcgctatctgagccagcagatcgacgatgacatcgccaatctgcagtatcagatgcagtgcgccacccaaagccggtttatcacgcacctgtttgcttactaccagacgatgaagccgtcggaacgctacaccgagctgaatgacgcgctgacctatctggaaaacctgagcacctacaaccgcaacatcgaccggctggagctgtacagctaccagcatgattttcggctgggcgttggcaaagcgcctgccgtaacctatctgagcagggacgaaatgcgctctctgctggcggaagtcagagagggcggcttccggcttctgtcctcgctggagggcgaactgacggtcaactatatggtgcccatttccagctatgtgaccgaccgggagcccacgttctatcttcgcgtttcctttcgccggacacgggttctggaaagtctccagtccctcgccacggatgggaacgccgccatggcctatctgatttatctgccggaaaaggtggtttacgccactcccgccgcaccggatcacgcggcggcgctgatgagcatggcctttaccggggaagttggcttccttgccacgaaagtggacggccgaaaatacgtggcagttggaaaactgctggatgaaaacccggactgcctgctggtgcagctgatcgatgcacagaaactgtacgcttttccaaaccggcttcagaatctgatggtgctgttcacggcgtgcggctttgtggcgctggcattttatatgctcagcgtccggcgcacggtggcgcggccgatcaacgatcttctatgggctttcgaccgtatcagcgagggacggctgcagacccggctggagccctcctataccgatgagttcgatcggctgtcccgtcatttcaaccgaatgaccgcccaactggccgggctgatcgaaaaggattacaagcagaccattcttctgcaggacgcgaagatgaagcacctgcaggcacagatcaatccccacttcctttacaacagcttctacctgcttagccatctggtgaaaatggaggatcaggaagcggcggagaagctcagccgctatctgggggattatttccgctatattaccgatcagagccggaacgtactgcctcttcaggaagagtacgaccacgccgtgatctatttgagcattcaattgatgcgcttcggtcaccgggtctgcgccgaaatcgagccggtacccaaagcctttgcttcgctggccgtaccccggctgatcctgcagccccttttggaaaatgtgctggaacacggcatcgaggccgacgatcaggtgcgggtgaagctcagcttccactgggagggatcctatctccgcatctgggtggaggacagcggcagcgctttggccgatcagaccatcagccggctcaacgcccagtgcgaatcggaggagactccggcgggtcatgccctgagcaatatccaccgccggctggcgatccattatggcgacccggtctgcgggctttctttcagtcgctcgccgctgggcgggctgcgggtatgcctgaccgtgaaacaaagagaaggagcgtaggccatggatcgaattttccgtttgctgctggtggatgacgaaccacacgtgacgggcgcgttgtcgctgcagctggaagcccgggaggatatggatgtttatatagccaacagtgctgcggaaacgttgaacgtgctgcgcaaaactcgcatcgacctgatggtgtccgatatccgtatgcccggtatgacaggactggagctgctgagccgggtacagaaagagcagcc

SEQ ID NO: 2879 - DNA, 32759 bp, Unknown
  16S sequences of unknown bacteria
gctcaggcttatagcccgtcttccacttcttgaaacgggctttgtcagtggtctgacgggggagtaaactcccccgccactgccacccctaccagtttccgctaaaatcctacggattttcgggcgcggaaactgcaaggaagcgatttttgctctggaaaatgggattttccgccgcaaaaatcgccccgcccccgccgtacacgccgccggggacgattgaaacgcgaaagggcttctgttctacaatttggcatggtcgttccgcatcgtccttccgccattccgcggccctcctttgcgatcggctttcccgcttctattatatcatgttttcgcgcgcggggcaatccttgacactaatcccccttcaaaagtgcctgcctcttttggctgagcgcctcgtattcctcgtccagcacagtgcggtcgaacttgccggtggagatcttggccgtgatctcagccatgcgcatttccaggatggcaagatccacgtccggctcgtctgcgcggttttgccgcgcctgccattcgcccagcgtgccttcgaaggtttccagcgaatgcccatggaaaaagaccagccgcgtggcaatcttttccacaaaccgccggtcgtggctgatgacaagcagcgtgcccgcatattcgcacagcacgctttccagcgcttccagcgtaaaaatgtcgatatggttggtgggttcgtcgagcaaaagcacgtttgcgcgggagagcatcagccgtgccaacgccactttcatgcgctcgccgccgctgagcacactcagcggtttatgcacatcgtccgcgcgcagattcaagcgcgccagcacggtgcgcgccacgtccacggggtgttcgcttagggccatcgcgttgtctagcgcggatttgtccgcctcgagggaagcgagcgcgtcctgccccaggtagccgatgcgcgcctgcggatggatgcgcacgcgcggatctctggccacgatgcgcgcgacgagcgtggtcttgccgcagccgttggggccgagcagagccgtgcgcgaaccggcgggcagaaccatccgcgcgctttccaacaaaacgcgcgcgccaaagcggatggtcatatcccgcatttccagcgcattgcgggcccgcacaggatcgctcgcgcccagccgcatgcggatagcgggatcttcacgcgggcgctccttggcctccagatgattgaggcgcgattccagcgccttgcgcgagccctgcagtttttctgccacttccgtggcttcgcgcctgtgcagccgcgcctcgctattgcccatgcggctgggcgctttgcgcacttgcgaggcctgctccgccttgtgttgaatcgcttgcctaagccgcgcctgctccgcacggtactggccgtattcaaactgcgcgaattcgcgccgccgcgcgcgttcctgccaataggcggtatagccgccggggaacagcgtgagcttgccgccctccaattccgcgatggaggtgcaaacctcgtccagcagcgcgcggtcgtgcgaaaccagcaccactgcgccgcgaaacgagcggatgcgctggcgcaactggtttatgccttcctcatccaaatcgctggtgggttcatcgagcaaaagcaccgccgcattcttggaaagcgcgctggccagccggcggcgtgtcttttccccgccgctcagcccctcgcgcgcggtggcgacggcgcggaactcgcccgcctctcgcgcggaaaattcatccgccgcgtcgcccgtctgttccatgagcgatatgggcgccatgcgccgcactgcgccggcatcgggcgccagagcgccggagagaacgcgcaggaatgtggatttgcccgcgccgttcgcgccgatcagccccacgcgctcaccatcgtacagcgcaaatcgttcgacggccagcaccgtttgcgcgccaaagcccacctgtatatccatcgcttctaataacaattgcgccatagaaaaaaccccctttttgcgcgcgcaaaaagagagctatggcctatcttccatcgccagcccccttcaagcgcgcaagaaatccgccgcacgcggcggcgctttgctgcttgaatggtcactggcgaatcttcatatcttctgcggtaccaacctttcttaaaaatgcgaaacgcggcggagaaagtttctctttttcgcatccgcgcatttattataccatggcgcgcgccgcctgtcaacgttccgcacggaggaatgcgccgcgccattttgctaaaattttgctaaaattcgcttattttcgctaatgtaacatccgtgtgcttgttgtatgctcgcccgatttgttataatcaggcggttccaccatttaatatgaagtgagaggggatctgtatgcaaccatcgctgggcatcatgtatgcgctgtgctttgtggcgatcgcaatcgcgtttgcctacgctgcctacctaatcaaatgggtacggcagcaggatccgggcaatccgcagattgtgaaagtcgctggcctgatccagagcggcgcgaacgcttttatgcgcaaggaatacaccattcttgcgggctttgcgggcgtcgccgccgtgttgattctcctgttcctgccctccccgatctgggcgagcgccactcctttgaacaatgtgaagatggccatcgcttacatctgcggcacggtcttctccgccatcgcgggtaagctgggcctgttcgtcgcctctctggcgaacgcgcgcagcgctgtggcggccagcaagggcatccgtcccgcgtttttgatcggcttccgcggcggcgcagtgatgggcctggcggttgtgggcgcgtgcctgctgggcgtgatgggcgtgatgatgatctttggcgacacctccatcctgcttggcttctccttcggtgccagctccctggccctgtttgccaaggcgggcggcggtatctttaccaaaacggcggacgtgagcgccgacctggccggtaaagtcgagctgggcatcccggaagacgacccgcgcaaccccgccgttatcgccgataacgtgggcgacaacgtgggcgacgtggccggcatgggcgctgacctgttcgattcgaacgtggccgccatggccgcggcccttatcatggccgccgcgctggatggcgctacgggattcgccaacgtgggcatggtgttctgctattcggcgctgggcctgcttgcctcaattttcggcatcgccatggcgcgcatcggcaagaacggcaaccccacccacgcgctgaactcttccacttacatcaccaccgctgtgtacatcgcgctcaccgcgctggccacgctgattttcgacggcttccgctgggaaatctggggtgcttccacggtcggcctgttcgtgggcgttttgatcggcattgttaccgactactttaccgatgacaccaagcccatcgtaaagcatgtggcgcacgcctccaaatccggcccggcgttcaccgtgctttcgggcatttcttatggtttcctctccgtgctcccggccatgatcggcatcgccatcagcgcgctggcggcctataagctgtgcgagccgctgggcggccagtacccgctgttcggcatttccatggcggcggtgggcatgctctccatcgtgggcatcaccatcagcaacgacgcttttggccccatcgtggataacgcgcgcggcctggcggaaatgggcggcctgggcgaagaaaccatccgcgtggccgatgaactggacagcgcgggcaacaccgtgaaggccgtgaccaagggctttgccatcggtgcggcaggcctcaccgtcatcagcctgctgggcgcttacatgagcgaagtcaacgcggcgctggtggaaatgggccgcgcggcggagcagatcacgggctttgacatcatgaacccgaccgtgttcttcggcattctgatcggcgcggccataccggccgtgttctccgccatgctgatgctgggtgtggatcgcaacgcgcagcgcatgctggctgaaatccatcgccagttccgcgagatccgcggcctgcgcgaaggcaaggaaggcgtggagccggactacaaccgctgcatcgacatcgctacccagggcgctctgcgcgagctgattccggccggtctggtggccatcctggccacgctgctggtgggcttcatcggcggcgtggaagccatcggcggcttcctgctgggcaacatcgccagcggcttgctgcttgccctgttcatgtccaacgcgggcggcttgtgggacaattccaagaagtacgtcgaggctggcaacgagggtggcaagggctccgaagcgcacaaggctgctgtcgtgggcgacacggttggcgatcccttcaaggacactgccggcccgtccatcaacacgcagatcaccgtggtttcgctggtttcctcgctgatgagcgtgatgttcatcatgtactccattttctaaaaaacgttggcaaattctgtgcggcgcgctcttgaacggggcgcgccgcacaaattttttcagccaaaggccctcaatcccctctccgggcgcgtcgcagatgggccaacgcagggaatgcaaaattccactgcgatttcacatctgcctattgcatttgcagagcgaatatggtataatacccttatctgaatttttagggggtatcgtctgtggaccctatatggccacaattgctgcttcaaatcgtgctcatcgcggtaaacgccgtgtttgccgccagcgaaatcgccgtcatttctcttaatgaaaacaagctgcgcatgcaggcagaagagggcgacaaaaaggccgccgtcatgctgaaaatgatgcgcgagccttctgacttcctctccaccattcagattgccatcacattggccggcttcctgggcagcgccttcgcggccgacaacttttccgatcccattgtgcaatggctgatcgataagggatttacattgattcccagagcaacgctcaatacgatcgccgttatcgtgattacgatcatcctgtcgtatttcacgctggtgctgggcgaactcgtacccaagcgcgtggccatgaaaaagcctgacgcggttggccgggctgtttgcggcatgatcaacggcatggccctggtgatgaagcccgtgatctggcttttgtccaagtctacgaacctggtgctgcgcctgctgcacatcaatccggaagaacaggaatccgaagtgacggaagaagagatccgcatgatggtcgatctgggcggcgaacgcggtaccatcgaggccggcgaaaagcagatgatcgacaatatcttcgagttcaacaacatcaccgccgaggaatgcatgacccaccgcacggacgtgaccgccatttccgtggaagacacgccggaagaaatcgtcacgctgatccgggaatccggatattcccgcttccccgtgtacgaagacgatctggatgacatcgtgggcgtgctgaacacgcgcgattaccttttgaacatgcgcgccgaatcgcccaagcccctgcgcgatatgctgcgtccggctcgttttgtgccggaatccgtgcgcgcggacgtgcttttccgcgatatgcagcgagaaaaggcgcacctggccattgtggtggatgaatacggcggcaccagcggcgtgatcaccatggaagatctgctggaagagatcgtcggcaacatctacgacgaatacgacgaggccgagcagccggaaatcgccgccatttcggaggacgaatggcgcgtgtctggcggcgtggaaatcaaaacgctcaacgaggcgctggatctcgatttgcccaccgacgaagaattcgatacgctgggcggcctggtctttgcgcagctcaccaccattcccgaggatggttcccagccggaggtgcattgcttcggtctcaccatccgcgtgacggaaatcaccgatcgccgcgtggaatgggccatcgtgaaaaaggatcccccgccggaacccgaagagggcgagggcgaaaagaaggacaaagataaggatagcgacaaggacaaataggcttaagtgcgcccagaacttcgcgggccgcctggccgttgagccgctgtattttctgggctggcgcgaacgaattttgctcgcgtcggcccgttttttcaaagaccatcaatacgccaaacggcacagggaggaaagcatatgcaaatgttatcgccccggcaggtacacctggactttcacacctcggaatggattgagggcgtcggcgcgcaattcgacgcggaaacgttcgcccgcatggccaaagaagcggcggtctcttcgatgacggtgttcgcccgctgccaccacggctggctctattacgattcctggcgtttccccgagcgggtgcatccgcacctggcaaaccgcaacctgttggtggagcaagtgcgcgcgttgcatgcgcagggcatcaaagcgccggtgtatatcaccgtacagtgggactactataccgccaaccgccacccagaatggctgattcgtaagccggatggcgcgcatgagggcggcccgttcagcgagccgggcttttatcaatcgctgtgcgtgaacaccggctattggaaattcttgcaagagcagacgcttgaggttatggaattgctgggcgatgaactggacggcctatttttcgatatcgtgggcatccggccctgcacctgcgcggcctgccgcaaggaaatgctggaaaaaggcctggattttggcgatgaagcgcaagtgcgcgccttcgccaagcaatccatcgaccgcttcaagcaaaagatgagcgcttttgtgcgcgaacacaacgaccactgcaccattttttacaacgcggggcacgttggcccctgcaccaaagacagcaaagaggcctatacgcatttcgaattggaaagcctgcccagcggcggctggggctatctgcacttcccggttacggcgcgctatgcgcgcaaattgggcaaggattgcatcggcatgacgggcaaattccacaccagctggggcgatttccattcgctgaaaaaccaagctgcgctggaattcgaggcgttccgcatgctcagctttggctttgcctgcagcattggcgatcagcttccgccggatggccgcttgaatgccgccacttatcgcctgatcggcaaggtgtatcgcccgtttgccgagcgcgaagcctgggcgcggccctccaccccgctggtggaagccgcggtgctcacgaacgaaagtcccctctatgagcagcagatgtccgactcgatcctgggcgcggcccagttgctggaagaattggccctgcaattcgatatcatcgacgcggaaatggacttttcaccttataagctgttgatcgtgcccgaagatgtggcgggttcgtcagcgctttccgaaaagctggccgcgtttaccgccgcgggcgggcgcgtgctctcctgcgggcgcggcgcgctggacaacggcgcgtatcccgcttgctatccggcccaatacgcgggcgaacgcgaagcgtacccggacttcatcgtggcgaacggcctactggcggaagggctggaaccggagaacgaatacgcaatttatcaacagggcgccgtgttggaaaacgcgcagaacgccgttctgttcgcgcgcgcgccgtatttcccgcgcgcgggccgcaaattctgctcgcatcgctacacgcccagcgcgggcggcgaagcgtatcccacggcggctttggcaaacggcgtgttgctcttcgcccatccactctttgcgcagtatcgcgattgtgcgcccggctgggtgaaacagatcgtgaaaaacgcgctggatctgctcctgcccgagcggctcgtgcggcacgatggcgcctccaccgtcacggtatcgttgctcgaccagccggagcaccatcgcacctgcgcgcacattttgagctacatccccgtgcgcaagagcgcgaccatcgacattgtggaagagcgcacacaggcgcgcgacctgcacctcacactgcgcatcccgcgcgggtttacgcgcgcacgcctcgtgcccgaaggcatcccgctcgccgtcgaaggcgagcgcgtgaccgtgccctgcgtggatggctacgcgattgtggaactgacttaagcaaatgcatttagcggcgaatatcggcctctcctcccagggggccgatatttaatttacgcagaattctcttttcaattattgacactctgtagtttaaatgctatactcatatcaaactacaggatatcaatcaaaggagggccctatgaaatcgcaactttccatttccgaatccgaatggcaggtgatgaaaatcctttggaaccatgccccgcaaaccctccccgaaattttgtaccagttgcgacaaaccgcttggagcaaaacgaccatccaaacgtatctggcccgcctggtgaaaaaaggggccttgcgcacagagcgccagggcaaggggtatttgtactatccggcggcatcggaaagcgattgccagatggcggaaagccgcagttttctcagccgcgtatatgacggctctttgtcccagatggtcatgggctttgtgaaaagcggcgatctttcgccggaggaattgcgggagctgaagaacctgattgcgcagcaggaggaaacccatgcagatcctcggcaagatctttaacgcgcttctttttgtatcggccatgggcggcatattttgcgtgttgtcgctttttgcagcgcgcgttttgcggtgcgcattgccgctgtgggtgcccctctgcggcatggcgttgttttgcgttccaatcctttcgccggaagtatccctgctatcgccggaaaggcaagattggctcagcgggtatcgcattgcctgctggatatgggcaggcgggtgcggggtgtttttgctctgcgatattgtgcgcgccgctctggcaaagcgggcgctaaagggatatccgcgctgcaacgacgaacggataacggccatttgcgcccattgcgcccagaccattggcctaaaaaaggcgcctgcgctgtattatgggacgctggaaaacccggtttgcgtcacgggcgcaattcgcccggcgctcctcatggacaaagcgattgtggagcgattgaacgataccgagctgtccgccgtgttttttcacgaactgacccatgtgaagcggcggcatttgctgtgggaacgcatctatgatgtcgtttgcctggcaaactggttcaacccctttgcctggatcgccaggcgggagttctcgcttcattgcgaaatggattgcgatgacaaggctctcaaggcttcgcagggggaaatggcgcagagggaatatgctctggccatcctgcgcctgctggaattgtccacgatccgggctacgcagccgggaaggggcgctggcgcgctcagctttctgctggcaaagcgccggttgcaacggatcaccacaaaaccttcaaagatcagggaacggatgttatgcgcggtattggcggtttcgctggcgcttacagtggcgctttccctgcggttcagccaggaacacttttatccctatccggcctatagcgttggcacggaatactccacgggttgcggcgcgtgaccctttttttagcactataaaactattattgtagttatatggaggttcttatgaaagcgaacatggaaatccttcacgtgagcaagcaatacaaaaatggcgttaccgcccttgaagatgtcagtttttgcgttggcagcggcgtttttggcctgttgggccacaatggcgcggggaaaaccacgctgatgaaagcgctggttacggttttgaaaccatcggcgggtacgattcgcgtttgcggccttgacaccgcgacacaggggaaagaagtgcgggcgagagtgggatacctgccccaggagctggcgatgtacccctcgctttcggtgtgggattttgtgaattacatggcgcaaatcaaagggattcgcgacaaaaaggccgtcagcgcggtgctggaagaggtggaaatgctggaattctcccggcgcaaaatcgggcagctctccggcggcatgaagcgcagggtgggcatagcgcaggcgctgattggcaatccgccaattctcgtggtggacgagccgacggccgggctcgacccggaggagcgggtgcggttccgtggcctgctgtcgcgatacgccagcgagggacgcacggttttgctctccacgcacatcgtggaggacatccatcagctttgcggggaattggctgttttgcggaaaggccggctgttttacgcgggcacgtccgccgccctgctggaacgggtaagggataaggtcaaaatcctgcgcctggaaaacgaagcccagctcatcgaattgcaaaagaaagccgtggtgctgtcaacgacctacgaaagccgtggactggctgcgcgcattatggatgaagatgatctttacacgcaggcccaacccgtggcagcgacgctcgaggatgcctatgtgtattgtatgggagggaaagcgcatgcgtagaatgttggcgattcttcgttacgaatacaagatgcagttccggcgcttggccacttggggcatatttctggcggcaacggtgctttcccttctggacaattttccttcccgcgcgaatttggcgcgcctggaatttttgcgggaaccggcttactttgtgtaccggatcatgagcctggacagccttgttctgttgtttggcctcatgtttttgctggcggggcgcttccctctggacgcaaagacgggaatgaagccgttgctgatggcgacgcccttgcaaaaatggcaatatgtgctggggaaattgctaggtgggtttctatacgttttctcgctactgagcatttttctcgtgctcaacacggcgatttacgccgctgcggccccgtttgaggtttcgtgggcggaatgtatcgtccctctgctcaaagctctcttggtttcggccgctccggccggttggttcgtcagctttgtctcgattgccctgccgggaatgatcgatatccggctgttctatatcctgtcggcggtgctgtttgggttcaacgccacgtatgtaggctcggcggaggccatgcccttttacctcatcgctgctggcgatttggtgcgcctgatctgggtgcatccgaaatggccgtttgttgacacgggaagcgtggtggcaaatgggtgctttttggtggggagcggcattgtgtgcggaagcctgctgtttttgaagcacaaattctggagggcggaatgatgggacgtgtggcaagggaagcccaaatttttggcatcaatttctggatcgtgtccgcggcagttggggcggccacaatcgcgttttccctcctagcgggggagctgctggatttttatccggccatttttgaagtcgtatacccgttttttgcggccatcgttgtgggcgaatggggaaagacgcgctcggatggcaattttgatcttgtcgccgcccaatgcaaatcgctttttccctgggtattgcggcgctacaccgcggcctttgggggcgccagcctgtttgctgtcttaagcatggcgggcgcgtcgatagctcgatatgaattgccgctgggagaactgctcgccatatattttcctcccgcgttctttttatcgtccctgtgcgcgctattgggactcctgtgcaggcaggagcacatcgctaccctggtttgcggggttgtgtggctggtccttcttttcacgcgaagcctgctaagatttccaggactggaatatatctacttgtttatccgatttgccggagatcagaacaacatttggctgtggaacaaggggatcgtctctttggcaggtttgctcctatggagcggcatatattgggcgtgcaaaagaatgggctaaaggacacgtgcgtgaattccgcccgcaatggtttatgggccgccgcacagggaagtgcggcggcccatggattgggaaacggaaaaatccgggatggcctattccagttcggatacgaattcggcgatgcggcgcatgccttcggcaatgttctcgcgcgagatggcgtagctcatgcgcacatggtcatccgcgccgaatgctttgccgggcacgacggccacctgcttggcgttgatgagcatttcggcaaaactgtcgctgccggtgatctccgcgccctgatagcgcttgccgagcacgccggaaatgttgagcatcacatagaacgcgccctcgggcgtgttggccttcagcagcggcgtttcggcgatgaggcgcaccagcaaatcgcggcgggcggcaaattccttcaccatatcggcgatgatggcctcgccattggtcatggccacggcggcggcgtgctgcgcgatggaattcgcgttgctggtgctgtggctctggaagctcgacatggctttggcgattttcactggcgcggcggcatagccgatgcgccagcccgtcatggcgtaagatttggaaacgccattgaccacgatggtctgctcgcgaatcgcttcgcccagcgaggcgatggaaacgtgcttttgcccatcgtagatcagtttttcataaatttcatcggaaatcacatagaagccgtgcttcacggccagatccgcgatttcccgcagcagcttttccggatacacgcagccattggggttgttgggcgaattgaggatcagcgccttggttttgggcgtgatggccgcttccagcgccgccgcggtgggcaaaaattcctcttcttcgcgggttttcacatacacgggttcgccccaggccatgcgcaccatttccggatagctcacccagcaaggggaaggaatgagcacttcatcccccgggttgaggatggccgaaagcgcgttgaacagcgattgcttggcgccattggaaaccacgatattttccggcttataagaaagcgcgttatcgcgcaaaagttttttgcaaatttcttcgcgcagggccagcgtaccgggcacgggagtatagcgcgtcatgccctggtcaatggcgtccttcgcggcggcgcaaatgtattccggcgtggggaaatccggctcgcccgcgccaaacccaatcacatttttcccttccgcgcgcagctttttggcctttgcgtcgatcgcaagagtaacagatggcgcaatcgccgccacgcgctgtgaaagttcaagacccatatccacaaccatcctttcggttttgcaagctccattatatattctatgaaaaaccccgggttcctgccgctctttacgttaaaaaatgaatttttacgtttacattcctgcaaatcagcaaaatgcgcgcaaaaaaccgggaagcgccgcaaacgaaccggcgcttcccggcaacggcccaacacactcagatctgggccgcgtattccagcaagcaatcgcgcacctgctgcgcgctgggcaacgcgttgattttttcgcgcaagcgagcgctgccccgcagtccgctcacataccaggcgatgtgcttgcgcatctcgcgcacagcgtgctcttcgccgtccagagcgatttgcatatcgaggtggcgcagggcggtgcgcacgcgctcctctaccgagggggcgttccaaggttcgccgcgcaaatgcgcgcgaatctgcgcaaaaatccaggggttgccttgcgcggcgcgcgcgaccatcaatccatcgcagctggtttcctccagcatgcgcgcggcgctttcgccatccacgatatctccattgccgatgacgggcagggaaaccgcgcgcttcaccgcctggatcacgctccaatccgctttgccggaataaaattgcatgcgcgtgcgggcgtgcacggcaatggcgcgcacgcctgcatcctgcaagcgccgggccaactcgggcgcggtaacgctatcccaacccgcgcggatcttcaccgtgacgggcaaatgcgtggcgcgcacggcggcggcggcaacggcttgcgccagctccggctcgcgcatcagcgccgagccctcgccgttgcccgtgatcttgggcgctggacagcccatgttcaggtcgatgaaggcgaagcccttgtctgaaagctccgccgccgcgcgggcgatcaaatccggttcgcggccaaaaagttgcaggcccaggcgcgtttcccgcgggtcgcgccgcgtgagggaaacggtcgcgcgcgcgtcgcgcggggcatagagatagcccttggcggagagcatttccgtaacgcaaaaggaggcgccctgttcgagcgccagcagccgcgcgggcatatcggtcacacccgccatggggcccagaatcaccggtacgtcatccctgcgcattgccatcctcctgcgcgggcgtagccgaaggcacgggcgtcggctccaagatcacgcgcgtttgcgtcaggcccacgatgcgccattgtccgccgctcttcatgagcgtaacctcgtattcgccgccctgccaggcgggcggatcgccgctcacgtcgttcacgcggctggaaatcacgctgccttcgatggagggcacgcgctccgtgatggtgcaatatgccgtgtcctgccagggccaggcccacagccattcgagtgtgatcacatggtcgaaatccgtgatgttgtaatcgatataaggcgaattggccgaaaaggcgatctgcatcacgggatcgttattcaaaaaatccgcgctgaaatacttgttcagttcgcttgcatcctcccgggtgagcgcgacttccacgcgcttggccatgccgtccgtcaccaggatatagatattgccggaattgagcgccatataaaacgcgcaaatcaaaatagccacgcatgcgctgaggatgatcatgcgcgaggcaatgaaccaaagcaaccttcgaatatacttcatagggcagcaatctttcccctttgtgtgataatctttagacgcgcttcctccgcatccagttgcgccgcgcgcgcaacggcctcgggcgcgtaaacgtccgtgcgcatgtattcgatggaaggccagcccaccggccgcaaatccaccgacaagcgttgcgattcgccggacatgacgatttccatttcggccatcagcctttccagcgcgccatggaagcccttctccggcgcgcgggcgcgcaaatcgtgtttagcccaggtatcctgccgcaaaaacaggcgatgcatttcccacacggcctgcgaaacctgccccatttcccagcgttcttccaagggcagcgcaggcgtatacgcggcgatgaaaacaggatgccaggcgtgcgatataaacagggcctgcccaccttccacgcgcgtatagatcccatcgcgccgctcagagagcatgcgcttccattcccagggatcggtgtcttgcccggtatgccaggcatccgcgcgcgtgacgtccgccagattgggaatgcccgtgcgcccgccaaaggcgataaagcccatatcgtccagcaacgacaggagttctccatacgtggtaatcgtcatgccccggcctcctttcccctaccattataacggcaaaacccgcgcgggtcaatagccaatgtcgcggagaacgagagaagacgcggacgccgaggaaaaaaccgcgcgaaagcaaaaatagcgggcgcgcaagtttccgcctgcgcgcccggaactttactcttccagcgtggccgtaaagccgtcagcctcgtttccggcaaacacgatggtgtaggcggcgccatattccgccgggatatacacccggttcgtggtgccgatttcagaaatatcgtctttgccatagggcgagaagtccatggagaactgggaaatgtccgcgctttccagatagctctcggtgaaggtaagcgtaagatccgtctcgttggtgagcgccttgccctccagatcggccatgccgcccatcccgcgcgattcatcgccaatataaaaagtataaaaaatctggtaaatatcctcgctttcgcagatgacgcgcaccgtaaaggatggatctgccgcttcttccggcgccgcctcgcacgcggaaagcagcagcgccagcgcgaggagcaacggcaggaacgccacgcgccgccaggtagaaatgttgcaggccatggttcaaatcccctttcagaattcatgcgcgcaccattatagcaccatgcaaaagcgcaacgccagcgcgctcgggaaaagaaacgcaaaaaattcgcgcatgggcgcgcgcaaaagcccggcgcgccaaaccggcacgccgggcaaaacgctgaaaaatcatccgcgcgcggcttgcacatatgcgcgcgccaaagcggtacacttgccccactcttcgcgctcgatccactcgcgattcaccagattgccgcccacgcccgcgccaatcgcgccagcgcgcaggaattcggcgatgttggtatcgttgacgccgcccacggcaaggaagggaatgtgcgaaagcgggctggcaatcgccttcaaatacgccgggcccagcgtgcctgccgggaagatcttcaccgcatccgcgccagccgcgtgcgcgcgctgcgcctccgtgggcgtcatcgcgccgggaaaggccaacaagcccaacgccttgatggcgtggatgatcggccggtcggtgttcggcgtgacgatgaactgcgcgcccgcctcgcgcgcgatggccagttgcagcgtggtgagcaccgtgcccgcgccgatgtacatttcgggcaagccatcgtgaatggaacggatggcggccgccgtaccctgccaggattgggcatcgctctggttgaaggtgatctccatcatatcgatgccgccttccagcagcgccttcgccagagaaaacattttttccggagcttggccgcgcacaatggcaatgatcttgctctcgcgcacatgttgcatggtaagttcgttcacggttaatcccttctttctatattgccggcagtgttgaagaaaaagacggtgcccagcgtgccgtcgggatactgggcctggggatgggcgcaaatccggcggtaccgcccctgcgtatagcgggaaatggcatccgtccaaaaacgcccgcccgccgcgtttttggcatggtgcatgagttgccattggcccgggaaatggtcaaacaaccaaaatgccgcttcccggcccacgccgcaacgccggtatttgtgcatcacaaagaactcggccatggcgtaatccgtgttttcgcccggaatttcctgatagtcgttcaccatggcaaagcccaccagcttgccgtccacccgcaggaaaaaggcccagcggtttggttccgtccagtagcaatcgagccaatcatagccatacaggcccaaggcgttcacatcggccgcttcccattgactgctctcatagaggtatttttccagcaggttgcgaagaatctctttttcgtccaccgttacgggggccaactgcacattcatatggcattcctcccctgggttcagtatatcacgcccgtgccgcgccgtcaagacgcaacaggcgtctcaaaaaaaattgcaaaacgccttgtgcgcggcaggatttgtaatgtataatacaggcattcccatagaaggaggagggcatatgctggaacaactgtgcatgctgcgcgattttgaaactcgctcggtctgctcggaaaataagaccggcgaaaagggcatgggcggccgcacgagcgccaaagacggcgtggccgcgcgcgccgcgcgcgatttgggcgacggctggaagaccaatccttacgagcgcattgcgcccggcgaaacccgagaaatcatgaacgtcgcgggcgagggcatgatccgccacatctggatgacgcccgctggctcctggcgcaacgcgattttgcgcttctattgggacgggagtgaaacgccttccgtcgagtgccccatcggcgacttttttgcctgcggctggggaagctacgcgcccatccgttcccttgccgtatgcgtgaaccctggctccgccttcaattgctattggagcatgcctttccgcaagggctgccgcgtgacggtggagaaccgcgcggatgaagaatttgtgctgtattaccagatcacctacgaagtgcgccccattccagcggaatgcgcctactttcacgcgcaattccggcgcgtgaatccgctgccttacaaacaggtgtacaccattttggacagcgtgaagggcaaaggccactatgtgggcacctatatggcctggggcgtgaataacaacggctggtggggcgaaggcgaaatcaaattctatttggacggcgacgacgcatatcccaccatctgcggcacgggcacggaagactacttctgcggttcctacaattttgaggatcccgtgcggcacgaccgctatgaaaccttcacctcgccctattcgggactggcgcaggcgaccgtccccaacgcgctctatcaaagccagatgcgctttggcctgtatcgctggcacatcaacgacccgatttatttccaatccgacttgcgcgtgaccattcaggcgttgggttggcgcagcggcggacgctatttgcccctgcaggacgacatcgcttccgtagcctactggtaccagactctgccctgccaaccgttccccccgctcggcagccgggatgatttggaaattatttgacaaaaatggggctgttgccgcggcaacagcccccacgccattttgcaaacgcctttacggcttaacggcaatccatttggctagcggaggaacacaaggcccctgacacacccactgttcctcttcaaatatgcccatggcgcgcaagcttattccctgaccgtttgccaccagaatatggtcgatcagtggaatgcccgcaccggaaagcacatcgatcagttcttttgtgacctcgacatcggccacggaaggaacgacgctgccactgggatggttatgcccaatcaacacagccgaagcgccagcgcgcagcgcagccgcgagcacgcccggcggcgtaatgacggtgcgatccacatggccgctgccaaaagtatgcacagcgagcggaagcaagcgctcattcagcgaaacgagcaaagttttttcgtgcagaagcaatgccatgtgcgcggcaaaatacgcctctgcgcgttccgccgtggagagcggcttatgttccaaaaggctgagccgctccgcggtgaggatgccttgaaaattggccaataagaatgccgcgttgggcggaagcccctcgactttatttagctgatccagcgaagtttcgcaaagatagcgcagagagccgcgccggttgagcaaattttcgaccagcgcatccactttttcgggttcatcgataaaacagagcaggagctgcgtcagcagctcccggtctttcaccattcgccgcgccgcaagcgcctgcaaagaaggatccgtatcgccacgcatatcccgagatcacagccccagcgcgaaaagggtatcgcggctcattttcgcggcttccagcggcgcgcggccgacggactgatcttgttccacaatgaaccacttggcgccgctttccagacccgcgtccacgatggatttcacattctggcagccatggcccaccgggcggaattcaaagtcgccttcgctcttggccgcgccatcgtcgctgccatcggcgttgatcagcgcgtagggctgaccggcacgacggcccacataatccttcagatgcaccaccgggcaacggccggcgtatttgcgcacgtattccgccggatccaggcccgcgtacttcacccagcaggtgtcgatttccgtttgcaacacgcatgccggcacgctggaatacagaaaatccaggccatactgtccactcagagtgatgaactcaaaatcgtggttgtggtacagaagctggatgtccgcttcgcggcacaggcggccaaactgatagatgacgttgatggcgtgtgcgaaacccgcgctgccagggcgagtggcctcatccaggtagggcacggcgatatatttgcagccgatggtcaaatggtccgcgatttcgccaaacatattcgcctcgatctgcgcgaagggcaggtggttggagatgccaatcaaccccagatcatccagcataccgcgcacttcctgcgcgctgtgtccataaaagcccgcgaattccacgccgtcatagcccatttccttgagcgcttttagcgtgccaaacagatccttttgcgcgtcgtcgcgcgccgaatatacctgatacccaatcatagcttttttcattatagatgctcctcgtttgcgtaaagatttatccatcaggcgttttcatccgccggaggaacgactttttccgcttcagcagaggcgggggcggcctttttgcgcgcggcgggcttcttagcgggcgcgctggcatccgccgccttcttcgccgcagcgggcttcttcgcggcgctcttgctcgcgtcgctgccttcagccgcctttttgcgcgcggcaggtttcttggcgggcgcgctggcggccgccgccttcttcgccgcggcgggtttcttcgcggcgctcttctgcggcgcttcgccgtcttcggccgccggttcctgcgcggcggactcctctgcaccgctggtcgtggccgtgcccaacagcgacgcatacagggcgacgtattccccggccgatttgctccagccgtattcgccccgcatggcgcgggtggccaacatttcaatcgtctcgggttcggcctggaagagccgcaccgcgcgctcgatcacgtgcagcatatcgtgcgcgttgtaattgaggaaggtaaaaccattgccgtcgccggtgaattcgttataagaaagcaccgtatcgcgcaggccgcccgtttcgcgcgtaatgggcagggagccatagcgcagcgcgatcatttggctcaagccgcagggttcaaacatggacggcatgaggaagaaatcgctgcccgcatagatcttgtgcgcgagcgcgtggttcatttcaatgcgcgcggccagttgcgtgggatatttccactgcgcccagttgaacaggtcttcaaaccggtcttcgcccttgccgagcacgcacagttgcgcgccggttttcaggatttcgtccagcacgcgttccaccaggtcgaagcccttctggcccgacaggcggctgaccatgccgatgagcgggatccgttcgccctcttgcaggcccaattcgcgctgcaacgcgagcttgttctgcaccttctgcgcgaaggtatccgggccatagttcacggaaatggcggaatccgtctgtggatcgtactcttcggtgtcgatgccgttgagcacgccggaaaggtcattcacgcggctgcgcagcaacccatcgagccgttcgccgtaataggcggtttggatctcctgggcgtacgtggggctgacggtggtgatcttatcggcgaacaccagcccacccttcataaagctgcactggccgtagaattccaggtgcgcgttatcataggcccaatcgcccagcgaaagatattcttcgatttcgtggatggggaacacgccctgatagcgcaaattgtgaatggtgaacacggttttcacattgcggtacaggggcaacgtacgatactgcgcctccagcagcgcggggatcatgccggtttgccaatcgtggcaatgcaatatatcgggcacaaaatcgatctgcggcatggcctccatcaccgcgcggcaaaaatagctgaaacgttcgccctcgtccccgcccgagccgtagatatagggccggtcgaaatattgcaggttatcgacaaaatagaaggttacgccgcccaattccagtttttcgatgccgacgtactgccgccgccagcccagattgacgtagaaatacaggcaatgttccatccgctcgcgataggtctgcgggatttcgcgatagagcggaaggatcacgcgcgcgtccaccccctggcggacaagcgccttagaaagcgcgccgaccacatcggccaatccgccggtctttacgaaggggacgcattcgcttgcagcaaacagaactttcatgggaacacctccgaacttgcagaatcagactgtggcaagcgccgcccggcgggggagcaaacccatcccgctcccccacgcgaccgggcgcgcgctcacagggttacgtttttcccaatcacaatggggtactggcgctgaccgatcagacggccatagctgcggatggttaccgccttgtcgaagatcacgttctccagttcgcagctttcctgcacttcgccatcctgcatgatgatggaattgcgcacgatcgcgccgcgcgcgatcttcacgccgcggaacagcacgctgttttccaccgtgccagcgatttcgcaaccgtcggccaccagggaattttccaccttcgcgcccggataatagcgggcgggcacctcgtcgcgcactttggtgtacacgggatttttcttgaacagttcctgccgcacatcggaattgatcacgtccatgttgaagccgaaatagctcttcacggtttcgatgcggcggtgataccctttgaactcatagccctgcacgcgcaaaagccccgcctgcacgtaccggcgcaaaagatcgcagttcatatcgtgcatgccgtgcgaatacgcctgatccaccaggtgcaaaagcagcgtgcgtttgacgatgatgacatccatcagataattgggatagctggccacgttggggttcacttcgatctccagcacgcgcccggtctcatcgatatccgcaaaggcgtggctctcgttggaagccacggaataatcgatatcggaggggcgggccttcacatacatcatcgtgatatccgcgttggagcgaatgtgctcggcgagcatatcgtaatacgtggtgttgaacaccgtgtggctggccgaaaggatgacgtattcctgccgcgagcggcgcaggaaacccgcgttggagcgcagcgcgtcgatattgccggaatattcgcccacgttttcgcgcgtgaggaacggcggcagaatgcgcaagccatcgttgcgggtgtgcaaatcccactccttgccgctgcccaggtggtccatcaatgaatggtaattcttctgcatgatcacgcccacgttgcgcacaccggaattgaccatgttggaaagcacaaaatcgatcatcctgtagcgccctgccacgggcagggccgccaccgcgcgcgaggcggtcatttcgcgcagggtaaggtcgtcctttgtggtgtaaatgatgcccatcgtgttaatcattggtgcgccgcctcctcactgagcttttcctcatccgtctgctcgcccgccgccacgcgcacgccggcgggtatgcgggtggaatagccgaccagcgcaatcgggccgcccgccgcgccgaccacgcaattttcaccaatcacgcagttctccgaaacgatggtacgcgttacgcacgcgcccttgcgcacgacggtgccgggcatgatcaccgagtccacaatgttcgcgcccttttccaccaccacgcccgcgaacagtacgctgtgttccaccgaaccatacacttcgcagccttccgtcaccatggaatcggcaatgtacgcgtcctgccccacatagtgcgggggcatgatgggattgcgcgcatagatgcgccagcgcgtatccgccagattgaatacgggcttttcgcccagcagatccatgtgcgcttcccacaagctttcgatggtgcccacgtctttccaataatcctcaaaagcgtatgccatcagcttgcggccgtccgccaacatggtgggaatgatgtttttgccgaagtcgttttgcgaatccggctttttttcgtcctccgtgagatagcgtttgagcaccggccaggtgaacacatacacgcccatggacgcgcggttgctcttggggtgcttgggcttttcctcgaattcaacgatgcggccggtttcatccgtgttcatgatgccaaagctcggcgcgtcttcccacgccacgggacgcacggccacggtgagatccgcttcgtttttgatgtgcgcggcgagcattttgctgtaatccatcttgtaaatgtggtcgccggagaggatcagcacataatcggggtcgtattgttcgataaagggaatgttctggtaaatcgcattggccgtgccgcgataccattcccccccgccgccgcgcatataaggcggcagcacgaaaacgccgccattgagcaagtcgagatcccaggactggccggagccaatgtagctattgagttccagcggctgatactgcgtgagcacgcccaccacgtcgatgcccgaattggagcaattcgacagcgggaaatctatgatccggtacttaccgccgaagggcacggcaggcttggccaccgtttttgtaagcaggcccagacggcttccctgcccgcccgccagcaacatggcaatgcattgtttttttctcatggcttgtcactcccgaattgttgtccttcccagaaagtgttaactcccgcttgtattatagcaaattttcaatacacattccagtgtttgcacaatttttatcagaaaactaccaaaacatattaaagattttggccgtgttgcgctaaccaacgcttccattgcccgtaatctggaagcacgctctccaccatgcgccaaaatccaggcgaatggttgaattcatacagatggcacaactcatgcaccaccacataatccaacgcttcttgcggcgcgcgaatcagcttccagttgaagttcaggttccccttgcgggaacagctcccccagcgcgttttttgctcgcgaatggtaactcgcgcgggcaagcgcgatcccagacgcggcgcgaacagggcgatgcgctcacagatgcgatccttggcctcttttgccaggcgcgccttatcggcaggggataagggcggggccaagcgcgcctgctcggcgcgcacccaatccgcgtgctgagcgacaatgcgatccacttcgcgcaagcgcgcatgcctgggcgcatacacgcgcactccgccagggccgacgtggatcgacacgcgggaagtggaattggaatgaatcagggcgtaagagatttgcccggcggttctttgaatcatacgcttattgcaaatctgcccgatcgctttccaggatcaggcggtcgtaaacgccgtctgcctcgatggcggcgctcagcccgcgcgcgacagcgtcgcgcgggttatccggcacaaaaacatcgatgcccagcgcgctagcaaggtgctcgcgcaacccaaagagttccgcgccgccgcccaccaggcatgcgccgcgcgcagcaagatccgcggccaactcgatgggcgcttgcgccaacgcgtccacgcagagcgaagtgagcgtgcgcacatagggcgcaacgagcgcgttgaccaaatctgcctcgatatccaccaggcgaggcaaacgcgttttttcgtcaaaccccgcggtggaaacggaaagttttccgctggaagctccgcttgccgaggccagcgccagcttggccccctctgcggcgtcctcgccaatgcgcacgccttttgcgcgcatagcgccaacgatttccccatccacgcccgcaaagccgatgggcatctggcgggaaaccaccgtgcggccaaaagaaagaagcgccgcgcccatgccgccagcgcccgcttcgatcacaaagcttgcctccgggcgcgcgacttccagccctgcgccgatggcggccagagcgtcagagcgaatgagcgaaacgctatccgcccccgcgtccagcgcggcctgcatcaacgcatagcggtgcgcgcgcgcaatccaacccgcacagcctgccagcacatgaattttgcgcaaatgggcaatgctgcgggcgcgctcgaacagggcaagaaaccaccggcccaacagcgcctcgttttcgcaaatgccggaatgaatgggatacgccactgcgcagccctcgctcaggcggccacgcatggcgagcgcctcatcgcccatggcgatgggcatgtccacccctttgcgcaccgcgaccgctgcggacgcggtgaacgcaacgccgtatccctccaccgccatgcgcacattgcgcgtgccaatgtcgatgccgatgttgaagttcatgggctacgctccttgctgcgttttctggtatttttcccgcgtggcctcgccgccgcggatgtgcctttcggccttgttctttgctagcacctgggaaacctgcgcgtacagcgcggggctgatttccttcaggcgttcgcgcatatccttgtggatggtcgtcttgctcacgccaaaccgttttgcgcaaacgcgcacggtggcgccggtcgcgcggatgtattcggcggcttccgttacccgaatgtagatctcgcgcttcaagggcatccctcccgcacagcgattctctacaggctatgcgaaagggccggcgaagattagtgcgcgccccttgcttttattataccatatactgggttaaaatagaagcggcgtttgccgcttacgggaaaaatcacaaggttcttacagatttttgcgatacctttcgcgtgcggaaagcagaatgagcgccgcgcccgccacgccggaggcgcaccacagcgcaaacacggcttgccagcccgcgctctgcgccaccgcacccgctaagatgcccgccaggccgctgcccagatagatcgccgcatcgaccatgcccgccaccgtccccacgaggcgcagtcggtcatattccaggggcagaagggtggtaatcatggggttcaagccgtaagccgtggccgcagtgagcgccaaaagcgcgcccaacagtcccacgtgaacgtgcggcagcaaaaagagcagcaaactcgtggcgctgcccatcagcagcatggccgctgtgcagcgccgcgcatccatacgaaaccagcgatagcattgccgcccaaagaggatacccagctcattgacgagcggaatgatcagcgccacgccgagcacgccgtcaagcgcgagcccctgggtttgcatcaagatggtgggcgcccagttcataatgctatcgcgcatgaagccgttgcacacgctgccaatgagcaccaggaacaagcccgtggaaagcatcacccggccaaggggcattttcgcgctttccttttcctgcggggccgcagccgcatgcgccgcaggcgcggcttttgtgccgcggagcatgcaatacgcgcacagtccgccggcaagggtgactcccgcgggcacggcaaacgcctgccgccagccgatatagctggtaatcaagcccgccagcaaccaggcggcgacataagccagcaccaaaatcagcgaaaggatgaaactcgcgcgttcgcgcgccgcgtcctgatacgtcagcgccaggatgcgcaccacgggcgtccacagcatggattgaccgacggcattcagcgtccacagcgcgagaatccattcataagagggcgccagagagcaaccaaaattggcggcgctggcgatcaccaacccgctcaggatacaggcgcgcggattcacgcgatccaccaccagccccacgaccagttggccgcaagcgtacacgacggcgaacagcgtggcgatcaacccaccctgcgcctgcgtgagggaaaaggcttccatcagcgaaggcaacagcatggagatgtgcgtgcggcaaatgtagccgcaagtgtaagccagcgttaacgcgcacagcacgcgaatctgggagcgggtaaatttcatagttgtccctcctacttgtgttgcgtatcccattgtacgctttgcgcaaaaaaatgtcaatccagcgaggcaaagatcgcgttgttcttgcgcaaaatcgcggttttgcgtcccgggcgccaaaaagcagaattggtttacgacggaaaatttggaatttgcccgcggaaaatcttgtatattcaacaagaaacgcgtataataaacgggagggccgtagcttttgcacgctcccaggggcacgaatcctgccgggtgagcggaaaggttattttgccaatttttgattagaaggactagaaggatattctggaggatattgcatgaactccacgcatacgctttggtatggcgcgcctgccgccgcatggacgcaggccttgcccttgggcaacgggcgcttgggcgcaatggtttttggcgggccgctagaatcgcggttccaactgaacgaggattcgctgtggtctggtcttccccacgcttacaccgttcccggcgcaaaagaagcgctggcgcgtgcgcgcgcgctgctggcggaaaaccgctatctagaggcccaggaggcgctggaaaccggctttgccggccccgattgccaaagctatttgcccatgggcgatctcaccgtgcgcatcgcgggcgaacaggtggaaaactacattcgttctctcgatttggaaaccgggatcgcgcgcgcggaatattccctggatgggcagcgcgtggtgcaggaatgctttatttcccatccggatcaagcgctggcgctggaaatcacttcacaggcgcccctgaacctggaaatagcgctcacgagcccgctcaaatcccgcacctacgcgcaccgcgatgtcattatgctcgacgggctttgccccaacgacaatgtgcccgaaggcatgtcgccagacgatcccagcctgtgccctgaggaaaaagaagaacagggcattggttttcgtaccatggccgcggttgtgacggacgcgcacggcgaagtggaagacaagggcgaagtcctgtgcgtgcgcaaagctacgcgcgtctccctctttttggtggcgcgcagcagctacaatggctttgataagcatccccagctggaagggcgggacacggccgccgattgcgcgctggatatggcgcgcgtgcgccggctggattatcccgccatccgcgatcgccatgtggcggatttttccatgtacatgcgccgcgtggatttctgcctggacggcgaaaagcaggacgctttgcccacgaatgagcgtctccagcgtttcgcgcggacggggcaggacgcggggctcatcgagctgatcttccaattcggccgttatctgatggttgccgcttcgcgctcgggcacgcacgccaccaatttgcaaggcatttggaacgataacgttcgtccgccgtggagaagcgactacaccgtgaacatcaacacggaaatgaactactggccagcggagccgctgggcctggcagaaatgcatgcgccgctgttcaatatgctaagcgcgctgcgcgaaaccggcgcgcaggcggcgcacgattggtatggcgcgcgcggcatggtcgcgcatcacaacgtggacatttgggcgcacgccacgcctgtgggcgcaggccgccggggcatcgcgcgctggtcgttctggcctatgagcgcggcctggatgagccggcacctgtgcgaccactacctgtattccctggatctggatttcttgcaggaaaccgcgctgcccgttctgcgcgaatgcgcgcagttctttgccgacacgctccaggaagacgaaaatggctacgtgtgcgtatcccccgccacatcgccggaaaacgtgttctccgtgcagggcaaagagtgcggcgtggccaaatccgccgctatgagcgatgcgatcgtgcgcgaattgttcaccaattacctgcgcgccacggaggttctgcacattgaggaacccttgcgcgccaaggtgaaagccctgctcccgcgcgtgaagccctatgccattggttccaaagggcagcttctggagtgggatcaggaatatgaagaatgcgaaccgacgcaccggcattgttcgcacctgtacggcctgcacccggcgcacgaaatcacgcccgacggcacgccggaattggccaaggccgcccggcgctcgctggagttgcgcggcgatgagggcaccggttggagcctgggctggaaaatcaatttctgggcgcgcctgggcgagggcgatcacgcgctgaagctgctcaaaatgcagttgcgtccggtgacggacaacggcgtcgtctatgtgcgcggcggcggcacctatgaaaacctgttcgacgcgcatccgcccttccagatcgatggcaatttcggcgcggcagcgggtatcggtgaaatgctggtgcaaagccggccagacgcgctgttgctcgcccccgccctgcccgatgagtggacggatttctcgctgcgcggcatgcgcgccatgcacgccatggaagtggatctcacggcaaaaggcggcgcgctgcgcgctactgtacgcgtcgagcgccggtgcgagacgccggtggcagtgttcctcctcggcttatgcgtgggtgagatccaatccgcaggcgaataccattttggctatgaaccgttttagcgcgctgattaagcccgcgtcgtcgctgtgcgacatgcgctgccgctattgcttttattgcgatgaggcggcgcggcgcgagcaaaaaagctatggcatgatgcggccggaaaccgcgcgcgcggtggtcgaccgtgttttcgcctgcctttcgccccgcgcgcacgtgaattttgctttccagggcggcgagccgacgcttgccggcctggaattttttcgcgattttgtagcctatgcggaagcagccaactcgagcaacttccgcctggcctggtccattcaaaccaacggcctttccatcgatgaagaatgggcggcgtttttcgcccaaaaacactttttggtgggcctttcgctggatgccagcggcgaatttcacgaccagaaccggctagacgccaccggccggggtaccttttcgcgcgtgatgcgcgcgcgccgcgcgctgctgcgcgcaggcgtgcccgtgaacgtgctcacggtggtgacgcggcaaatggcaagccatccgcgcgccgtgttccaggccctgcaaaaaaacgccattgactatgtacagttgatcccctgtctcagtccgctggacggcgcgctcgcgccgcacgatttgcggccaaaggactacgcttctttcatgaaggatttcttcacccagtggtgcatgtcgctgcgcacgggcggacagcggatgcacgtcagatattttgataacctgatttccctggcgcgcggcggcgaatgcgaacaatgcggcgcagcaggccagtgtacgccgcaatttgtggtggaaggggacggctccattttcccctgcgatttttacgcgctggacgaattttgcttgggcaacgtacatacgcacagcgtggaggatacgctgcaaagcgaaggcatgcgccgctttgcgcaggattttgcgccccgcagcgaaatgtgtgcctcatgcgaagtgttcgccctgtgtggcggcggttgccggcgctaccgctccttctatttccgcgaaaaaggctattgtccgcagcgcgatttccttttgcaagcggcaggcatcctccagcgcctttcgcgctatctgcactaaaaaacgggcgcggcaaacgcctgcgcgtccgtgagaaatacgatttggaaggagaagaaaaatgacagcatttgacccaaattataaattgctagacgagatgtatcaggacgaatactatccaaatttcttagtagataagataaaagaccaacttcagaaggtcattgacctgctagagagcggtgaaactggcaccgaagcagtgcaggaaacgctggatgaggcggtccgcagcatcaacgatcttcaggaggaatttgacgagaatgacagtgagcttgaaacggtggcacgggagtgtattgcggcaaccgtggcctacattctaaagtggttcaacatcccgattgacattgaggaagccattcgggaaagggattggtaacgaatcaattgttatttaccaaactgacaaggaggaatttgtatgttaaagggtttacccgccattctgtctcccgagctgctgaagatcctgtgcgaaatggggcatggggacgagcttgtcattggcgacggcaacttccccgccgctagctgcgcccaacggctcgtgcgcctggacgggcacggcgtgtgcgaaattctggatgcgattttgcgcgtgttcccgctggatacctatgtggccgcgccggtcgcgctgatgcaggtttcgcccggcgacgattacaagccggaaatctggccggaatatcggcgcatcgtactcgagcgggaaggcgaccatcggtttgaagaaatcgagcgattcgccttttacgagcgcgcgaaaaaggcatacgccatcatcgccacgggcgaaagcgcgctatacgcgaacgtcattctcaagaaaggcgtcgtgaaagacgcttaaggaaaggaaggtctccatgatcaaagttggcgtcatcggcacgggcggcatttccggcgtacacctgggcggctatagccgcaaccccaacgtggaaatctacgcgctgtgcgatatcaacgaaaagaaccttgccaagcgagcggaggaatacaaggtttcgcgcacgttcacggactaccgggagatgctcgcgctcaaggaactggacgcggtaagcgtttgcacctggaacagcgcgcatgcggagtgcgccattgccg

SEQ ID NO: 2880 - DNA, 14509 bp, Unknown
  16S sequences of unknown bacteria
tttatattatatcatatcttctcgagtttgtcaagaggttttgaaaaagttttttaagttttttcgaagacctttgattactcattaactgctttgctctcgctcacagtgatattattataccacatctttccgcgtttgtcaacccctttttcaaaaaaaatcgaaaaaacttttctgtccgcgcatatccagcttcacctccgcaaatcctaccaccggaggtgaacatatgctgacgatacttatccgtcttatactcatctatattgttctcattggcacgatgcgcatcatgggaaaacgccagatcggtgagatgcaggtctccgaactcgtcataaccattctgctctccgagcttgccgccggccccatcgccgacgctgacattcctcttgttttcgccgtaataccgataggagcgctcgtctcgattgaggtcataatttctttcgccgtcacaaaaattcctttcctgaaaccgatatttgacggcaagcccagcatactcatctcaaacggcagactcaacacagaagagatctcgagggtccgcataagcatcgaggaacttctgagccagctcaggatcgccggtatatccgacatcgacgacgtaaactacgcgattctcgagcaaaacggtcagctctccgtaatagaaaaaaagagccgtcaagctgcaaccaatgaagatctcggcaagaatcccaccgagaccggcatagcgcacgctgtggtcgtcgattcaaaggtaagcgacttcgacctcagcatcataggaaaatcgcgtgagtggctctctgagcgtctcacacgccgtcatgtaaaaatcgaggacgtcgtcctcttcacggtcgacgattccggaaaggagaatctgatcaagcgaaaatgagatcatttttcatagcctgctcgatacttctggtaatatgcgttctgatactcttcaacacgttctatgtaacaagcaaaacgagcgagctcgacgcgatatgcgaagagctcgctctgacaggctcagaggaatcccttactgagcttatatgcgaatgggaaaggtcaaggttcacgctgaccctctccgtgaagcatggcgaggctgaccgtgcggagaacgcgctctgcctcctttcggaatatctgagaagcggaaacaccgcggattttcacgccgagctgtcgctgttccgctccgcgctcagacatatagccgattcgcagaggttctccggcgacaacatcttttagcggaatatcgtttttccgtcggacagatagacttctttcctgatgatagtgtagaattccgtgaaaggatcctcgaaggtggtcccgagacattcttccgcctttctgacaaggtgctcgggatttacataagtcgcgttgtcggcggaaagcagcgttttcacaatgagactgccgtcctcgaacgtcacgccgtcaagccgcacgaatggcgagatatccgcttcatggtcgcccgccttagagcgtttcatgacgacgagcggattcgtgtaaagtgtcgtcagcttctccgcgtcctcagaagtgaacgacgggctcgtgagtctgatttcataccttgcccaagcgatctcgctgaattttctgtcgctcgtatagacgtcggtgatctgcatctcgctcgtcaggcactcgttcagccgcgcttttacctcatcgagcgccatcggctcgacgagctttatgtcgaagaactcgcactcgctctgcgtgcctatagacagaggcatagcgaaagtgagcttgagcctcggattgaatccctgagtataccacgccggaatccccgcgcgtgtgattatcctcgtcatggtccggacaagatcgaggtgcgagatatactggagcataccgatcttgtaaaatctggctctgatcggctgcggagccggcgggaccggctttttctgcgtggcggtttcttctgtcatgctctcattcagctctgcttcggacaccatgttctctcacctccgagtctgttcgcgccgcagcccgtgcactgttcggcgcagtttctgtttgtctttgaatcgtaagcgttgtgtctttcgcggagcaggaaggattttgcgacgccgcagtcgatgatgtcccacggcagcacctcgttctccccgaactcgcggttcgcgtagaacgccgggtctatcccgcaggcgtcgaacacctcgcaccacgcgttatagtcgaaatattcgtcccagctgtcaaagcgtataccgcgccgtctcgcctcgaggagcgccttcgacagcttcctgtcgccgcgcgcgaatacggcctctatgcggcttccgtccgcgtcgtggtagttgaacacgaccttcgggtcgtctatcttcgagaggacgaatttctgctttctgtcgagctcttcaagtgtgctctgagcctcccactggaaagcggtgaacggcttcggtatgaaacaggcgcagcttatcgtcactttcggcgatttcttgccgcggacgccgcgcatcacgtcgtaatatgtgtcgacgacacgcttcgcgagcttcgcgatcccttcgagatcttcgtcggtctcggtcggcagaccgagcatgaaatacagcttgacctggctcttccccgcctcaaaagcggttctgcacgccttgagaaggtcttcctcggtgacgttcttgttgatagcgtcgcggagtctctgcgtaccggcttccggagcgaacgtgagcccggcgttccggacggtcgagatcttttcgagcagttcctttgtgaagctgtcaaggcgcatcgacggaagcgagatattgaccttagcgtcgtttgtccactcgagcagcttgtcgcagagctcctcgatatttctgtaatcgcttatcgagagcgatgagagcgatatttcatcgtatccggtagctttgtaaagcttcttcgcgcagtcgttcagtacgtcgaccgatttttcgcgtataggtctgtagaccattcccgcctgacagaaccggcacccgcgtatgcacccgcgatagacctcgagaacgatcctgtcgtgcacagtctcaatatacggcatgacgaacttatccggaaagaacgccttgtccatgtccttgattatccgtttcgtgatcttcgtcggtatatcatcatatacaggcgtgtaagccttgatcgttccgtcatcgttgtagctgacatcatacagtgacgggacgtaaaaaccatcgagcttcgcggcgcggtgaaggaattcctttttcgtgtactctccggattccttcatgtcggcgtagagccgcattatctccggaagtgcctcttcgccttctccgatcgagaacacgtcgaagaaatccgcgacaggctccgcgttgtaagtgcagggtccgccgccgatgacgatcggcatatcgtcccccctatcgctcgcgagcacaggtatcccggcgagctcgagcgtgttgaggacattcgtgtagcagagttcgtactggagggtgaaaccgacgaaatcgaaatcacggagtgggtctccggactcatgcgcgtagagcggaatattgtattttctgagctgttcctccatgtcggtccacggagtgtatgcgcgctcgcaccagaagtcgtcgtactgatttatcgcgccgtagagtatccttatgccgaggttcgacattccgatctcgtaggtgtccgggaagcagaaggcgaatctcgccttgacgcgcgacttgtccttgatgacctcgccgtattcgccgcccgtgtatcttccgggcttctcgacccgtttgagcaggcgttcggctgcctgtttcggagtcagatcactgttcatctgaaaatatcctttcgttatttttcactttggtttgacgcttcgacgggaaaccttgtatccgcaaaatgaaggatgtcgacgcgcggcacccttcatttctatttttgtccttacgccatgaagtgcgagataagcataaccggtatcagccacacgagctggtacgccgccgtgtagagcgagttcagctgtatctccgacgcgaacacccacacgaagaccatagccacgacgccgagcagcatcgcgagtatcttgactattgtagcggttttcatagcgttgttcacgcgctcgcagagcgtaactgtgcggaggagatccttgaccgaacgcttcgagacaataccgctgtcgcagcgctcaaaggtgtgcggaatatcctcgacggtctttgagcggatgaccttgaccgggtatttcatcgccttgaccttcttcgcgagaagaacatcgtcgatgttcgggtcgaatgacttgataccgacgcacataccggtcttgtagagctgctcgagtatcttctcgaactcgctgtctatcgtgtactgcacgtagaccttgccggcgagctgcccctgatacgcgatgtagagtattccgaccggagccgatgcttctatacgcttgtcctccgcgtcatacggcgggtcgaaatcctgcttttccatgtaggacgccttgccgaccgcgaccgacatctcgtcgaccgtgaccgtgaagccatcgtcctcgacagcctcgagcacgacgttttcggaatgtccgatgtcgtgcgtcgcctggctgagaacgtcggcgagcggtcctccgaccttgatgaaggcgctggcgaggttgtagattatctcgtcgatacggttgttgccgtagaccttgatgctcgtgaccttgacgccgttcgacgggaacacttccttgtcctcgaacgagatgaccgacgccccggcgtaatcgccgagcgacttctcgccgatgatggcgctgtcgttctcataagcgtctctcgaagccttgtagaacggatagctgaatatcgcgaaggcggtgagcggcatcgtgaccgtgaacgccgtgaaggcgtttgtcagcgcagaatagatatccggatccttgaaataggacaggaagaagaacaccgcggagatcatcagaaccagcagcataaggacgccgacgatcggtctcgcgactcttccgtccctcgtgcgcgcgaagtagccgtcgacaaagtcggtgcgcccgacgcggattatctcggaatccgccgggatgtaatcgctgaatatctctcgctcgagcgagtcggtggcgtcggaaaccggggtcacgacgaatttcttgcgttttgtcgagacgatgttgaaactgaacacgtcgcgcttcaggttcaggaactcgcagatgagagcgagcagaaccgccagcatgaccggcaggttgaagagcctgaacccctcgcgcggagcgaggaagcaggcggcgattgtatatagcgccgacacgacaacgatgaacgaagtcatgctctcggacgtaggtttcagcgtgaacagattcttcgtgccggtgaatatctgactgtagacgagcgcgccgccgagcacgacgaactggagatcgatcatcgagtagacgaccggataggatcccggccgcatgaatgacggcagctcgatgccgaacatactgtaattctcaaggaagaaagtagctccgacgaggataaccgcgaatataatccgcattatgagcgtatagtactggttcttgtaccgcgtcagtatctcggtgttctggctcctcgaggtatactcgtactgctgctcgatgttcgcgagctttacggtctcttcctgcttcttcgccatgttgtcagcgagttcggtcgccttttcctcgccgaccttgtcgcgtatctcgtcgttcatgccgaaggctatcatcagattgaggtcggtctgatcgatctcatcgggatccggctcgccgtaaacctttgtggtgtccggaccggcgtcggatgaagcagcgtcgctcttgtcgtcggaatggacggtctcgaagatctcggtcgcggcgttgtcgagcgcctcgttcacggtgtcggagaattcggcgttgccgtcgacagcctcgcggactttcttgatgtcgtatatagcggtctcgccgccgtcgcttttcgcgggaacagcggaaggcgtgccgctctccggtctctccggtttgtcagctcccgcggctattgcgccgccctcgtcaatgaccttcatgtccgcgtcgtcatcggtatcggaatcctcgcgccacggggcaacctcctccggtatcggcacttcgtcggcgttctgtgtgtcatacgccgcgccgcttccggtatcctccgtctctttcgtgtcggttttatcgccagcgacgacgtattcccccgccggctcatcctccggaatatcgttatttgtctcatttaccgcgggagcggcattttcaggagcgtcggtctttttttccggaacgggttcctccgtccggctctttttcttttccggacgctttgtgtacatacgtatgagctcgtcgacatctatgtcgtcgtcggcgccggcgtcgtgctcgcccttatagagttcgcgtctcgcttcgtcgagcgtcgagtcgtctattttcagcggagcggtcttcttcggtatctttccggtcacctttgtgtcaccgatcgttttgtcgccgcccgcgctcttcgcgtcccgttcgacgctcttgtgcagcagagcgagcagctcgtctgccgaaacgtcttcattcggtcccgcgccgccggcacgggatctgttatcgtcacgcattgtagcttcctttcttcggattattttgagataaaaacatcacttgggatacaatgaataaatcaggttttcgcggaaaaaagtattggatttatgttttttctgcgaaagccaccataaatcagcgtttcacttgatcccggcgagctgtctcgaagcctcgcagagaagcaccgccgccgcgcaggatacattgaacgagttcacttgcccgcgcataggtatcgaaagtatgaaatcgcacttcttgcggacaagcggcgagatgccgaagccctcgctcccgagaacgatggcggtcgcgctgtcgaatttcgcgtcataatacggcgttccgtccgcctccgcgccgtaaatccacacgcctcgctccttgagctcgtcaagcgctgaggcaatatttgtggctttggcgaccggaaggtactcgagagctccggcggaagccttggcgacaaccgcggagagtccgaccgcgcgtcttttcggtattatcagaccatgagctcccgcgccttccgcgctcctgattatcgcgccgaggttgtgcggatcctcaatctcgtccgcgacgacgatgaacggtttctctcctctcgactccgcgagcgcgaagatatcgtcaatcgtcgagtattccttcatcggaacaagcgcgcagacaccctgatggttcatcccgccggagagcgaatcgagcttcgctttctcgacctcgatgacgggtatctttctcgagatgcactccgccgcgatgacggttatcgagccctcgcgccccccccgcctgacaagcagcttgtcgatggcgcgcccgctcttgataagctccatgaccgagttgcgtccatagactatggaggactcttcgttctccatagtgtcggcggcgttcgtctccgcgaccgtgtcagcggaattttcgtatttcgcgtcggacttcggtctgtcgtcatatctcttcggcttatatccggatttgaatcccggtttccggtcctgacgatccccggaacggcgtctgttgtttttgctgttgtctgtatacataattgtaattatcagtctccgatggcatattatgccagtatttgtgtacgtatataaacgtctctcgtttattataccacacaaaaccacctttgtacatacctttccgcttttttttcaaaaaaattaacgtgaatttccgaaaaaaaagaaaggacggcacgatagtaccggtgccgtcccttctgtcagtattatattatctgtccttttcctttgggatacacagaataagtcgggttttggcaataaaaagtcttggatttatggcctttttattgccaaaacaaccttaaatcggcgtttcctttgataccttttctccacagtagaccatgccgcgctttgcatcgacagtcacggcggtcccgctcttgagtatcttcgtcgcgccgagagcgccgacgataaccggtatgccgagcgcctgaccgacgatagccgcgtgagagtcctcgccgtccatctcgcagataagtccgcgcgcgtggcggagcagatcgacaatcctgttcgaggtagacggaatgacgagtatctccccgtcgcggaaattttgtctcgcctcgtcctcgtcgcggcagacgcagagatttccgcagacgatatcgtttccggaggatattccggtaccgctcgagagaacgtcgccgacgatctgaacctttaatatgttggtcgttcccgagacgccgagcggcagtccggcggttatgaccgcgaggtctccgtactcaacgaacccgttcttcacggcaagactgatcgcgtgcttgaagagatcgtcagacgtggtctgctcctcgatcgacatcggggcgaccccccatgagagcgcgagctgtctacaaaccttctcgcacggcgagcagccgattatctgcgtcacgggacggaagcggcttatcattctcgcggtgtttccggacttcgtaacggtgatgatggcgttcgcgccgagatcatgcgccgtcgtgcaggcggcgtgggagatggcggtcgtgacatttgagaagccggagagctggttctgtctgaagcgctcgatgtagtttatatcgctctcggtgcgcatcgctatgagcgccatcgtgcgtacgctttcgaccgggtatttgcccgccgcggtctcacctgagagcattatcgcggatgtgccgtcatagatcgcgttcgcgacgtcggttatttcggctcttgtcgggcgaggattcttcgtcatgctctcgagcatctgggtcgcggttatgaccggcttcccggcgccgtagcacttcgcgatgaggcgcttctgtattatcggaatctcctccatcggtatttcgacgcccatgtcgcctcttgccaccattatggcgtcggagaccttgattatctcgtcgatgttctcgactccggcggcattctcgatcttggcgattatacgtatatcggagccgccgttcttttcgagcagggcacggattttctcaatgtcagcggcgcactgggtgaatgacgcggcgatgaagtcgaaatcctctcggataccgaattcaatatccgaaatatcgcgttctgaaaggaacggtatcgacagcttgacgccgggaacgttgacgcccttgttcgacgagatggttccgccgttgacgacgcggcacctgatgccggatttttcggacaagatgacagacagctcaacgagtccgtcgtcgatgagaatgcgtccgccgcggctcatgtcgcgccagaggtccttgaaggtaacggaggcgtgcttttcgtcgccctgcgagtcgtcaaatgtgagcgtgaactcggcatccttctcgagcgtcacgggggaggcgaaggtaccgagtctgatttcaggtccctttgtgtcgagcaggagcgcgatgtgctgtcccatctcttttctgacctgttttatcatgtccgcgacagccttgtgaccctcgtgcgtgccgtgagagaagttgagtctcgcgacgtccatgcccgcgtttatcatgtcgcggatcttttccggagcagacgacgcgggaccgatcgtacatacgatctttgttttctgaatgcttggcaataccgtcatattttttattacctttccggagcaaacgaagccgcgataatggtcgccgacacacgcttaggataattaaaaatcctgccccaatataattatatcataatagtggagtttgtcaataggcaatctgaaattttacaattttccgcagcatccgcaaatcaaacgctgcaaattccagcgacaacagtctgcaaacgcttgtctatgttgtacaataattgggttatgtaattgtatatttttccgaatcactttggcacgcggaattcggtattgacaaacccgcgctgatgtgctataatcgaatcaagaaacgtgtacgtacacattcagacaacggcatccgaacaaatgaatctgaaaggaaaaacagacatatgaaacacaggtatacaagtcttcttctcgcactgctcctcacctttccgctcgcgggatgcggcggagagccggtatcggatgacacggtcatgacgactgacggcgcgtccgatgaagtctcatcagaatctgacgaatccgtgcctggaagcacgctcgccgcgcctgaccttccgaagacagatatgaaaggaaaggttttcacgattctcgcggaggactggtggacatacgcgccgctcgctataaccgacatagctccgaccgagatgaacggggagattctgaacgacgcgtccttcaggcgccgctccgcgatctccgaaaaatacaactgcgtgataaccgacgaacacattatggacgacccggcgaatggcacggcgaagcttctgaaatcggtcacggcaggcgagcacgtatatgatattgccgtgatgcgcggcagtgagtacaacaagcttctgacgtccggaagtctttcggatctcacgttgatgccgcattttgagcctgactccgggtattacgataaggcttcttatgacgcgctgtctatagcaggttcccattacggtgttgtctcgaatatcacgatgaatcacaatctgctgattttctcggcgtatttcaacaaggtgatgcttgacgacttcgggattgacaatatgtacgatacggtacgaagcggaaagtggacgatcgacaggatgtacgagatcggaaagacggtcgccgccgacaccgattctgatggtctgtttaccgagaaggacagatacggcttcacatacatagtcgacgtcagtgagggctttctgaacgcgagcggcatcaatattgccgagacatcgtccgacggaagaatcgtgaagacctataacacggaaaccgcgctcacaaggatgcagcatatattcgatatcctgtcagacacggcgacttccttcaatgtccacaagcgcagtcctgacccgaatataacaaacaagctcgagaccgggatgttcacggacggaaacacgctgatatccctcgcgggaatatattacgcgccgcagttccgcgacatgaaggatgatttcggcataatcccgttcccgaagtacgacgagactcagaccgactatatctcgccggtattctctaatccactcccgataacggtcattccacgcactaacactgaccttgagagcaccggaatcatcctcgccgagatgtcctatcgcggatatacggagcttctcccggcgctgtatgacacaatcctcaccggcaaatgcgcgagagacgacgattcggttgagatgctcgatatgatcttttcgaagaccgaatacgacataggtatgctgttcgacttcggcggcgtccgcacgaaggtgcgcacgatatatcaggaactggatggcaatttcgcctccgccttcgcctctctcgatacgaaggtcgacaagaacatagccgacctcatcgaagcggtcgaggaaaacaaataaaaaattaaccggcggctgtcattcaatagtgacagccgccggtatgtgttttatcagatggtcagagtcgtatccttctcaatcggatattctttcccgccccagatgagcgtaccgccatcgagcggcgtttttactgaaagtttcccgtcctcaagatcgacgtcgacatacgcgttcccgaccgggactcgtccgtgcagttctctgtataatccgggattcggttcgaccgcgaaggtcttagcaccgacagatgtcggtctgacgccgaggcagtatcttccgaggaggtatatcggtccgcttccccacgcgtggcagagggattttccgaatttgctcccgtacattccgtagtgcgtgacgccgctctcggtcgggtcgtactgttcccatatcgtcgtggcgccgagcttcagcataccgccccagtaggaatcgatcatgttctgcgcgtatccgatatgtccgagcttgcagaacgccatgagctcgtagagctcgaaatacggggtcgtgatcttcgtgacgctgtcgttttcgaggatgttcttcacgaaatcatcagcggtcttcctgtcgacaaagtcgtagagtatcgcgaaaatagccgcgtgacgggtaacgttccgtcttccggacgtgtatgtgtcgatgtacgcgtgcttttcctcgtcccagaacttctcgttgataacagttttcagtctgtccgcgcgttccgtgtaaggcttcgcgtccccgccgagcgcttctgtgagccacgccatggcgttgtgcgcctgccacaggagaatctgctccgcggcgagcggaccgctcttgtcaatatccgaccagtcgatgaaaatccagtcgcccggacgaccgacgacgagcccgttctcgtcaagtctcgagatgatgaagtcatacaatgctttcgcgcgcgggtagatgaacctaatgaaatcgatatcaccggttgtgaaataatattcccatgttccgatgatcagaagcgccgagtagtcgtttatccggttgacgtgctcgatgaccggcggcttgccgtacagcgccgtgatggtgcgtcggttgagcgcccggtcggcgaagaggtaatcgttgaccatatacgactgataagcgtcgcctgaccagcaccacctgtcgcgcttgataccgtcgagcatgaactcgcggcagttcaggtggaaggtatacctgcatatatcgaatatcttcccgacctccggcttgtcgcaggagaacttcgcgacaggcgtctcgtcaagaagctcgagccatgccgtgacattcttcgcgtccccggtgagagtgacatatctgaacgcgcgcggaacgagtgaatgctttccggcgccgatagtctcatagagaagcgcgttctccggatcggaagcctcttccgccgtctcgccgtagtaaacggtgagctccgcgtcagcttcaaattcgagcttcgcgaaaagctccttcccgaagtcatacagcgttccgacagaagtctttgtcacgctgaccggctcgaccttggtataggtaaacggaaagacctcgacattgtcgtccggtgaataataagcgggctcgtccccggcaaaatcttcgcgtatcgcggctccgggcgagcatttccatgtgtggtctgatatcagctgatccgactcacagaatatcgcgggaagaccgtcggtctttatcgcgatgacctcgatacggtgatcacccgccgcgacgtcaaccttctcgccgcgcggaaatctccttccgtcgacaagaagataacatttacagttggcgtgtatcctgatatatccgtccttatcgaagcggcattctttcagaaaatccactctcggccagacgtttgagagtccccacatcgacgggtattcgcacccgaactcctcgcgccgtgagtgaaggagcatactgtgatatatctcgtagtcaccggggtaccatatccagcgtgatttttccataattatgaccatacctttcgtataaacttacagttttaaggcggttttgaaagacggcttgtccggctttcataattcacgaccatatgtcgtgaaagtctcaaaactgtctggtctgaaatttattttcagacttgttacctttctgttcttccggacgggtttttgaaatctctcccgccttgattgtttttcttgtaatcgtcgttcttgaagtactgatagaacccgcactttatcataccgttgtaaagcgtcctgaccttgtccgcgcggtgtccgtacagcttttcgaaatccggaacgcttgagagaatgtatatctgccacggagcgagcttcgagaagcacacacccatgtcgtgatagagcttcgccacaccggtatcgttcataagtctctcaccgtaaggcgggttgcagacgatggtcgcgcggcggtcggctttcacgatctcggtcgcgtttctctggaaacacttgatgtgcgctcccatgtcggcgcggcggatgttcgcgcgtgcgagatcgaccatgtgctgatcgatgtcgctggcgtagacctcgaactgcgtctcacgcttcatggacatcgcttcttcccgcgcgtctttccatatcttttccggcaggtcatagaactcctcagccgcgaaatttcttccgagtccgggcgcggtgtttgtcatcatcatagccgcttcgatggcaatggttcccgagccgcagaacggatcccagagcaggacctcgtctctcggtctcgaaatcttcaccatagccgccgcgagcgtctc

SEQ ID NO: 2881 - DNA, 8901 bp, Unknown
  16S sequences of unknown bacteria
ggcgccttttcaaaggcgctcttctcccccccgcataatcaaagggtgtagtcgattctttcaataggtctgtagggatgtgtcatgttctggacgaaggtgatggatttttgtgtttttatgttgtgccagagtacggtttcgccggatggtgggcagacgtagtcgccgagaccgcattcgatttttacggggcattttacgcgttttgccattatcgcggtgtcgaagtagatgacgccgggttcggggtcggggcgccagccgcggaggcggtttttgtcgagtccgccgaggtcgcagagccaggggatgaggatgtcgaggagtttggcgtcgtttatgagggcggctatgttggttgcctgcatggcgcccattgagccgccgttcagggtgatgcctttgccgtcgtattcggggagggagcggatgaagcgggcgccttggaggtcgcggaggattacgttcaggaagtagcaggtgtcgggcttctggtttttgtcgtgttcgaagccgaagccggcgtgggttttcgcgaaatcgtcgtagtatgcttgttcgcggttgttttcgaagccgtggatgttcatgcgcaggaagatggcgccggggacgcggttgacttcggcgggtgagaagccgtagccgtggaaggctaagatggcggtcaggctgccgggggcggcgttctttggcattgtgaggatgccggaggcgggcatgtcgccgggggcggcgagttttatgtcgtaggcggcgtagtcggggtcgccggagtcgatttctttcttttcgaggatggtgagggggaagctttcgactgtttcgagttgttttttccagaaattgtcgaagtcttctgggtcggggcgtccctgtgttattttgtcgagttccgcacctgcgccgccttcgaatttgtcgacgccttcgagcggggtgccgtcgagggcgcaggcggtgacgaggacgtggacgaaaccgggcttttcgagcgaggtgtcgaatgtgagctttccggtctcgccggggatgaagcgtcttgattgcctgccgtcgtctccccatgtttcaacgaggaagagcgggcagctcatggttttgccgtcgtgtacgagttcgagctcaaagcggatattgtcgccgcatttgtattctacggcgttcgcggtcgtggagccgcggaaatagtttgccattttgttcattccttccggatgtatgaaaattccacttaattatacattatccgaaggcaattgtcaagagtttaccacaaaaaagtttcccatatgacaaaagggccaccggacggcagcccttgatttttctattttgcgagagcgaacgacattatgatcgtcagcaggatgaggaacgcgaagttcacgaggaggaacaggagtatgtactgcttcgtacgctccggatagttctttgtatattccctgaaggttatgaggctcgcgagggacgctatcagtgtcccgacgccgccgatgttcactccgacgaggagcgagcggtaatcgtcagtgaactgcgagagcagtatcgccgacgggacgttcgagatgaactggcaggacagcaccgagaagatgagcgtgttcttctcaagcagtcccgaaacgaaatcccgcaccgcgccgatacgcgtcatgttgccggaaaacacgaagaacgccgcgaacgtgcagagaagcgggtagtcaactttcgcgagagcctttctgtcaagtatcagcatcgcgatgagtatcaccgccgtaccgataatatacggtatcccgcggaacacaatagcgatggcaagcgcgaaaagcacacaatacgcggcggtgcgcacgggcgggagcttcgccgcgtcgtcctccgcgagcgttatcttctccggcttcacgatgaaacagcagagagttatgacaacgatcgacaccgcgaaagggagcgccattatcgacacgaactccccggtcggtatgttgaatttcgtgtagaggtagaggttctgcgggttcccgaacggggtcagcataccgccgagattcgccgcgatgttctggagtatgaaggtcagcgcagtccatttctggtacccggtcgtgcttaggacataatacccgagcggcaggaaggtcagaagcgccatgtcgttcgcgatgagcatcgagccgatgaaggttatatacacaaccgcgatcaccgacagccgtatgttcccgcacttcgcgacaatccctctggcgaggatatagaaaaaattgatgtcccggaacgcgcacacgaccgccagaacgctgaaaagacagcagagcgtcttgaaatcgaaatacccgaaatactccctgtccggaggaacgatgaacgacgtgacgagagccgccgcgagagcgaccataaggaccgtgttctttttgatgaacccgaggacgccgcccgacttgttttcgtttttcctgtccccgtgtatgtcggggcgctcgcgcgagaatgctatgaatttcatatgtcagtaaatataccgtcactttcggaagaaaataaatgtgacccgccggtttcatgacgcggcgggtcgtttgcttttataacagattacagtcctttttgacttccctgaccgccgcctcgcagtcggacgccgcgagcctgcgcatacggtcggaaactgtcctgagcgcctccgcgatgccctcacggtcagccatgacagcgtccgcggcggaaagaagctcgctctcggcgacatttcgcacgtcaaggcagaattttttctgtccgatgtaatcgaggaacgcgtcgatcttcgggtcatacgagattccgatcataggcgtttttgccgccgcggcgaagatcagcatatgcagccgcattccgaccgcgaaggacgcgcgcgtgagcagcccgcacagctccgacgccgaaagcccgcggacgacccggcactcgccgattagtcccgcaagctcccgtgttatgtcggtatccttgtccgggtgcatcggaacgagcaccggaagaagattatattttccggatatcttctttatatccgccgcgatcgtctctataggcggtctctcgcccttcgcgctcttgcctgagccgaaattgttgcccggctttatcgagacgaggaagaaatccctgccgatatcctcacgcgcgaggatatggtcggtccacagcgggtcggtcggcttcatcaggaacgcgggatcggcgctgacaaacggtccgcgcttcgggtcatcgggaatgccgagctcacgcgctatccccatcgagtgctcctccctgagacttatccggtccgcctcacgcataatctcagccgcgcacctctttcccgactcgctgacaaggggtccgagaccgttcgcgagcagcatcagggacagaccgcgcttcttcgccatccgcattatcgtgacataatagaaaaggctcttgcggctcgtgccgtcctgaagcagacttccgccgccggagatcagcagcttcgcgcggttcatctcagccgcgattcgcggtatatcgacgcggttcaccgagcggacgccgtaaagcttcctcgtctcggacggcttgttcgacagaacggttatcccgatgtccgggtcgaccgagcgtatcccgtcgacaatcgacatgaggagcgaatcgtcgcccatattgtcgaagccgtaatatccgcttatcacgatgtccccgtgatcgtatttcgggaaagcgacctttttgtacgcgcgcacataatcgtccgccatcttcgagaccgaataaccgcgcagaatcaccgaacggttatacctgccgagatcagcgcgctcctccggcgtcatcgcgtggagccgtcttaaatcgtccgccagcagctccgccgtcggcagcttttcgccgcggcagcagaaattcgtgctctcggctaatttctcgttctctctcgtgagtatcccgatatatccctgcgcccccgcgagcacgaccggcttctcctcgctcatggcttcgagagccgagcgcgacacgccgacgaaaacatccgccgagccgatgagctccgcgacgtccgtgcgcgcgcccgtgagcttcacgagagccctgcccgccttgcggttcagctcgtccgccctcgttttcagcgcctcaaaggcggttccgccgccgacgatcataagctcgaagcccggtatctcacggtaaagcgtctccgccgcgtcgcagagaagaaacgcgtgcatggcagcctcagtgtcaatacggctgacgcagacgacacggaaacgaccgatcagcccgagctcgcgcttgacggcgttcgagtcgatgttcttcgaaaagtgtttcgtgtcaatgccgtttatcgtgaggtcgatattatccgacggcatcctgtatttatctatcaggtactgcttgacgtccgggctcaccgcgatcgaacgctcgccccagtcggacacgcgggtcagtatcgggtcgaccttatacacgccgtgcgtcgacgttatgaaatggaatcccatcttcttcgcgagcagcccgcagacaaacgccgggatgcgtgcgtgcgcgtgaactatgtcgaacttctcacgacttatcagccgctcaagccccttgtagctctttataagcgcggacggcgacttcgtgtgtagcggcagcgtcacgtggcgtatgcagctcttctcaagctcgcgctcatagaccccgccgctgctcgcgacgactatgtcataacccctcgcgcggagctccttcgacagctcgacaacgtgcgtctccgcgccgccgatctcaagacccatcagggtcatcagtatcttcatatcctgtacctctcacggcgttccgccggacttttcttaaataatattgtaccacaagaacgccgtgaagtcaatcaccgcaaggtctttcagatgattatttacattcagacaaaacaaaactcctgccttttttcaaagacaggagatctggagctgctaatcagagtcgaactgatgacctcatccttaccaaggatgcgctctaccaactgagccatagcagcggatggcgaccgagatggggttcgaacccacgacctctagcgtgacaggctagcgttctaaccagctgaactacccggccatctcttcatcacgtttaatattataccacatccggcagcgtttgtcaaggggttttcgaaaaaaaatctcattttccgaaaaaatcataattttccgccacggacgacaaaaagaaagcggcggacacgccgtgaaaagcatatccgccatccgtatgtcactgtatcgcggcttacttcgcaaaggcttacttcgtgaagccgtacttcaccatcgtagccttgaagaattcaacgaactcctcagcggtcaggggctttgtgtttgcgacaacagtggtcgtggtctcagtcttcatattttttttttcgtcctccgtttttttctccggcgcgggctcagccttagcctcagccttcttctcctgcgacttgccgcaggcggggcagaatctcgcgtcgtccgggatctccttgccgcaggcagggcagaaagtcttgccgctgttctccgcgatctcggtctttatctgctttatgacgttcttctgctcgtcgatctcaagaatctccgccgcgatgagagccgcgtcagccttctcgtaagtgagctttccgagagcggcaaacagcccctcgagcttcgactcctcgcttctgagagcgatagcgagctttgcggactcagcgacctcgccggtcttcttgacggccttggacgcgatggattttgcgcttttcgtgatatcatctaagaatcccatttttattcctccgtaacttccggacaaactccggaataagcattccgtcttggtcatgtttcggtgcgataaaacgcccgatcctactgccttatattttactccaacaatatgaactgcgaaatacttatttgaaacaatttccgcaccatactttaattttgtgtaaaaacggcagattcagcgtcagcggtgtcattcccgtcgcccggaacgccttctccgtccccggaatccggcaggtactcgatccgcccgccatcctcgagaacggcgacgacgctgtctccggcgtgaacctttccctcgagcatagcctcggcgaagctgtcctcgacccgcctctgaatcgcgcgtctcagcgggcgcgcgccccagaccggatcaaagccctccttcgcgagcgacgcgacgagcttgtcgtcaaagcggatgtgaacgccgagaccctcaatgcggtgtccgacctcagagagcatcactgacgcaatcttctttatatcctcgcttgtcagcttgttgaagatcacgatctcgtcgatacggttgagaaattccggtctgaacgtctcgcgcagagcgcccatgacgttcgccttcatcgccgccgcgtccgccgcctcggagaccgaggtgaagccgagacgcttcggttcggtgatgcctgacgcgccgacgttcgaggtcatgatgattatcgtgttcttgaagtcgacacgtctcccctgagcgtcggtcagtatgccgtcctcgagtatctggaggaggatattgaacacgtcggggtgcgccttctcgatctcgtcaaacagaacgaccgagtacgggtgacggcgtatcttctcggtcagctgaccgccctcgtcatacccgacatagccgggaggcgagccgatcatcttcgataccgagtgcttctccatatactccgacatatcgacgcggatcatcgcgttctcgtcgccgaacagcatgtcggcgagcaccttcgtgagctctgtcttgccgacgccggtcgggccgaggaagatgaacgagcccatcggacgcttaggatccttcagccctatccttccgcggcgtatcgccttcgcgacagctgataccgcctcgtcctgaccgattatccgctccttcaggatattctcgaggttcaggagcttggttgattcctcatttgccagtttcttcaccggaatgccggtccacgcggtgacaatgtccgcgatgtcgtcggcgccgatcgagagcgagagacccgatctcgagttctgccacgcggtcttcttcgcctcgcattctttctcgagctgtttctcctcgtcacggagcgacgcggcgagctcgaagtcctgcgacttgattgcctcttccttgtccgcgcggagtgccttgactttatcctccgcctctctgagatccggaggagaggtatgggcggctatacgcttcttcgacgccgcctcgtctatcaggtctatcgccttgtcgggcagatacctgtcgtttatatagcgcaccgagagcttcacggcggcgtctatcgcctcgtcggtgattttcaccttgtggtgcgactcgtagcggtcgcgcagaccctcgaggatccttatcgcttcctcctcgctcggctcgccgaccatgaccgactggaaacggcgctcgagagccgcgtccttctcgatgtggcggcggtactcggagatcgtcgtcgcgccgatcagctgcatttcaccgcgcgcgagggcgggttttatgatgttcgcggcgtcgaccgcgccctcggcggcaccggcgccgattatcgtgtgaatctcgtcgatgaagagaatgattgacgggttcttcctgacctcagccatgaccgtcttcatgcgctcctcaaactcgccgcggtatttcgcgccggctatcatcgaggagatatcgagagtgacgatagtcctgccgatgagcgtttcggggacgcttccctcggcgatacgctccgcgagtccctcaacgacggcggtcttgccgacgccgggctcgcctatcaggcagggattgttcttcgtgcggcgggagagtatctggatgacccgctcggtctcgctctcacgtccgattatcgggtcgagcttgccctctcttgccatctcggtgaggtcgcgcccgtactgcgcgagagccgggcagtccttcagcgcggcggacgccttcggctgcttctcgtccggagtctgatcctcggtgtcctcgccgccgacgctgccgaggaagttatacacgtcgttcgctatgtccgccgcggaaacgccgagctcatcgagtatcacgaccgcgatgctgtcgctctccgccgcgatggcgagaagcaggtgctcggtgccgatataggtctgaccgaagcgcgaggactgtatcgcggcgttctcgattatccttttcgtgcgcggggtcatatcgcgcggagtgatcctcgtgcgctctcccgcgccgacccggcggcagattgcgtcgcgggtattgtcgaatccgacgccgcgcgcctcgagaagcttcgcggcgacgctgtccttctcggacgtcagcgcgagcagaagatgctcgctgccgatataggtgtgtccgagctcggacgcgagataaagggatttattgagaacgttcgttgctttgttggtgaaactctttggcatatgatgacctttcccgccgtgctcgcccatgtttcaggctgcggcttacggcgcgggttccttcctgccggggctgccgtgtccgcggcggcctcatgtctgcttgtttatgagacagcgatcggggcgatgacgtttccgcgtcttcgtcccggaccgttatgtattatttattgcttacattttataatcggttttgcggagcaaaatcgttgtcggaagacaagaagatcataaaatgttttgcttgaaagatttatctttcaagctttattcgctgaccttcacgccgccgatcatgcttctgaccgtcttggcgcgcatgatctcaagttccgatgaggcgacctccgtcctgtttccc

SEQ ID NO: 2882 - DNA, 1874 bp, Unknown
  16S sequences of unknown bacteria
caccctgatctttcttaccttgacgagttaattatgaaaaattctgaacaacagtctacaagcggatgttatgtagctaccgccgtttacggctcttacgattgcccgcaagtatggacgcttcgccgctttcgtgacgatactctggctgagacatggtacggacgtgcatttatccgcacctattatgcaatcagccccacgcttgttaaatggttcggccacacagattggttcaagaaaatgtggaagggcaaactcgaccgcatggtggcaaatctgaacgccaacggcgttgaagatacgccttacaaggataagcaatggtaacgaaaaaacgagtctttatagcgcaaccaatttaaaccctattgattggccatatccttgatcagagccaaccgacatgcgccttgaaaccattacagccatctaaatattgcaaaacatccccctcaacccacaaacgccagagcctgtgtggctctggcgtttgtgggttaccgctttgcaaaagactggcagtctgtgcactggtccatcgtggggttgcactcgtgggtgccgacctggatcttgctcagggagcagtagtcctgggcgtcgcagtgatgcttgcaggaagtgaccgtgcaggcgatacatttattggcttcgcagttcataaaaagtcctcctatttctttgggatagactcagtatgcccccgcaaagggaagaatatcagcccgcggcctggcaatttttcccgtcatacccggcactgcacaaaggctctgcaggcatttgacccgcggctgtatctggcggcacagcaagcatcgcgctgcaagcgtacgcagcgcgtgggagactgcatgaaattctttcctctaaaaatcatttccattcatttaaattatttcaaaaccaggcccgctccagaagcgcgcagccctggtcgatctggccccggctcaagccgccgaagcccagcagcaccttgctctcgtacatggtgggcatcgtcccgataaaatacgggctgatgggatacacccgcgccccctgcgccagagccgcctggcagagggccgcctcgttcattccattgtggacccggacggccaggtgatgccccgccgcctcaccgatggactcgattccactgccgaagggctccagacgctgcaggaaatagcggcgctgccccttataatagacccgcattcggttgacatgccgggcaaaatcgccgcagaggataaactcccgcagcgccgcctgctccaggctggagacgccgcaggcaaaataccggcaggctgcctgataccgctgcagcagcggctccggcagcaccatatagctgatgcgcagccctgggcagacagagcgggaaaaggtccccaaataaatgacccgcccgctgtggtcgatgctctgcagggagggcaccgggcggctgtcgtagcgaaattctgaatcgtaatcgtcctcgatcacatagcggaacgcgccgcggctgcaccagttcagcagctgggcccgccgtgccatgggcatacacaggcccagcggatactggtgcgacggcgtcgtatagacgactgcctcgtcaagctgctccagcttttcgactgtcacgccgctgtggtcgatctccaccgggacgaccgggtgccccatccgtgcaaagagccggtaggcctggttatagacgggattctcgacggcaaaagcgcagcggttcggcagcaggtagctcaggcgctgaagcaagctgtccgtccccgcgcccagtatcatctgcgccggggtacagcgcacgccccgcgcctcaaaaatatactggcagatcgcgctgcgcagggccgggtccccatcggcggggg

SEQ ID NO: 2883 - DNA, 16342 bp, Unknown
  16S sequences of unknown bacteria
caagtagcgaagcggattgcgaatgtccgctttacgaagggggatttaaaatggaactgacacttggaatgtatgaaagctatggaaatgattatctggtatatgactgtgtgaaaaatgagtatgagctgaaaccggaggatgttcgaaatatatgcaatcggcgcttcggggcaggtgcagacggaatcctggtcggaccggtacagatgtttggaaaaatgggtgtgaaaatttacaatccggacggaagcgaggcagcaatcagtggaaacggactctgtatttttgcaaagtatttgaaagatgccggatatgtcatcaaaaaggaactggtgcttcagacgaaaagccgggaggtcacagtacactatcacaatgagcaggcgggagaagtcacgatctcgatgggacacctgtactgcggacagacagagccatcaggggaaagcagccgaaagagcgaatttgtgccagtggagtacaacggcagaaaatacatgggaacctgtgtgtggatgggaaatctgcactgcatcgtgccgatggaggaaatctcaaagcatgcagtatgtgagatcggggaaaaactggaaaactccggacgttttccggacggcgtcaacacacagatcataaaaatcacagacaaaaataacattgataccgaaggatatgagcgtggcgcaggctatacacttgcttccggaagcagctgctgtgcggcggccggtgtggcatatcagatgggactgatcgatccatgtgtgtatgtgcacatggcaggcggcacaatgaaggtacgaattgatgagaaaatgaatgcatttatgaccggaacagcagagagtatcggaaatattacgctgtcagatgaatttctgcggaagtatcagattatggcggagagaaaataatcagacgcggcaagcatactacaaaaataagaatgcagaaaaccgctgcaagatatctggcagtggttttctgcatttcatttctctatgggcgccgaagcatgcagcacacagatcatacggtcagtccgtcagaaacctgatctgtgtgataaaaaatagctcatgcagccggaatgttacacccgtacccacacactcatttcattttcaccgcggtttgcccacgtataatatggaataaagcgaagggtaaccggagatttttccgcagtctgaaccgggcggtaaagacgctgcggcgcttctttttctttatcttccttaaagccctgcatgaggatctctttgaccggttcgccgcatacggtgaaatcgcgcacctgcgcaggtgcattccagtccagggtgagcaggtgcagatcgcagccgttgtctgcttcttccaggcagtaggtgatcggtccgcgggtaacggcagcgcgtccgatgtcctcacgtacatttggatttgcattccatacctggatctccattggaaaatcaagcgtcagtgtttcggattccttccatttgcgcgtgatataaagatacccgtctttgattgtatattccgaagcgtccaggccggtgatggcttcagaaccggagatcggattatgtgctgcacccaggagagatacctgataggaagtacaccagcccgggatgcgaagcgcgagagtaaacggtgtatcggcgctgtcggcctgaagtgtgaccttaccgttccatgggaattcagaggtcatgcgtacggatacatctgttccatttacagtttttttgatgtcgcttccgatgtaaaggtgaacgaagagggtatcatccttttcggtaaaggcataggagctgacggaacttaacgtgcgggcaagatttggcgggcagcatgcacagccaaaccatttctggcgaaccggctttacgtggaatttgcgttcatctttgtggcaggcttccggaagtacctcaagcggattgacatagaaaaagcttttcccatctaatgccatacctgcaaggacggtattgtaaagtgcctgctccattacatcagcgtactgtacgtccgggcagatttccagcatccggcgtgcaaagaatacaagaccgatcgaagcgcaggtctctgcgtaggcagtatcgttcggaagatcataattaaaggaaaaggcttcgcccatgtgcgttccgccaataccgccggtgatatagagctttttctgaaccatattgtcccagaggcgtttgcaggcatcaaagagcgtatcatcttcagtcagcctagcaatatcagccattccggaataaagatagacggcacggactgcgtggccaacggcttcatcctgttcccggaccggaaggtgagcctgattataggcgtaacggagaccgttcggattctttttgacttcttccggatgctccttgtcgaagtagtacggttgttttccgcgctcatcgataaagtattttgcaaggtctaaatatttggaatcctgagtcgtttcataaagacgaaccagtgccatttctgcgatttcatggcccggatagcccttgcattttccctcctccggtccgaaataatctgcgacgtaatcggcatagcgggaagctgccttgagtagcttgtcttttccggttgcctggtagtaggcaacggcgccttcaagcagatgaccgagacagtagagctcatgatgatcgcggagattcgtaaaaatgcggtcttttccattcaggatgtaatacgtatcaaggtatccatcctcctgctgggctgcgcagacgatgtcgatcgcgccatcggcgattgcttcaagctgcggatccggatgctgagtcagggaataaccaactgcctcgatccatttataaaaatcactgtcctggaaaacgaagccataaaatttgtcgtcgagatgcttcggatcctccggaagcgcctcaaagccgcggaaggtgtagaccggctctttaaatgcagttccaagctcctttttctctttattaagctttccggcggccttaaagttgtgcatgcagaagctaggagccgccccttctacctgatcatttaaagcggcccactgatacgggataacctctgtacggacaagctccatctctttcttccagaatgtgtctgtaatctgtacattgcgaagagagagaggagaagaaaaattatttttattcattgcaaatcctccatcaaaaattaggttaagtcgaacaaatatgaacagccctactgtaccatacattacagaaaccgaccattgccaatgtggaaaaaaacatgtacaatatggaatgacaggagggattgagaagatccgccctgatgaaggagaatggtatgctgtatctggaaaaaatggcagaacgccatattacaagtgcgaactatatcacatctgtcaatggaatggttcatccggaccgtgtattgccggagcatgattttctgtatatgctggatggaacgtgggaggtttttgaggatggaaaaaaatatgaaatggaaagtgacgatcttctgattcttgccggtgggcgccaccattatggagagaaactgtgtaatccgggaaaccggcatatgtattttcatgtgatgccgacaaaacgtgagcagaggtggagctgcgtacaggaaaagagaaaagcgccggataaggatcagacctgtcgggaggaagatttgagaatcacgtgtgcgacgcttcttcattgcagacgcaggccgcagatccggcggtactttcaggaactgatttccgaatattggtcgcagaatccaatgcggacggagcgtctcaatattttttttcagctgattttgtgtgaactgcttttgctgcagtcggaaaaagcggaggatgggaagccggaaacgatgctggaggaagcaagaggacagatccagtccaatccgcagattttttacagtccgaaggagatggcggaccatttttttgtgtgccccaggaccttgaataattattttcaaaaggcgtgcggaaagaccttttccatgtatcagatggatctgaagcttgaaatggtgaaggaatttctgattcatcagccgcaggcaaagctgcatgaagccgcggtaaactttggattttacgatgaatttcatttgagcaaggcctttcgaaaaaaatacggacagccaccatcgaaataccgcagccggatccggtaaatggtatctgttgaggctgttataaatggaaaaatgagaagggaaaagaaaaacgtatggagtattcggatctgatgatttttattatggaaatgctcgggacagtagcgtttgcatcgtccggagcgatgcttggaattgaacggaaaatggatattttcggggtaaatgtactgggtgtgacaacggctgtcggaggaggaatcatccgtgatctgattcttggaatcaatcctccggtgacgtttctgcatgcagtttatgcacttgcggctgtaatcacgtcaacgctgctgtttctggctgtttatatcagaaatcaggtgttttccggcaatattgcgagatggtatgaccgtatcatgcttctgtgcgatacgatcggacttggtatttttacagtagtcggttcgtatgcggcagttgcggctggatatcaggataaccattttctggtggtttttgtcggggtgatcaccggaatcggaggcggcgttatccgcgatatgatggcaggaacaatgccgtatatttttgtgaagcacgtttatgcagtggcatcgatcgcaggaggtattgtgtttattgtgctatatccgtataccgggcggattgttggaatgatgaccggagcaggagttgtgtgttcaattcggtttctggctgcttattaccgctggaacctgccgcgtattcattgacagtgcttactgctccatctgtcgccccataaatccggctgcgcaccttgcaagggtctgttcggtcgttcccatggaatggctgctgtcacggctgcgcaggatgacagatccgatgacatcgccttcacagagaatgggactgatgacctggggataattgtccccagaatcatcccgggtgattttaatgtgcgttccggatggcggattaagaagtacatgttcgcgctcattcatgattgcttcgagcgcaccggtcacaggagagccaatgaggtcgcgttttatgccgcctgctgcggcgatgacctgatcgcggtcggtaatacagacactgtgaccggaggaagaggagagcgcttctgcgtactccttcgcaaatgaaccaagctcgccgatcggcgagtatttttttaaaataatttctccctcccggtcagtgaaaatttcaagcgggtcgctctcgcggatgcgcagtgttctgcggatttcctttggaataacaacccggccgaggtcatcaattcttcgtacgattcctgttgctttcatatttgattcgtcctccaatgttcagaataattcataagcaggtaattcctgacgcctgtagttagtatgtggaaaaagaggagaattattctttgggacggaaatctgttataccgttttggcagtttgaaaatcccggatcatacgtactgcagtttcattgatctgcggaggaatcgcagccggacgggcaagaaaatagccttgcagataatcaacgccaagctccagtactttggaaagctcctccggtgtttccagaccttctgcgataatacgcatgtttctttggtgggcgtaggaaacaatattggagacaatctgctgtttatccggattagtatgaatgtttcgaacgatcgagagatcaatcttgataaagagtggggagagttccagcagactgagatcattgctgtagccgctgccgtaatcgtcaagcgcaaacataccggtaaaaccaggtgtgctgcgttttacttcaagggaatggtgatccagagcttcttcctccgtaatctcaatgacaatgtttttctgaagcatggagaaccggttcgcaaattcgcggttttcttcctcggtcatatgctgactggcaatcgagttcagaaagagaagatcactgcttcgtaccagtttatcgcgcagcaaagccagataagcttccgatgccttgaaaatagtgatgcgctcgatgtcatgcagacgtccttctgcccgggccattttcagtaccgtatccggagaggagatggtcggaagattgacacgcatcagtgcctcataggcgattgcttcaccggtgacgcaggatacgatcggctgaaaatgatagtagagcagttcttcgcggatcaggcggtcaaattcctttttgctttgcaggctgtaaatttcattgttgtaggtgccaaggtcaaattcaccaagccggccttttttggaatgcttgacctggtacattgcaaaatctgcgtatttttttagcgtagtcgggtcagaggcatcctccggataccaggcaatgccgccggaaatactgatgaagagctcctgaccgtccggaagatggatcatttttttggaaaacttgtcccgaagctgttcaataacagtacggatttcatcctggctgtcatagccgtaaaaaaatacgttgaattcatcaccggaaatgcgggagcaaagtgtgccttcaggtgtgtgtctggcaaaacaaagtccggtctgacggatgtactgatcgccgtaatcatgtccgtaggtgtcattcgtatgcttgagattgtcaaggtcaagcataagaaaggcagcgtgtctgagattttccgggtggaggaaaagggcctcacattcgcgctggaatgcctgtcggttataaagaccggtcagtgtatcataatccctgtcatgttcgatccggagacgttccagtgtagaggcagtgacatcttccaccagtccaacctgtgcaagcacttcatgtgttgttttgaggcgaaggtaatgtacctgcccatcggcgggtgtcactttgtaaacctcatctccggacggagtaatggtacacggacaacactgcccaaaattcttcaggagtgcacggaatgtatccggagtaaggcttgcggtatctggctgcgaaagtccaagcatgggaaagaagttgtcggtcacgaataccgtaccggtatcaaagcgtatctcatagccgccgagctctatactggccatgtccataatgcgaagaaactttgtggaagaggtaagcacatcacggctcagctgggtgatcgcatcggaaaactggtctacttcacggattcccgtgtgtgacagtgacgggatcgtatctcgtttggactgtgcctgtgctacctccgcagaaagttttgcaaccgggcgtgcaagatgacggcttacgaacagactgcacagaagcccgactgtgagtgtaagcagaatggacaaccagaaaagatgaagcacatgcgtggaaagcgcatacagatgactctcatcaaccgtgccgatcagtacccaatgatcggaagaaaacggagcatttttgctgtacagcgtaagcggttcaagcgcgacataatagttcgtaccgttttgaacggtgaagtaagagtctgagccggaatactgcaatggcagaagaaaagaagctgtttcaggcttttcattgccggatgcagagcaacagaccacactcatcgaaaagattggattcaaaaggccagagcgggtggaaccaagcagataagcgcctgtattgtcatcctggagttcctgtgccggaagaagcgtctgaagatagctggtcagcatttccacaccgagtacgccgtagacggtgccgtccggaagaagcagcggaatcgagtaggcaatgcaggagaggtcatcgccctccagagtataaggggacgttgtccagcggccataatcagaagcgtttaattttccgccgtccttaaaggcagcctgaaaaacaggataataaaaagaagcggagtcagcaccgtcataccggaataccggactccattttttatcggtcgaaattcccatagaacggacggccagggcagaagcgcgttccagaagcagatcataattacggtcagacggagcagaatcgggatcaagatcacgaatgtaaattcccggaagacaggtgccaggtgctgtttcgtcaagatcatgcgtatttaaaaccacaaaaataccggtcacatttttacggcgcagctgtgctatgagatcggtactgatctcctgcagcaaaggaagagcatgctcactgcttgtatccagcgtagccaggctgattttgccttctgattccagagtgagcatgcttgtctggatactctgggcaagcgcttccaaatcctgatttttgagcatggtattgacaaggtaaccggaacggttttctacctgtttatgcaaaacatcggcggcattgttatttaactgctccctgacatgggtaaggtacaaggtgacaaataagagaacaaattcaaccccaagtaccaaaagcatcgagaacaggattgtatggaaaatggattttcctttcgaactcataaaagaaaacgatcctttccgaaaatgtgaaaattaacgtaactgttcagagccaacctccaaaatgctacgcatttcgtcggtgtggcgtatccgccaaataaaatttcaaaaacaggcttaaaaatgcaagcatttcctgcctgttttatgaaattttgcctggctctgaacagttacaaattaacagtgtcatccctcaaaagcctgaagctgtttgagtgtatcctggtaccaggcttcaaaataatcatcggtgagaaattctgcggtggcatcctcaaggctctgaccgcctgcgagacgttcttctaccgtctgacggtcggccgcggccagatcactcaatccgtaactcaggatctgccttgcatcatttcctctgtcaaatgcctttgttgtatacatctgattagaatttacggagtcaacggcaacggtaagaatgctgtccatagaagcactaagggaggcagtacttttacggatcgtatccatattgttggccttttttgtgaccggaagatagccggagcctgcacagaaagaaatgttatgctccggggctgtaaaccatttcagaaattctacacatgctttgacggttgcgtcatcctctgtttttgtcaccaccattccggcgccctgctgaacaacatagttttctccatctgcgaatttcgggcacgggagaaccttcaatgtaatatcatagctttcggaatccgtcagactgacctgtgtcggaaaaaatgtggcacttgaggtggaaccgacataaccgataatgtttcctgtcttgatatcatcactgcgaaaacgtccggaagcagaaaaatatcccttcacataaggaaggtaataattgtcccacagcttccgcatgacctccttatcaaaattgagagacatttttccgttttctgtattgaaaataggagaaccaagctgttttgcaccgagcagaagatagttggccattgcatcccttccaaacagtgcacgtccgtcatttttttccggtgtctgttcatccgtccagttataatacgtttctgcagtagagacaaggccttcgatcgtggacaggtcctcataggaagcgccggttgcatcagaaaaagcacgccagtctgtatcgtttaagaaaagaagctctgtggattttgcgaccgggaagattttgatattgccatcaccggaaaagtcgccctcatcaagataattatcgatatatgccagacgctcttctttcgtaagatagtcggaaagatccatgaccagtcccatctgatcgagggtgtaagcagtatcagcataggcggaaaaaatattcggcatatccgaagcgccgacttcaccgttcgcggaagcaagcacattcgtttccagatcatttactgttccctgactggagctttctacgatgattccaagggaacgtccggtggtatcattaaattcggagacaagtttgttgaataattcaagctggtcaccgttgtaatacgtccatacggtgatggtaagcggatctgcggaagcagtattgtctgtttttacagaacagccggaggcagaggccagaagcagaacagcagtcagaatacatgcagaatgtttctgcgataacataaaaactcccttcttgcccctgtattgcagaaaaatcggacacaggagcatcagcaaggaaactgtgaagcgtaaaagtcacagtttccttgctttgattggtaagatgttaaggtccaaagataccttacggattgttccgtacttcgtactcccacaaccctgccagatattcgcatatcgtgaagcttgcgctccacttttatgctcatatcgggaggccattaagccataaaaccactcctgtgcaggcacatcgtggtttcaggcttttgaccctggcatcctggtaaatggcaggcagcgaaagaggattactacagtatatcaggaacggcatacaccgctcctgatatgaaaaataatgtttcgctgtgcgaaaaggcagcaatggaaaatcgtcgaaacaatcaggaaaaagacagtgcctcgcgtcccatctgctccagaagatcactcttgatatggtacagcttggaagaaagatctacgtagaccttatgcggatttgcaagacgtttcgtttcatcccagagcgtgtctttttctctgatacagatatcgcggatttccataacagaaggagaagtgtagacacatacaccgtttttgaataccggaacgagcatttcccgcagtgtgtaggagccacccttgatttttgtttttttccacgtttcaagaggatcaaagatgatcagatcttcggaaggatcatacgtttcatctgtcagacagatcagatcggcacgaattttgccggtttgcttgtcgtagatacgaagaatttttttgttgcccgggttagtgattttttccgtattttcggaaagcttgattttcgggataaattcaccggtcttttcatcgagaacggctgcaagcttgtaaacaccaccgaaagccgggcagtctttggaggtgatcatattcgtaccgactccccaggaggtaattgcagcgccctgcgttttcaggctgtcgatcagatactcatcaaggtcactggatgcggaaataattgcatccttaaagccggcctcatccagaagctttctggcctgcttggacatataagcaaggtcaccgctgtcaagccggataccgtagcctttcagctcaatgccggcctcacgcatttccctgaagacgcggattgcattcggaacaccggaacgcagggtatcgtacgtgtctacgagcagcagacaggcatccgggtaaagctcggaatactttttgaaagcggtatactcatccggaaaactcatgatccagctgtgagcatgtgttcctttgaccggaacgtcaaaaagctgtccggcaagcacattggaagtgccgatgcagccgccgatcatagcagcgcgggcaccgtaaacaccggcgtccggaccctgagcacggcgaagtccgaattccatgataccgtctccgcgggccgcatgaacgacacgtgccgtcttggtggcgatcaggctctgatgattgataatatttaagatagcagtctcaacaagctgtgcctgcatgatcggtgcgatcactttgagcagcggttcatacgggaaaaccacggatccttccgggatagcccagatatcaccctcaaaatggaaatttctcagatagtcaaggaagccttcgtggaagatcccaaggcttgccagataagaaatatcttcttccgaaaaatgaagattattgatatagtcaattacctgatcaagaccggcagaaatagcatagccattgtcgcacggatttttgcggtagaatgcgtcaaaaattactgtctcagaagaattgctttcgtaatagccctgcatcatcgtaagttcatacaggtctgtcagtaatgtgagatttaaagtactcatatcgataaacactcctttgtgtctgcagcagtcggatataaggctgcaaattgatagatgccatactttacgtattccgaaaagcacagtattagttacagtataccatatctggagaaattttgtgaagaaatatgactatttttctgtggtgcattctgggaaagtattctgggaaactgttactgtccgaagaccgggaagaagtaaagcggacattcgcaattcgcttcgctacttgctcatgaacgcagtcgcttcgcttatctgcgttcataaagcggatgtgaaaagcatgggaacaatattttacaaaacaaaaaagcatctcaaacgagatgccttaaaccagggctaccaggattcgaacctggaaaatgacggagtcagagtccgttgccttaccgtttggcgatagcccttcatttattcttttgcgttgagcgctgtctctcaacacgatgaattatataacactctttacagaaatgcaagtactttttttgaattttttaaattttttctattcattgaattatttacacaataacatcgattttggaagagaagggatgctgttacatagaagggggcaaaatcatgataatgtagaggacaaaaagagcgcaagcgagtcttaatgataggtgagatgtcctccgttgatataaaaaaaagagatactcacctaagtatctctttagcagggctaccaggattcgaacctggaaaatgacggagtcagagtccgttgccttaccgtttggcgatagcccttcattttttatgcgctcatgctgtttgctgtgagcgaataaaattatataatatatcaggagaaaatgcaagtgttttttcttttattttcacttccaatctttttattgtaaaacaaggctacctgtgttaccatggcgctgaacttctgttttacgaaagcagagacttcaatgagaagcgaatgatctgtctgtgcagtaaaacggaaacagatcggattcatcagaagagcgccttttgcgaagacgaatcagtatccggactgtcagaagcgaagcgctacaaaaggagaaaggaaaaaatacaatgcaggcttatttatttgtacatttcagagaaaaaacaacaccggacggcgaacaggtatatttcggattgagcaaagacggattccattgggaggccgtgaatgaaggaaacccagtgctctgggcgtatcacggggacaagggcgtgcgtgattttacagtgacgcgtgcgcagaacgggaagttttatattctggcaacggatctgagcctttcctacggtatgcggaatcagtaccacaactcctgggaggagattgcaagaaacggaagcaaagatcttgcgttatgggagtcagaggatcttgtaaactggtctgagcagaaaatggttcggatcggggatgagaatatgggatgtgtctgggcgccggatgttatttatgataagaagaaagacgagtatgtgctgcactggtcgtcctcgcataagagcaatgattatgcaagcaaggcgatctattacagccggacaaaggattttacacatttttctaagccagaggtgctgtataaaagagaaaacggagatatcatcgattctgcaatttatgaagaaaacggagtttattatctgtttgtcaagagtcatcatgatccggcggggcttcagctgttttgttcagatcaggtaaccggagaatataaagaggtagaagcctttgcagagagcatgaagggcatggatggtgcaaaatatgaggcgccgacggcaatgaagctggcagacggcagatggagcctgtatctcgactattttggtgttccgggagcagggcagggctacgtgccgtttttggcggattgtctggcagacggcagatttatgcgctctgacgcagaattctcgttcccgtatggctttaagcacggcacgatcctgacaattacggaagaagaatacaaccgtatcaagtcgcacgactggagcgacaagggatggatctgaaaaaatgagagcaattgaatttttcaaagataacaccggattttaccggaaacttggcatgctggtgctgccgatcgcatttcagcagttcatgctggcggctgtaagtgcttccgatgcactgatgctcggcgtgctgtcacaagccagtctttctgcggtatcactggcgggacaggttacgtttatatttaacctgttcatgagcgggtttgcaacgggaaccagtattctggcggcacagtattatggaaaaggagaccgtaggtctctggaaaagatttttgcatacgtccttcgtatttctgtgatagtttctgccgtgttttttcttgcgtcgctttttgcaccgcgacagctgatgcggtgctttacggcagatgaaacattgatcagcggcggaatcgtttacctgcgcattgtggcagcctcctatctgtttaccggtgtttcgcagatttatctgtgtattctcaaaaataccggatttgccttaaaaagcacggtgatcagctcatcagtggttgtgctgaatattttgctgaatgccatttttatttatggaatcggaccgatgccggaaatgggaatagcaggagcggcgcttgcaacctctatatcgaagctgatcgaaatggcgtgggtcattctggaatcgctgcgtgagggacggatccggctttgcggaaaatatcttgttacttctgcaggaattctggcaaaggattactggcgctattccgggccgatgctgggagattttctcgtatgggggttcggattttcaatgtattccgtgatcatgggacaccttggaagtgatgcggtggcggcaaattcaattgcgaatattgtgaaaaatctgatcgtctgcttctgcggcggtcttgcaaacggcggtgggattgtggtcggcaacgagcttggaaaaggagaactgaagctggcaaagcggtatggtgatcttttgttctggctgtgtatcctaagcggaattgcttccggagctgtgcttttgcttttaagtccggctattctgcattttgcaaatttaagtccggcggcggttggatatctgaaatggatgctcattctgtgcgcttgttatatggtcggaaaatccttcaatatgactgttatcgcaggaattttcccggcgggcggtgattcaaaattcgggctgatctgtgatatcgtaacgatgtgggtttacgcagtgccgtgcggatttctggcagcgtttgtgctgaagcttccggtcgttgcggtctttttgatcatcaatctggacgagatcgtgaagctgccggtggtaatacggcattacaggcagtataaatgggtgcggaatctgacgaggtaaaaaacactttacaggatttgaaaagtgtgctaccataccaacgcaatgaaacagggactttggtatgaattggaaacgacacatgtgagctgatcactgataacgaacaacacacatgtgtctttttgtgcgcaaaaataagcaaaacaaagaaaaaggagtacaatttatgcagaaatcaaagttacagaacattctttttacactcgtcatggcgttcgtcatggtatacgccatggtgtgctacaacatcgctctggataagggcgggatgtcaaatgaaatctttttaatcgccttccatgagattccgatcatgtggccaatcgcctgtatcctggaatattttgtggtagaaaagcttgcgacgaagcttgcatttcgcattgtgacaccacaggatcgcccggcatttatcacgattgcgatctcctctatgatcgtctgcctgatgtgcccggtgatgagctttatcgcgacactgcttttcatgaatcctggaaaagagattatcgcgctgtggctgcagaagaccgcgcagaattttccgatggcgctgtgctggcagattttctttgccggtccaggggtacggaatctgttcgggctgctgaataaaaacaactaataaaacagctaataaaagaaaaaaggaaacacctgaaatgatacggcgtatgcggtgcatttcaggtgtttttatgtatttttggaaggttttcaaagaatggctgtcagaataaaaaatacgataaggcacctgaaatagtatggtaaattttaccgtatatttgaagtgccttttttgcatgcactattgtaaataaatgaaaagtctaatcccccagctatgctggggagaatagagtaagtggaaacgt

SEQ ID NO: 2884 - DNA, 32759 bp, Unknown
  16S sequences of unknown bacteria
gcgctgatgattgttattactatcccataagcaagccagaagcttactgtttctactgctgtcattgtggatcacctcctgctattaattagtttgtttttgtttttccaagctatatagtcatctttatcgacataccacgttcttcctatttgatatccgggtatttctccagctttgcacagcttacgaatccaatcgcttgaaagacccgtaagtcttgacaaacaagctaaatccatttgaaccggcaactcgtcaaagcttttatatatttgtggttgcatcatctctatccctccctactctgcttgctcaagctctcatatcaagtttcctatttggataactccatagtttcgattgttattttcattcttctcacctcgtttacttagtgctacaatatacttaacctcgaggaattttttcctataggcaacaatagaaaggtgggtgatgcttttatgaacaaagttctggaagttatcatgcgtcttagccgtacccttcgtaagccggttttcggctttgcttaagcaaacgtgtctcggacgtagtaagcagggattgtatgtgaaacgtctgcgctcgggcatacataagcctgtctagtcaggaaggttgtccgctatacctcggaaaccaagtgtataccttatgtaacacatacaattaagggtaaatgtgtgagaaggagctattcaatgttagcggcattgggtagttcctttttttcacccacctttttattgttgcctattcaattcctgtgttataatctctttaaaggagtgataaatatgctttctattcagtctgaaatcttaaaccacattcatcaaaaccctcacattcatttcccagtactgatttgaaccaccctttttggttcgctacctttgcttctgtttcagcctgaagcctgtatatcaagtcaatcattttgtccattcgctcattaaattttattgtgcttgggttgtttcgacagttcttgcattcttcgtactcaaacggattattttcgttcatcttctcacctcctaactaacctctttactttttaagcattccttctccctttcatctgctttgctttcggctattccaagtatgtaacccttatcaaattcactaagatttggcattgcattacttatcgtagctataatttttgcctctttttccgttatcattttatcacctctctttgtttcttatgaacttattatatactcttaaagaacattcgtcaatactatttttgttctttagcaacatatttttgttgactaattaattatattgctatataatgaaaccatattaaaaagaaaagaggtgctaatgatgaaagaacgccttaaggcacttaggaaagaattaggcttaacacagcaagcgtttgctgatagattaaatataaccagagctaatattgctggctatgaaataggtagcagaaatccaagcgacgcagtaatttctttaatatgtaaacagtttaatgttaatgagcagtggcttcgtactggagaaggcgatatgtttccaccacaaaatagattagatgagatagcaagtatcacttctgatttatttaattctgaacctgaatctttcaaatataggcttatcactgcaatagctaaaatgaatgagaatgatttggaagcactggaaagattagttaatgaattagcaaaaaaataaaggtcgtttctatccgacctttaataacttcattattattttatatattaattcaagttgctgcttacttaggttttttagttgttcacaaattgcttgtttataatccatataagcacccccagtaattatataaggattttaataagttacttattgcgataatctgattatagaacgaattttcgtatataacaacatattttcttatttataaaataaaccgtcataatctacgaaaattttttcttaaatttgtataatttttagcaacgtatgcttattttggaatatatttctatggctttattctatcatatattggtcgaattttgtataagtaaaattttccaattgcgtttgttttgaaagaggagtggtatatatgaaaaaatacaaatttgattttgaaaacattgtttttgaactatttccttgtcttatgctatttttcatatgcgactatctttttgcacacgggcattttataattgctgtattacaagggatatgttgggtaattttttgttataaaaatatcggtgatgaaaagacagaagaagatttgcgtactttagaaaacagacttaaatcagcagcatatgattactatttcaaattttacggaatgacatatgatgacttttataaagctgatccatataatcataagcatattgacgaagccattactcttatatatgacggaataaaatttaggttattagtcaaaaaaaggatcgaagatattcctaatatctcatcagataactcatatgatatttctgggttcaaagaatttatttctctacaaaaagaaatgtcaaaaaaaccagaagaatatattaataagtctgtatacatagaaggatatattttttctttagattcgtttgatggcaaatctgaaatttcattatctccaattccttgcaaaacagaattcgatagatcaatattttatgaagctcgttcattaggcttaactgatttaataagtgtttatagtgattacggttttccagaagaacgaggcttgcatttaagaatatatggaattccatatttttctgaatatagtatgaatgttaaaatcttcgcacaaaaatatgaaattatagagtaaactattttttaataaaaatcccctcctgcgccaacaggaagggataaagcactgttgtatattagcaatatgaaatcggggtgtacatattgagtaaacctatattgacacaaactgaagcagacacactacttaacatgttaaaaaaatctttagatgaatacttatcattgccaagtccaggggacaacacagaaataactgtttccggtatagacagcaacgatacattcaaaataagtatcttccagagtaaaatagctaaaaaaatcaattttggcgcaagagtcagcaaaaataatgtaatgcttttagagttgcatattaatcccactaacgtacatccaaatccaaatggtgaaaagattataggtaaccactggcatatatataaagaaggctatgatattcgttgggcttttccggccgaagatataggcaaccaaaattttgtagaactaactttaaagtattttgagaaatttaaagtaatagaaacaccacatatagactttaaacttgatgttgggttataataatcaataagcatgaagggaggggagactatggacatcaataaatatattaacgactatgtagactggcttaaaaatgaaataacatttactaaaatcggagaatattacgaaattacaactccctaccttgacagtaataatgattatattcaaatctatgttaaacaagagaatcagactatattcttttcagatgacagttacactcttaacaccttaaaatcaaacggtcttcagctcactaaagcccgtaaacagcagctcgacaacattctcatgcagttcggagttgaaataaaaggttccgagttaatttcaaaatccggttccaatgaattccctgtaaaaaaacatatgtttattcaagcaatactgcatgtaagtgacatgtatctaacttctcgcacaaaagctgtttcttattttattgatgatatacagtcatattttgcagataacgatatttattacacggataatgctaaatttacaggtaaatccggattcacacataattatgactttgtctttcagcgcactaagaataaacctgaacgcctttgcttagcaattaataatccaactaagcaaaacatgggaaacactatatttgcatggaatgataccaagttaacacgcaaaaaggatagttcgttaattgtaatattaaacgataataatccaatacctgatggtgtgcttgacggattttccgcctacgatattaatgcagtaaaatggtctaacagggatgctgataagtttaaattactcttttctgcataattgtatattaattaaaaatcccctgtgcgccaacacagaggacttagcggtctatctttcgatataccttattctcgacaaataaagtatatcacatgaccgcttttatttctatacccaaaataaataaaggaggtcttttttatgccaagaaagtctaataagacacgaagcgatggtcgtgtcgctgtgcaaatctatcttggtactgttgatggaaaacgcaaatacaaaactgtatatggcgcaaatcaaaaagaagccgaaactaaagcagaagaaatcaggcgtcaaatattttcagggctggatatttccgctcaagatgacagcttcaaatcatgggctgacagttggatcaatattaaagcagcgacagtgtctgccggaaggttatccacctataaatcccatcttactcatcttaaacctctaaataacgctcaaattactaaaataagaactgtggatatacagagcattatatcagaacttgcaattgaaaatccgaggacgcataaaccaactgctaaaaaaacgcttataggaattaaaggcactgtggcacaaattatgcaactcgctatagacaacagggtaataaactataatcctgcactcgccgtaaaaataaccgctaaggaaagtccggcagaaagacgtgcattaaccgaggaagagcaatcatggattgtaaatacccctcatagagcacagcttcctgcgatgattatgcttttcgcaggtttaagacgtggcgaggttgccgcacttgagtggtatgatatagatttagaggcagctacaataaatattaacaaaactgtagagtttatcaacggttatccacatgttaaaaatacaggaaaaacaaaaaacagtattagaactgtagatattccaaatatacttgtggattttttaaaaaccgaaaagaaaaaagccaattccatatatgtctgtactaacagcaaggggcaattaatgacagaatcttcatggaggcgcatgtggtcatcctacttaacagacctaaatttaaaatatggagatttctctaaatttactaatcaaccgaggagtaaattcgaccctaaaggtacaccttttatcatcccatattttacagcgcattggttaaggcacacttacgcaacaatgctttattttgctggggtagatgtgcttactgcgatgtatcagcttggacatgcagacatacaaaccacactgaatatttatacacacttggataaaaaatttaagcgtaaatctatggcaaaattagacgagtttttaaaatgcaagtcaaatgcaagtcaaaccttttcacaaacccagtgaaatcaaggatttacggcgttttttctgtgcgttcgggacgcagagaccgcaggttcaaatcctgtcaccccgagttttttaaatattgtattttataaccggcacaatccgtacaaaatggttgtgtcggtttatttttagcataaaatacttttaaaacagtatgtgattcaatcacatactaaatcaattagttttgatatattaaaaacataataaagataacctgcgcagtatatcgatgcaggtcaggaggtattttatggctaagaaaacagcgtctgtcaatcaaaaaatatgcgttgcatgcggagcatgcacaaaagtatgtccaaaagaagctatatatatttattcaggctgctacgcgaaagtagatcaggctctatgtgtcggatgcggtctttgtgcaaaaacatgtcccgcaggagttatagaactgatagaaagggggaatgcaaaatgaaaaagaaacactggtatgattatttgtggatttggtcaattatttattttgctttaggtttctttaatatcctttttgcttggttaggtatgatcgattttctcattcctctcggttttgctgttttcaaaggaaacaaaaacttctgtaaccgttattgcggaagaggtcaacttttacagcagctcggagggacatacaaatgctctcgtaatcgtaaaactccctcttggatgtcctcaaaatggttccgttacggctttcttatattttttcttgcaatgtttgccaatatgttgttccaaacttggcttgtcggttccggtgccgaaagtctcaaagaatctatcaaattattttggactgttcgcattccatggagctggacctatactgccggaatagttcctaattgggttgcgcaattcagctttggattctacagtattatgcttacatcaatgcttttaggtcttattgtaatggttctttataaacctcgctcatggtgtactttctgcccaatgggtacaatgactcaagctatctgcaaaattaaaaaataatatattttaagcaaaaattatatttataaataaatatttttgtttttcaactgtggtcttaaatacggataatataattttcggagaagcattatatatttttaatgcctctccgactttttatatattagatgatactgtaaaaaacagttgaataatctacagttcgcaattaaatcttattaaattcggtcttgctaactccgtagtgtacagttgcctgttttccgctgtccgtataattaaaatattttccccagccgcttggcttttcagctgcgtctgtatatatatccttaagattcgcgcatttataaaaaggcgcattggaataacttgatgcagatattgtcgtgcagtttttggaaatccatattttggtcagtttagtacagccataaaaggctataccgccgatattggtcagtttttcaggtaattctctcaaacttatcccctcgcagccataaaaagcattactgcctattttggttatcccctgcggtaattctgtcagctttatatttatgcaatttctgaaaacattgctgtttatttcctttattccctgcggcagttgtgtcaacgctaactttgtacagcctgtaaaggcgctgtttcctatgctcgttatcccgtttggaagcgatgttaatgcgagagccgtacaccctgtaaaacaacttgtaccgagttctgttatgccgtcgggaagtttttccaaagtcattcccgtacactcgttaaaagttcccgtttctataacagttatatttgggggcaatgacgacggatttatttttgcacatctgctgaaagctccggttcctatacttgctatagtttcgggaagctcgctcattctaagttcaatacagccgctgaaagctccgtcccctattacttctatactgttcggaaaccttatttctgttaaattttcacattgataaaatgcgtcgcttcctatttttttgactccttcgggtattacaaattcgcttactgtcctttcgataagctttttaatgctttcattattgtttgataaacattgagccgtatgctccgcttttgttttcaggtttttaagcatatccgtatttatttcaataggtgtggacatctttcatctctcccttacaatatgtatattgttatagattttatcgccgagcaattctcctgctgtttccaatatcttttctatttcgccgattaataatttttgttccgcaacctcgttatttatcctgtttatttcgctttgtatactcatttacgccgcaccgccttaaattgccgccaacgctgtctctatatcgtttgtaatcgttacggttccttctccactgtggaatcctaaaggaattgtataaccagttgtattcatgccgtcaatcgtagctttaacagctccattattgaccatagttccggctttttccgctccgctgccgtctgtaaatattttgtttgccagtacgtccgcagctgttgccgttgtgcctgaaatatcggcataatttttcggtatagcttctacgcttacctttgaaaggccgtcgtatccctcgtcaggtgtaacatcctgctgagattttgtcggaattatgctcttctcctgtaatgtaggcgcattttcaacatttaccgttacttttgatattacttttcctgccgtaggcgttacaattccgttggcagttattgttttttcctcaagctctatgtttacagttccgtttccgttatgatagcctttaggtatagcatagcttgctgttgatatatctaattttttgcttaccgctccgttgtcagctatgctctctatcgcttccgtacactcctccagtgtcgccgcaggttctgtaatgctcattccgccaagttttgctctctgtctgtctctcaacccctgtaatcttgtaatctgttccgatatgctcatatttttcctccttttataacgctttaagaagagattctatatttccgacttccgtatatacggctccgcttgtaacaggctttgtattatcctcggaaactttatccgttatgtcaaccgataatattccggtttcatctattttcagattttttccgacctttactcctcccaatatatcctcagaagcatgcggcaaagataaacctgtcaaattcccgatatttatttccgttccgtctgacattataaatataatctctccgcggtcattggattttatatcggaaacgcctcttccgattaacccgtaaacggaagccgatattgacggtttcaaaactgcttctattactccgtcaatttttttgttcatctctttcacctcactcaactttaataatattgttttttacaattgtacgattatattttcccaaaatccttatgtcataaaaatatgttcctacttcaaataaaatcgtttcatctttattgaaaaccaaattaataaagttttcttttacatttgtaaactcaaacgtctttacatcctcgcctctgttattttttataattacttctacggtatcctccgtgcctaaacttatttcctccccgtctgcgtcgtatagtttaatgctcagaccgatttcaaactcgtccatacaataccatgctattattccgttcgtaatcctcgggcttggaagtgcagcttctattttagccatatacgcctaccccctgtagttaaataagtctaccagtaccgaattaaaacccgcttttcccgatgagctttttttgtccgatttcttaccgtatcttctggcatactgcaagacgtcatctatcgagcttttgtcatatccgcttccgctgagtttgtcggctatcatcataagaccgttttccccaccgtcattaaaggcctgaagagcgtcgtcatatatggaagcagttgcctttttcccctttgatgatgttttcgatatttttactgaagtatttttcagtccgtcaagatatttctcatattcaaactgtttttctttaaagttttgattccatttttcgttttcattctcaatatttttccagtagtcgctgctttctgtttttgctgcgtcctgcattatagaaagcttattaaagtaatcactccgttccctgtctatttcatcacgatattcattgtaatagtaatctctttcggactgccaatcgtttacatcatctctgtatttctcatagtcgctcttttcggcatttacataaagcgaataaagtctgtataattcatttccctcttcctgataagactcccttgcattttcataaagctccggaatcatattattcagctgctgaatatagttgttgtatgctgccgccccggcagaataggcgtatgtatttccatatcctcccgttagtcccgcggcttgtcccattgtatcgctcatggtggtttgtcctaggcttacatattggtttttatactgttgatacaacatatcggaatttaaatcatatgaaaactcttctcggttctccaatttttccaatatgtcgtttatctgctctttgtaggcgctctcatatttatcaggtctctttgaatttatttcttcatatttttctttatatttatcagcctcatatccgccgttgtacaaatctttaatattatttttcgtttcatcacttagcgaagttgcatttgaataaggattatatccgtttgcatactttccggtatagttttttgtcgtcatgttttcgtcgtataaagccgacttatagcttccgtcggcgtttacatcaagtatctgatacgttccgctgttcgttacaactctgtccccaatgcttaatcctgcctgcgccttaccgtttgactgtaccttataatactttcccgtagcgcccacattcatcaaatcacttgccattttccttcaccccgcttttaaaggctttctcttcctcttccgtttgtctttttgccatttcttttatctgtatgtaatatcctctcattatcatttcaacgactataggcggcaatccgctttcgtttatacatttttccatgtttatctcaaattcttttatcgctacagaagccggtttattcataaaatcacccctttatatcagtccgcatgccgtcagtatatcatcggcgttataatattcgctgtcgcttacatatatccttatatcatcacagtatagccttttgaacctgttgtcgctgtttccgagataatagttagccgtattgtttatcggctctaatctgcttccgtcaaatacaaatccgctctcgtctccgtcatcattgcatataaacgatacagtttcatttccgaataacaatgtattgctcatcggcctttccttgcctgcgctgcttgtatgtataaacttatgcgctattgttatgtctttagcggtcattactattgaggcagcgttccctgcgtcgtcatagcttcccgaagacggcagttcaaacgactgcattgttaatcctgttctggcacactccacatggctcagaatacttccgttgtcaaatcctatagttgtatataggttgtcgacagatataaatgtatttcccacctcatgcttaataagaagagcttctctcatatctccgaagtgatcctgatatgtgtcaaatcccattattccttttcttgcggtgtctccgcttttcggataaacgctcaggcttcccataagctcgcagtccgttattttacaatgtcctatttcacctgatgtggcggttatttttccgcttatgtcggcttcataggctgtcagactgcccgatggaaaatacattttgtttgcgtttatatatgctattttctgtccgccgttccaaaatgctatttcttccgccgttgttgttgtcagcaggttttgtttgtccagtaccgtctttccgtttgcgtctatttttgttgaaagatttcccacacccacgccgaataccggcgcgcctgcgtcatcatagtataaaagtcccgtttttatgtactgctcgcttgtagtggaaaaatccccgaattccgaccgtattcccgaagtatatctgaaaagctgatttattccttcggcatttgccgttatttcgttttcaagcttttccgccagttctccgaaatctgatgaggcgctgtattcgctttttaatatttttttaaactcctcgctgttctttattgcatagtccgctgtttttatgattagtgaacgtatgttgttatgggttgccaaaacacttttatcttcttcatcttcattcccctccgccgtaacagctccgtttatttcttccagtacaccctcggcgctcatgtctttcattcctatgttcagcgcctccactgtttgaaaaacataacttctcaattggtttagctgttctttctcatttcccataatcgcaggaggagtacttaaatacataggcatacttactcacctcttttatacaattaattatccgaacctatttccaatatttttgatattgaatacaatttaaattcaccgctaccctctatttttattcttatatggtcgcatcttctcggtattatgggcaaggtaaatgtacggcttatccccgtaccatttatagttcctctcttttcccatattccgtttgaatcgtattcggtatatatttccgcccatccgtcttcctcaagactcattctgatattaaatctggacaaatatttcttttgaaagtactcgtatcctatatctccgaaaacaattttccatgggaatttatcttcttccttgccttccgtaccgttaattgttttcagctcattgctgtcgccgtctatataataaagttcattatctatgtccgcaaaatataacgccattgtattgtcctctcttatccataatcctctttttacgtcatagacaaataaatgccatttttcatttatatctttcattgaaacataatatttttcgcccaaacgtccgccaacagcgtcgcaatactgttcgttccccaaatcagacgaaatatttaccgcctgcgttccgtcaaagcggtttatccccgttttcgatttgtagaaaagataatcgttgactatagcgaaagaagtgtctgagcccttttgcactccgtctatcgccatacttacaatctggtgcgctcctcccgatgatatatataccttatgaacataattttctttaaaaaataaaggatatcccagatatgttacagctcctgtccatactccgtccgttccgcatgacgccttaaacgagtctgtagatataccgctgtatacttcccaatttttaaaatctcccagtttgcagcagaaaatctcgttcaccgtttttccgtcttctaacccgtaataacatccccacaatctgttttggcactccgttacatagtccattttcggtacctttcttgttacattcactccgccgttctgcgtataggtttcatcaagaaggcctgttacaactatgtggttatctccgcgttcctttaccgtaaacgttgaatttaaagcctctatctgcttttttatatattcgttttcgccgctgtatttgcatccgcttattcttatgccgtctcctttttcaattctttgtccgataccctttgcctctatcttcacatatacggttgctatttctacccacatattcatatttttagagtattgtttcagaatatgtgtatctgttgaactgtctatccataaatccccgttttccgcgtctttaggcgcttcatcggctaccgttgtttttccgtattccgctccgtctcctttacatatggaatattttacggaagtactttcctcagcttcccagctcatttccatggaaccgaagtccgtcatatcggctgtattcagatatagattatcgggaaatatacataaataagctcccatgcttacaaatttcttcgggcatttttctttttccgtcgatagaaccaatccgtcaacctttttcccgttataatataaatccgctccgtccgcatatataaggctatcctttgccgtcataccggagggcgaattcaacctgcggacaatccctcttttttttcttccggacgctatggggtaataatccgttgtaatattttccgtatcaaaaaactcgccttctctcggttttaggctgtgattatatcctccgaattccgttgtcatcaaattataagtttttgtctcttttactatcggataaagcatatatcttccccctttcgtatcagccttaatgcagatttataatataaaagcggcttcacctttgctaatatattttcggttgtaccagtcgtaaaagtttgtataaacgctgttaaaaagcaaacagtcgttattatatttagaatattcctcattgttcaggtctatttgtcttttcagtccatgtatatacagttcatcgtatggattttgtgctaaaagctctgttccgtttatatccgtgtctccgtcataaccgttgaatatacgttcatctcctatatgagtctttataatttcttcatatatctgcatatctatatcggaaagccattttactttttcttccctgccgtatgcgtttggttttatcctgtcggttatttctatagcttctgaaataagcatatttttcccctcctttcgtaaaggcagggttattcccctgccaatccgttttcatattcttcggctgccagtttagcggcttcggcatttgcgagtacttccgctacaggcttcggcaccttaacggtctttcccttcggtacttggaatgtctttccgtttactcctacaaactgaaaattctgctctgttttgggagctttcggcagcctcacttcaaccatttcgctccaactttcggatgttcccgctgtaattgtaccgttaattttcatcaaatttattcctccttattttcaagtcgattatttcaattttcctcatctacgtcagaataatcggaacagctttcaactctcaccattctatcctcataaagaattttaaaggcagtcgaaaacttgtatccaagcgtcgaaaactggtttaacggtcctcccgcctctgacttgtcttttattatcatttccattccgcctccgtcagggtctatttcgccatatgcgtcctttccgaagaaaagagaaagataaaccgctctcggagaacctcctccggattcctttacaattttggcttctgttgtctctataaatcttacgccatgcagttctcctatttctccgttgtatatctcctccggagaagcatatttatgcgcttcattccattcgggactctgtcgaaggtcataacctacggaaggatgtatgattgccatatattttccgtctattctcggcgctttcatttttttcaagttcgttaccgctttgtttaccattgccggcgttagctttgccgttttatcaagctccgttcttgacgtaacttccgttgccgttccgtcctctcctattttgtcggcatagattacgtttgttccctgacatattgcgtttcttgcgattttatccattgtagaacctgccgaagctcccagttcttccgccgctcccagtatcacatcgtctactgcgtgaagttccagctgatccgataccgtaacatatgtaccgtactgagttatcggaacggttatactggactgtccgagtttctgacctgtcggtataactccttccgtaagctgcgaagcgtcctcaagggtattccactttctccattcgactgtttttcctctatgggacggaagaggctgtttctttccgaactgtgtatgtacaagctccgctcttgcgttttcaagaagttccgtatcataatatgttttcatggtcggagtaagcgtatttgctccgtcaaaattcgtagtcttgccgtcataggcgttcacatagtttcccgttgcgtttaccagtgttccggcctccgcaaaatgctgtaaattcagttttaacatataatcattcctttcattttttaatattttttatccgagataaacattttctcctcttcttactctttcctttatattttttcgttcctcttttgatagatttttagggtcaaaatccgtcaaagctgccgctttatgtgaatttccgttttctgtcggtctttccgctcccgactgtatagaaccgcttattcttttttccgcctgtcttacggctctttctatcaaaagtccattcacctcatctctgtgaatcagttcaaaagcagctattacgggaactcctgcggctgccaaacgtctgaacacaggattttcaaattctttttccagattaaacatcggataaacagcctttactttttcactttcttctataatctccataagtcttctttttgccgtttcattttgttctgtctcgtttcttcggtcaaaatttctcattttcattcctcctttatctcggcattattgactgtgccgcttttttccttgcttttaatgttattgatgattctcccgacagttttctgttcgttcctcccttcggtttaaccgccgtcccattctcaacagctaaaatacgcctgtacgcctcatcgtcataccttgcggcaatggctagcgcaagctctttatatttctgcatttttccgtacatatccccgttttcatgtattttcctcataatacgttcttttccgtcaaagtccattgtgtcaagcaacaaaagcgtctgatccgtcagttccggattaaaacagccgctgcggtacaactccagcgccagctcattctgctgaaccttagaatatatgttttttctttgtgccgatacttttatgtcaaaaacaggggacttcattcccacatttattccgtattcctcctgcattttcggctttatttcgctgttgtcgtatgatacatatatatcttcgcccagcgttccggtaattctgaactgtctcggcaggtcatagaactgccttataagttctattatctgcgaaatcatcctgctgtaggctctgtatgccgacagagtgcttgcccttgatgtttttccggcagcctcctgaagcgccgctatggccgatgcggctgtaactcccgacggtgtatttcccgttgaagcttcgttatttcccgatgtctctcttaattcctgtattttggaattaagcacggaaacatatatatcgctcatattaggcacgtctatcggccttatactatctgctccgagatttccgtttacatgtactatgggccttttccaatcggtaaactccttttcattcacacttccgtcgcctctcataaaatatctcggcgaagcccccataaccgcattctttacaattgcctggttaagtctgtcaatctgctcctgtgtgtttttgcatatatctatatacccaaatccgcatggcgtaccttcggtcggaaaaagtctgtcaaatataaacggatattttccatggtcataccaacctctctcggctctgcttaatccgtaaatcggcagcccgttttcgtcaattccgtcaacaggcttttcattatcgttttccgtagcatatataaccgtcgtattgacatacttgcagtaatgaagtatgctctttccgtttttatgctttttgtaataccagtcgactactacgcttttatcggttgtgtccacattatcgtcatatatatattttgcggtggtcagattgtttcccttaagacttcctctcaggcttggatacatattttcaagcgcttcgttgtccacaagttccgttgtgaaaatgtttccgctctgttgtaaatccgttattcccggttcccaaaaaatattcagaaggtcgaccttttttaccgctatgtctcccaatccgtttaattttgaagaatcccaaaaaacgccgtatactcccgttcccgttttcagtttctgccaaagtacgtccgaatatgtttcctcaaagtcattttgttccaatactgccggtattattgccgaaagtcttacggcctctgccctgtcattctcttccctaggcagtatgttaggttcgggatacgcctctattccgtcggcatgtttgttcattattacgctgaaaagccatgccgacgccggtttaaattcatcatttcctccgtttatgtatcgccaatgtctcagtttccaccactgttcgttttcaattaccttttgctcaagagaggtctttccgcttttatattttctgagtattgcgtttgcttttctcagcgtctcctctccgataacggtttttttgttatccataccactcctcctttttactgttttatatctgcgaacatattcagagggtctgacaaaattatgctctctttttcaacaatcggttttatcggtctttccatgcaaaaatatctccattcatcagctgcatggtcttctcccgacgtatcaaggtcttctggatttgtattgctgaaagtcagctcgggtattgttcttataaacgctttacagttattaaacacatacattctcggatacccctcgttgtcaaactgtaatctgtagtggcactgcatccagcccgctatccttttattgtctccgggtgaaaaatatattccgtaccttgccgctgtatctgctaccgattctcccctgcttgcgtcccatatggaaggatccgctactccttggatgtttcgtccgctaagccatggatgttccctctctattttgcttatctctttaaattgtttttcaggcgtccatctcactccttcatttggcgtatctgtgcatccgtacacttcaagtattctgtaaataatcccgtcgtaatcgacagcccaccatgcgcatgaaaaaggtttgttgtaaccgaagtcataacttctgtaaatgttccatcctctcgcgtctcccgacgatatatcaaaaggttttataacatgcgtaaaacgtcgctcctcctgtgctttctcatctccgataacaaaatcatcgaaaaactgaccttcaaatatatcccatttgccgtacagccacgcttctttcagtttaggagggagcgactccaattggtttatatagtcgggctgatactccattaaagccgtattgtccgtagccagcgattgtataaatccgtaatcgtcggggttttcgccgtctctgtactttttgtctataaaaagtctttttatatatgcgtgcccctttcctccggggttacatgtgtagtacattctcttcggaaatctgttcacgcctcttacacatgcggaaatcgttttcatctgatattcggataactgggtagcctcgtctataaatatcacatcatactcaacgccctgcaatctttccaagtccccgtcgttgtcgcagtacataaaattaattgtgcttccgtttatgaattttaatattttatccctgtcgttatatatagcggtatcttttaattctctgcgaagtatatttatatggttgttaataagctcagggtaacttcttcttacaatcaatattcttatgccggcatatctgaatgccagcagctttgctttcgttctgaccgcccagctttttcctcctccccttgcacctccgaaggcaatatgtctgtgtctgtcagccaaaaacattttctgtttttcattgggttcatctataaaaatattcgtattacatcacctgcctttaaacatactgttttcatcagccgtcccagttttccgctccccgtatgattacatttatttccttatctgtctgctcacgttctgtttttgctttctcaagttctattttatttttcgtagctttttcagcttctttctcactccttgtaggaagttcgtttacgtttcttattatcgccgtaagctctttcattgttgccgtaagtccctttatagtgtttatatctacttttccgttaggatttacctgttcttcgtcagctgaagctttttcaacagcctcggctatattgtccgcggcatttataataggttttaatttttccttttccttttttgtcaaattcctccctcctttcactgcaataatacaaaattagaacatacgttttctatcccaccattaaaatttatattttattaactcatattccttacatttgccggcatatattaataaaaacatccgggagtcaattaattgtcaactttatcagagcattgtaaaaacctaatttctaaagaaccgaatgccgtatgttttataaaaggtggtccgtataatcaatgtataaacggcaaactattgttttacagcacagaccaagacacagttatatgcgttgatattgcaggtcttcccgataattcgtgcaatatattcggttttcacatacatgaaggtacgatctgtacgggaaacgaaaccgatccgtttagtgatacgggaatgcactataatcctaacggtgctgaacatccatgccacgcaggagatttgcctcctcttttttcagccgccggcaaagcgtttatggtttttcttacgaacagactttctgtaaatgaggtaatcggtaaaaccgtcgtaatacattcaaacgccgatgacttcacgactcagccatccggaaattccggaagcaaaatagcctgcggtataatccgcagaatataaatttcatacaaacgttaaatgtaaacaaaaagaacgccctctactgagagcgttcttttttaacactgctttaaaatttttattccgttctgaaatttcgtttagttacttcaaaagttccgggatcaatgataatcagaggtttatctttccccatagcatatcttacagtatatcccgtaccgctgtatcctcttgtatcatcatataccgccaaaattatatccgcattatcaaccatatatctgtcccttatataaaaaacgtttttattaaatcttttactgaccgttaccacatcatcgcagttttttaaaagagcttcgtatctctccctctgctcttccgtccagccgcgttcctgtcctttgaaaggaacagctccgatcagttcgatatccttctttgttctttttaaatctataacggcttctcccgcccaaatatcaacgccgagagcgcagcctgtaataaatcttttatatccgtcattatacagacgttctatctggtttcttactgctatcttgacagccttgcatatcggactgtcctcgtcatatccaaatacaaatccttcaggcctatgacctgtaaaagcgcaggttttcattttttcaccttcctgcaaacaagtatatcatgttcccacgaaaaatttcaaatcaaatatttacttatatcaaaaaagcatacgtattcacgtatgcttcagattgtagacaaacagatattaggttagctgaaaggttcgggaaacagctccgtttcccgagtggaatccgcaggcagaattcatttctgccgaggaaaacagcaggtttcaaagcatttttgctgatggaacctgtctgtttctgcaactgtatcaactcgtcgaaatcaggatttcgacgaaaggcgtcgattttgtcgacgccttcaatcatacatattcacgtatgctccagattgttttatttatcaactattatatacggcgcgagacttccggcagctgcgcttatgggcattgtctgcaacactatctttccggggccttttactacggtattaaaaaatccctctcctccgaacaaaacatttttagcgcctttaactgatactatttccatagtgcaggtagagtccatagccgcaagatatcctgtatccacaatcattgattctccgcttctcagttcatattcgacagcatgcccgtctatttctataaacgccgttccgtttccggaaagcttttgcataataaatccttcgccgccgaaaaatcccgaaccgagcttcttctgaaaagcaagggaaaggtttacgccctcctccgcagcaagaaaagaagccttctgcacaattatggagttggacgggccgatttcgacagctcttattgctccgggaaaacttgaggcaaatgcaataagaccttccgcgccttttgcagtgtatctgttctggaaaatagcctcccctgcaaacatacgtccgagagcttttcctatacctccgtttgatgttgtttccattttcatattggggctcatccagctcatgctccctctttccgttatcatgctttcgccgtctgataatctgcatattaccgccggaagcgttcctcctactatttcatatctcatacctgtaccacctcgctttttatttaattaaattttaattttatcggcaatatatgtcaattacgtatttcttaagacttttacagccatatattaaaacttacgacaaaatcagctgcgttttcctcgtattcgtctattgcatcgcccaacactccgatttggattttatcataaaagtccgtatacttttctatatgcactcctttatattcctccaacaggtcggaaaacgtcggttttgtaaaatattcgattagttcattcatctttgaatattcaaaacaatttattcttgctccaagcagcgaatgtattgccagataatcatatccctcatttttcattatttcatgccaatttccgctgtacttaaaacttacggattttattttttcaccgtcagtttcaaattcaaaaacaggcggttcgggataaaaatccgaaactctttcatcaatatgtattgtcccgtcaatattcattgtttgatatccgtatccgaaatactccgcagcgctgttataattttccacaaattcatcgacagtcaagtcccctctgtttttgggaagcaatccttggtattccgaaagaaaatatataagagctattactgtggcaaaaaatacatatttaaaagttctggttttttcgggcataacatatcttacatttgtatcccactccagttcctctcctgccgcacactttttatatgacttataaagtcggtaaatacgataaaacggtatcataaatccaagtccgtatttcaaccttttgaacgatcttataagtccttccttatatgtcagctttcttccgcttttatgcagtaaccttatgccgaataatgacttcccggctgtagatacccacgacatagtaagcagcggttctataaaagcagttgcaaaacacagtattatatatccgtttctcccccaaaaccaatcgtccgacggataatgattaagcacaaacagccatattatgttcgttattaccgccatgtatgccacgtcaaaacaaaatgccaaaaaccgcctccaaggatgcggtctttcccgattttcaatatttatttctcccattttcgccgccctccttgtactcacataatatacaaaaagagacgttgtttcaagatattatttcagttctgtattaatattttttcaaacattttttcactgccgtttatatatagtatttttcttgcgccgtactcgtccacattcaaaatactgtatatgtcctttccgatttttctttcaaaatattcttttaggctatatataatttgtcttttttccacaggatatacggagccgtatctcataattatatctttcattcgctcttccagagtaaccggtccttttgacataaccattgaatcgcataattgtataagcctgtcataatcgttatattcatatttagttattttgttttgcacaaattccagctccgtaatactcacgtcaaattttccgacatatgttgttatatctttaatggggaatgtatgggtgaggcatattttggctacagtatcatatcccatttcgctcatcattttatatccctccaaaatatgcctgaactgcccgtctgtactttttcctatgtcatgtaataatcccaaaacgtacgctttctctccgtccattccgcaaagttcggctattttccttgcgcacttccccgtttctatgctgtgatttatccagcttcctcctcttttttctttcgcattttcaattatcatatctgccgtattcatattaggaaacattcaaaacacctgcctttgttttcatgttatacaaatgccgcggcttattctatcacagtcatgttaaaagaagttctaattacagtaaaaccctttatattccgtcatgttacccaatacactaccttgcttcaaaaaattaaaccgctgtatttaaaaagcccgaacagggaaataatctttccgccgttcaggctattttcagtcagctttacaaatatttacttttaggctatttttgaagctacccatgctcttgttgcgttaggcgctccgcctgcgtatggtgcaggtgttttgccctctgacttgtcgagcattattgtgaactgctctgttgttacaaaatcgttaggtccgaatgtctcagcatcgtatccaagaactattccctgttcgtatgcccatgctactgcttttgcataccatgcgtctgctgttacgtcaaggaaaggcgctgcgtttacgggttcgggttttcctgctttgttccaaagtattgttgcagccattcctcttgtaagcgttccgttaggtgcgaatactttctcgcttacgcctaccatccagcctttttcaaatacttttacgattgcgtcatagttagggtcgtcgattgccacgtcgctgaatatgctttcttcttcaggctcttcgggcttttcctcaggcttcttgtcctcttccttatcttcgtcatcgtcgtcttttctgtcgttttctttctcttcaagttcatatcttgaaccatgagatttcttatcgtcgaggtaatcttcgtatgtttcctcatccattgcaacatagttaccgtcttcgtcttttacaaggtggctgtcctcgtcaagaagttcttcaggaactttctggctgaatgaaccattaataacattaacatactcagataattcatcagatatatcccattcaacatcatattttccgccgtcaacagttacctcgggaaccgttgttacatttccctcaattcctgttcttataataccttctactttaatatctccacctaattttgtttcactgtttccaaaatcatcttcccaaacaagtgtccaaataagaccctctatttttcctcctgttaaatctgcctgagaccagttctgaactgctgactcattcttagatataacagttccacctgtcatatttaattcaccatagtcatcatttttaatagctataaaattatcctgctgaagttttccaccttcaatattaagtacggcatatccctgctcattaccttttacaacaccaccgttacgaataagtgaagagcccgacgttctaccattctcttttatcccgctgttattgtatattgttccgccctttattgtcattgtgccttgattgtcaattacataatagctgtcgcttccgacaccgtcatcatcacgttttatcattccgtctccgtcactgtcttttattgtaagcgtaccgttatttaatatggcaggtttatctttattagcagtgttttccccatcttcattcttgtccgttccaccacttaatgtgaacccgtttaaatcgattgtaatatcctgacctttagcaattacaatgttttccaaagtatcacttataagctttattgtgtctccatcctctgctgcttcaacagcttctgccaaagtatcatactcagtttttccgattttagcaacttttctttcttctgcaaaagcagtaaaactcataacgctaagcgccataaccgcactgagtactgttgcggttacctttttaaattttcccatttaatttcctcctctgtttacatttgtaaagccactactacaaagtatattttaccccccccccttgaatttttgtcaattcgcaatattaactgtactttctactatacttcttgcctttttagtccaatattttttgtcttaatataaaaatgcataaaaaaagcggagacttaaagtctccgcttaaataatgtcttatgctttgaatttcttaacttctgctgtaagtacgggaacaacctcaagaaggtttcctacgataccaacattggcgatatcaaagatagaagcgtcctcatccttgtttatagcaacgatgtagtcagcacctgtgatacctgcaacgtgctgtgtagcgcctgagataccgcatgcgatgtaaagcttaggagcaacgctcttgcctgactgaccgatctggtatgctcttgaaatccagcctgcttcgataggagctcttgtagcgccgattacgccgccgagagcgtcagcaagttcctgaagaattgcaaagttttcagctgaaccaacgccacgtccgccggcaacgataacatctgcttcttcaaggttaactgtttcggaaatttccttaacaatgtcaacaacctttgttctgattgcgtcggcagggcactcgattgcttctgtgataacttcgcctgctttagcttcgtcagcttcagctttcttgaatgcgcctgaacgaagaagtgcgaattcgatttcgctttcgcaaacatcatcgttaaggataccgcctgcatatacagggcttgtgtaaactattttatctccgtcaacggctacgcctgttacgtttgtaacaacgcctgaaccgcattttgcagcagcttttccggcaagatcttttccgtctgctgttgcgcctacaaatacagccttaggagcgtatttcttaacaagctcgcaaagagcgttagcgtaaacgtctgtgttatatacttcatactgtgcgccgtcaacaactacagccttgtcagcgccgaatgcgattgcctgcttagcagcctctgcaacgtctttaccgataacagcggcaataacttctccgccttcagcagcaacctttgcaggtgtaaggatctcaagacctacgtttttagctttgccttcagcagcttcaacatatactaatatatttctcatctctaagttcctcctcccgattataatacttttgcgtctacaagcatagcaaatgccttaagagctgattcttcgttactttcttctttaatcttaacgcctgctgacttcttagcgggttcataaaccttaacagtcttaactgcaggagcagcgcttacgcctgtttcaacaacgggaacgtctttctttcttgctgccatcttgctcttcattgtagggtatctgggttcataatcgggtttgattataccgagaacacaaggtgttccgatttcaactatgttatatccttcttctgtttctttctttacggaaagtccgccgtctttaggctcgaaaccgataacgtcgataacttcgccgtatccgagcttctcgcttactaactggcttacaacgccgcatgcaaagtctgtagactctttaccgcagcatacgatatcaaatttctttcctcttgtttcttcaagctttgcaactgccgcagcaattacttcgcttgtagccatagcgtctgcgtcggcaattacatcgccgattatgtatgcttcatcagcgcctactgcaaggcagtttttcataacgtcttttacgttgtctccgccgatagacataactgtaacagtaccgccgttggcttctttatatcttgtagccatttcaagtgcgtaaccgtcaaatggattgataacaggagcgattttttcgatatcaggtgctcctgaagcgtttaatttaacttctacatctgcatcgggaacctgttttacacaaactaaaatttccatttagaatttcctcctctaaaaattatgttttcatcgtacgcttgtacttatataaagctgtacccttaaaaaactttatcaaagtttgccctgcttgtcaaataaaaaccgagatttttgcatgaattttttagactaagttgacaggcattgcatttcaaaatctgtccgccttacgcttacagataacaatatggatttcgaatcgctgtaacggttcgacctccccattaacaagactgtaggcgcatgttaaaacatgcgtctacagttatataacagcttattttattagaattttccaaggatgttgttagcgataacaactctctgaatttcgtttgaaccttcaaagatctggaagatcttagcgtctcttaaaagcttttcaacagggtactctcttgaatatccgtatcctccgaagagctggattccgtcaagtgttacctgtacagccatgtcgcctgcatagcatttagccatagcagcttccttaccgtaaggaagaccgagttcataaagcttgtgagcatgtgatacaagctgacgggcacattcgatctggatagccatgtcagccatcttgaactgaagaccctggtttttagcaacaggtctgccgaactgctgtcttgtctttgtgtaagcgatgccttcatcaagagctctctgtgcgatacctacggcaagtccgcctacgaacattcttgcaaggtcaagagtcttcatagctgtagcgaaacctgttccttcttcgccgagtctctgagaagcgggaattcttacatcttcaagaacaacgtcgcttgtgatagatgttctgatacccatcttgttttcatggtttgttgtgcttaagcccggtgtgtccttatcaatgatgaatgcgctcatacccttaagaccctttgtcttgtctgtaagagctgtaatgataaagaagtctgcaacgggagcgtttgtgatgaagcactttcttccgttaaggatgtagtcatctccgtcttttacagctgttgtctttccagcgccggggtctgaacctgcgttaggctctgtaagaccgaatgcgccgagaccgccgttgataactacgtcgcagtatttctgtttctgttcttccgaacctgcaataagtatgggtttaagagcaaggttgcttgctgccattgttacagcaaaacctgcgtctgcccaagccatttcctcatacatagcaaggattgtttctccgggaagtccaagtccgccgtactcttcaggtacttcaagcatctggtatccgagttcgatagccttgtcataaatttctttaggccattcgcctgattcatcgtactccttgcactgttcctttacttctttctcgcagaagtttttgacgtcggcaactaatgctacgccatcctcgtctaaaatataagccattttaaatttcctccccaaattttctgattgtttctttaatttaattttatcttacaataatctcaatcgcacttttcgcaaactttgccgggatttaagatattgttagggtcaaatactttcttaatacctctcatgaggttcatctttgtttcgcctactgcatcctcaaggaattttaccttgctgtggccgataccgtgctcacctgagatttctccgcccatttcaacagctttcttgtacatttcatccataacgaggtctgatttttcagcgaactcttcaagagacatatcgccttctttacaagcgtaaatatgaaggttaccgtcgcctgcatgaccgaatcctctgataacaacgttgtacttatcctgaagagtaagtacccagtcaaagtactctgcaatcttatctctgggaacaacaacgtcgcactcgtcaagttcgtctgtagcagcctgaattgattcaaggaactggcttcttgctgcccatgcgtctcttctcttatcgggtgtgtctgcaacgaatacgtcaagagcgccgcactcgaatacaacttcacttgcttcttcgcacatagcgtcgagctgttctttgctgtttccgtcaaatgttacaagaaggtaagcgcctgcttctacaccgtcgacaaccttagggaagttctctttttcaagatacttctcgctcatctctacgatgtctcttcccatgaactcaagtgcctgaggctcaagcttgttaaggaagaactgaggtactgctgcgatacatgtagcaagatcctcgaaaggaatgattaagctgacaaattccttaggctgagggataagtttaagtgtaagctctgtaaccataccgagtgtaccctcagaaccgcacataaggtgtacgaagttatatcctgaacttgtcttaggtacgtttgaaccgaatcttacgatttcgcctgtaggaagaacaacttccatagcacgaacgtaatctcttgttgaaccgtatttaacagctctcataccgccggcgtttgtagaaacgtttccgccgagtgtagcgaacttttcaccgggatccggtggatacataagaccctgtttttctgcgtcaacagcaaggtcgttaagaagaacgccgggttctactgttacagtaaggtttccgaggtcatatgacttaatgtggttcattcttactgtagaaaccattattccgccccattttgcaacggcgccgcctgcaaggcctgtacctgctcctctgggaataacgggaattttattttcattggcaagcttcataatagctgaaacttcttcagcagaaacaacctcaacaacaacgtcgggaagtttctgaccataaaatctcatttcgtcatgtgcgtagtcttcgttgatttcatctccggcaaaagttcttccgggagcaatcgctctgagcttttcgataatttcgggtgtaaccttattaaattccattttgcttcctccctttttctaaatgaaataaaatacagtatgtttactgaaattgtgataccttttttgtttttatgattacaaaccaccgcgactcgcttataattgtttgttaataaactatcggtatagtggtctaaccagacatgttaaaaaaatttttcctgacggaatcaaatcattttctgaacataatcaagatgttcggacatacagtcgacagctttctgactgtcgccttttacaacggcctcatatatacgcttatgctgcttatatattataagtcccgaaccgctttcttttacggccgtactcctgttgtagcttactgttttttcgagaatatactcaaccagattctgtgctaccatcaacagcttattgcccgtaagctcaaatatctttctatggaacaaaatgtccaatcttacgctttgagagcaattgtcaatggcttcctccatcttatcgactatatcctttaaatccttgaaaaactcctcattttcaccttttaaagccagatgccttatggagccttcttcaagtatttttctgaattccagcaggtctttttccatatccttgttggcaagaatgaccggccagatcatcgacaaaaacggctctgcgttaaaatccgatacaaccgagccttcacccggacggatttcgataattcccattatttccataactttcagcgcttctcttacagaagtcctgctgacattcatcatatccgccagacttctctccggagggagcttatctccctttttcaggctgccgtcatggataaggtctactatctgttcaacaatattcttgtaaattttttgggtttggacagttttgagttccatgacaactcctttctttccgcccgaaaaattttccagacacgccgtgatatgcaactgataatgttactctttgttactagtaaagggtactaaaaataaaacaatgtgtcaactgtgaattttgacggatttaatcgtaaaattttataaaaaacgccctggtaaaatctctgtgagcttaacaaaataaatttatccacatattcatagcttattatttaattttccgattttaaaacagatatttttatacataatcaacaaaggaatatcgcctgttttttttcgacgatattccttaaattcatttaatttattatgtattttaaattatctttgcaatcctacatttacagtttttgtaaatctttcaaactttgtaggtatttttaacaaagtttttgttaaattaatatttaacaaattcacaactataaactttgtttcactcggtttttattttatatccacaacattaaccggtttcccatccaaataagcatataaattatcaaatacaatatgcgctcttcttatcatagattcctttgaagcaaaagctacatgaggagttaaaagagtatttttagcattaatcaacggataatcggcaggaatgggcggctccatatcaaatacatctattgctgctccggcaattttatccgaattaagcgcctcagccaaagcttcattatccacaacagctcctcttgcgcagtttataagtattgcagtctgcttcataaggcttattctttctctgcttaaaaaacctttggtttccgctgtcgaaggtacatgtaacgatactatgtcgcttattttcagaagttcgtcaagttccgtgtactcaatacctgcctgaaccgcttcttctttttttgttctgctgtatccgataaccctgcatccaaacgccttgaaaagctttgcagtcataattcctattctgcctgttcctattattcccacagtctttgtaccgagttccgttcccataagtcctgccgaagccaatgttttgccctctcttacagccttatctccggcatttatttttctgaggagattaatagccatgcccacggcaagttcggaaaccgtctcattggaatatccggcggcattgcatataactactcctttttctttgcatgccttctgtcccacatggtctattcccgtaaaggcaacatccagcatttttattttttcacatctttcaattacactgtcaggcaaaggattattggcaatcataacaatatcgctgtccttcgctctgttgtacaactcctctgtatcggttgttttattatcataaaatataaactcatgccccttttcaatgagcggcgcagaaagctcgtccataagcgctttgtctattcctatcggttccaaaagactgattttcacagttaactcctccttttattctgaaaattacaaattaaacgaccgatgaagccaaacatctcttgtttattttcaacgatttctgtaacgtattataccataaatcatc

SEQ ID NO: 2885 - DNA, 5211 bp, Unknown
  16S sequences of unknown bacteria
tggcttcggcctttgtggcaaatgtctcataatagcaaagctccaccggcagacgggccctcgtgtattttgcgcccttgcccgcctgatgcacctggacacgctttggcaggtcgtttgtccagccagcgtaatagctgccgtcgcagcagcgcagtaaatacgccgtgttttccatccgtcccgctcccttccgcctggttttctttccgattgtatgcttattgtaggcgcagcccaggcgaaagtcaagacggcgcatagacggtaagcgtcgcgccggtatagtaatgctgcaggatcgccgcataatcgctccccgcctgggccatggcctgagcgccgtactggctcatcccgacccggtgccccttccctttcgtcgtaaattcgatcccatcctgcgtgacggccacagtgaagcaggtggaattgaggccaaagagctgccgcagctgggtcccggtaaaaggccgcccgccgatgaccgtcgtcgccacaccgccgcccggtgtctgggtcgtatcaccaaaccagcttgccgccggcccggtcagcgtcaccgccggatcctgggcctgcaggatgctgcaaaaatcggcgaaggagacatccacctgcccggtgtaggatgccgcctgctcctcgccggggctgtccaccgcctgcagatacggcacgtccgtgccccagaccgcggcagccgcctcggtcctgccgccggagcaggcgaaatacaccgcgtcgatcagtgccccgtcgctcgtcagaacgacaccgtccgtcgccgtgacggcctccagcgcccgctgtcgggcgtcttcccagccgtcgccaaaccgttcggccaggtccgtctccgatgcccaggcctggcagcaggcgctgtcatcgcatacgtcacagtctgtatgcttgccgtgggcacattggtacagcgtgaacgtccgggccgcgacggcctgggcctgcagcgctgcctggtcaaaatccagcggcatctcacacgccagcacaccggtcagatacgcctgcagcgtcaccggttcaacagcgccgccggacttcagccgcagggtgacctgcggatctatcgccgccgcagcgtcctggccctcggcctgcactgcgccctgcgccgtatcctgcgctgcgggcccctgccgcagaccggcagccaacagagccagcataaaggtcagcataatcaaaaatccactccggatcacagcccgcttcataggacatcccccctgccctgcattatacgcgccgcccctgtccaaatcccgcaaaagccgtccgcccgcaggaaatatctttgagatcgcagacgtctcgccccggaaacggcgcccatgccgctcgcacccgcttttcttgacagatcctggcggaagggggtataataagttaattctaccctcgaatttatcggtacaaagaatggagtctccatatgaaaaaattcttcaaagtcctcctgccggtcttattggtcgccctgctgctaggcggcgggatctggtatttgagaaattaccagggcgatttcttctcaaacttcctgcaacgccggggtgacgcggccatggcgggcgagcattatacgacggccctgcgctactaccgctgggcctgggagctggacgacacggacccggatctggccgtcagcctcgccagcgcctacgcgcacacggataactacaccaaggcggagtacacgctggtcaacgccatcgccgcgatgccggaggagctgcagctctatctggccctctccgaaacctacgtcgcgcaggacaagctgctggacgcctcgcagctgctggaccgggtggaaaatgaatccatccgcacacagctgacggaagcccggccggacgccccagtcctgacgccggagagcggctattattccgagtatatctccgtcggcctggaagcaagctccggcacggcgtacctctccgtcgacggcagcttcccctcgctggaagacgacgcctatgcggcccccgtccagctgaccgccggggagacctccgccattgccctttgcatcggcgacaacggcctggtcagctccgctgtgtacgcctcttacaccatcggcggcgtcgtagagccggtgactctgcaggacagcgccttggacacctatatccgccagctcctcgagctgggacaggacgatgcgattatgtccaacgccctctgggcgatctccgagctgactgtcccgcaggatgtgaccagcctggcggacctccgctacttcaccggcctgaaaaccttgaccattcagaatttccaaggcggcgatttctccttcctggagaatctctcccagctggagcatgtggatttcgccggctccctggtcacctccgacacgctctctctactggggcagcagaaaaacctgaaatggctgaacctcagcacctgcggcgttagcaatctcagtagcctctccggctgcacgcagctggaatacctaaatctcgcaaatgaccaagtggcggatctgacaccgctggccgcctgcggcaacctgcaggagctgtacctgcggggcaacgccatcacggcgctggacaccctcggcacgatggaccagctccagcggctggacctctcctacaacgccgtgacgaatctcggcgcactggccgcctgcaaacagctgacggcgctgaacctctcccactgctccctaacagatatttccgccgtcggcaatatccccagcctgacaaagctggtcgcctcctccaacgcgctggagacgatcgacgggctggaaaactgcgtcaacctcacagaaatcgacctttcggacaacaaactgatctccgtcgtcgagctcagtggcattgacacgctgaaaaccgtgaatctgaattacaacgatatcgtcaacgccccccacttctcccaaaacagccagctggaaaaattttacgcagatcacaactttatggaggacctctccggccttgccaattgcctacatctgaattacgtcacgctggattataacaatatctccaatatcgacgtcctggccaattgctacaacctcgtcgaggtcaatgtcttcggcacccggatccataccaacgccgccgtacaaaagctgctggacaagggcatcatcgtcaattacaccccggaataacttaactaggcacaagaaaagctcccacggcgggagcttttcggttatagaggttacactgacgtatcctgggtcagcaaatgccggtatgtgcacgccatgccgatggcgcccagcggtgcggtgagcaggatcgccgccaccgccccggttagtaccagctgcccgcatgccaggcccatcgccagcgggacgccgccaatggccgcctgcaccgtcgccttcggcaaataggcgatcatgcaaaacagccgctctttgggccgcagcggcgttctgcgcaggcacagagcgacgcccagcatccggcacagcagcgccaggcccagcagcgccagcatcccagcgcccatctgcccagcatagtgaagatctaccgccgcaccaaccagggcaaacagcagcatctgcgccgggacccaaagctgggacagctgccgctgcaaggcgtcccccgcttccggctgccgctgctgcagcagatttgccgccgccataacggcaagcaggccagaaaacgggaccacgccccagtcctccagcgcggccagcaggaacgcgacgctgagaaaggccagtcagagccgcagcccctctggtttccatcggcgcagcagcagcgtaagcaccagcccggccagcgtgccgcccgcaagccccgtcacaacggataccggcaccgcagccaactgccagccagagacgccgctgccctgggcaaggccggtaaatgcagtaaacagcacaatcacgacgatatcatccatcgacgcaccggccaggatcagctgcgggatgcaccgctccgtgccccagccctcctccatgagccgcagcatctgcggcacgaccaccgccggagagaccgccgccaggacagaccccaaaatcgccgcctccagccgagaaatatccagaaaatagggccccaacagcgtgaccgcagccagctcacacagcgccggaacaaagcacatcagcagcgccgggcggcctacttttttcaggtccgatcgccgcagcgtcagccccgcccgggccaggatgatcaagagcgcgatcttccgcagggagccgctgatggccagcagcccgtcatcgagcaaattcagcacgcttggccccagcaggatccctgccaggagcatccccagcagcggcggcaaatgcagccgctgcagcagcgccgccagcagcatgcaagtcaggaacaagagcgcaatggaacccaaaaacacaagaacccctccaaaaagggccgaaaaaaagccaacaaccctgtaatcagatacagaagtcatcagccaaaggcagtttcgggccacgcccgcgggagaacctcattcccttcttgtaattttacagcgcggtcttaaaaaatgcaagcataagtttttctgccggtccttttctccgttggcatggattttttcgccgttttctgctatacggatcgtcgcaactgcgaaataaacttttctgcgaggtttttcatcatgctgggcttgggaacgatcatcaattgcgccggtattttgctgggcgggtttttcggcctgttcgccgggcggtgtgggcatccggagcggcaggaggcgctgcaaaaggtctgcggcatcgccgtgctgtttatcggcatctccggcgccatggccgggatgctccaggtgggcggcagcgccctctccagtggaaaggccatgctcgtcgccctgagcctggcgctgggcaccgtcctgggggagctgctcagcctggaagcttggtttgcccgcctgggcaaatggctccgggataagaccggcagcagcggcgacccgcgctttatcgacgccttcgtcaccgcctccctgacagtctgcatcggcgccatgtccatcgtcggcgcgatccaggacggcgtcagccgggattacagcaccctggcagccgtcttggactgcgtcatcatcgcaggcatgaccacctcatactagaatctgttaaaaagcttgaagagctttttatagcgccaacggcgcgtc

SEQ ID NO: 2886 - DNA, 32759 bp, Unknown
  16S sequences of unknown bacteria
atcgtaaaacaaatttatcttgttagattaagaaattgagtaattttacaacaacttaaacttttatatttacaaaaactaacaatatataaaaacatctactgtcagttatgcactggatctttgaaaaaaagaaaatatatagacaatattttcattttttctcaatttgtctattagatttatttattatttcttccagagcgtccgaaataatctgagctttccgatcaatcttgtctacgtcagttattgtataaattttccacgctgttctatctacaacagtagttcctgccgggagaaaggattttattgcagatgatatatccttattaaaaaaggtgagatctttgttaattttcagaattgtagaattttttatagatttggatttctcgtcataaatgtttatagctatatttaatgggaagaataccccattaaaattattccagtctgtaagtatatattctaatgaaacaaatctctgattattatcctgtgctaaatattgagtctttttcaaaaggtatgtttttttatcgaatataattcgcaaaccatcttcaatagaataaagtattatttcacttgttgatatttccactttaaaattatttatattatcttcatttagaatgggtttgaatgatcctgaaacatcaaaccaaggtaataaaaccttaggaaaatctacgggctctatcgaaaccattttttcggcaataccatttttatatctaatcaatccgtgctcatcataagttatagtttccgtagtagcagaattgctaatattttttttataatagccagatcgtatgtcaatgtaaacggaaatattagagacacctaaacttggttgttgattgtctaatatgacatattcttcgatataactcgtttcaagtgtttgccaatttataaaactttgcaataattcccgcctcagttgagattctccgtataatgcaccagaagatgtttttccaggcacacaaatgcgctctgtggttgtaatacaatcttcacgaattaggttatacttttctcgcgttgcttctcctcggttattagttggcgaacatatatctttttgttgtctggttccacaatttgcatttcctcgcaaagttccaattttttcatatgaggcataactagatgccatcataataatacctaataatataaatgccttcccgatcagatttattaatttcatcttattgcctttcatttataatattaagattttcgttgaatacttttgttattatttttccgttttttgtaagagtggcttcgattttaccatcttccaaatatttgaaagtggttttagtgccgtcagacttctcgtaggatattattctattttgggagtcaaaaatcttcttccatattaggttccatttcccgtcgcaataagttatgcttcgttcgtcatcatcgcgttttacattatataaaacttctccgttttttatctcacttacaattctgccttttttatcgtaaatgaattcttgtatatcttcacttccgtcggggtgtttgatttctatcttttgcggtttcccaaaagtttttctctccatgctgtcgtaaatttttacaatatccccgctatccttttgggttatagatacaccattatcatttttgtaaatgacatcatccttatttgtaaatttggatttgcgttttatatacttatatatatcgggatcgtctctattggctatttggtattcgtacgcgtctacaagtttactatttctataggattcttcttttacaataaatcctgtatcgctttcccagaaaaattttctggctgcgttattttgagttattgtaatttcgcttatattattgtcgtaaaacttatacgaaaacttctttaggcgtttcgcttctggaaagtcagcatattcggacagcaatttgccgtatcctggaacttccattaacttaaaccttattgtgcgttttttttctataagatccatataaattacatcatcattctcgtatctgaacgacaagacaggcttattatttgaaatgacttcttttagttttcccttctcatatttaaaggacagaacagtgccgttttcatatctcgtttgggttaaaatatttttctcataatagaatgattcgccgcagcatccgtatattaaatatccgttaccctctttttccagcttatgtccgcttatttcgctgttgaatctttctttattttttaagtcttgtcttaaaattaattcatctctattgggctttacaaatttatatgagtcgtgtgaaacttttgatatatatgaatcggttagcccaaaccaccagccataaccaaacatttttgacggaattcttctgttgctgttaaaaattatagatacatttatttgaatctcatcgtctacattgatataatcaataaattcatatatatcaacctcgccgattccatttgtcccgtcaaaagagcgaatatttaaagaattaaaataaatactgtatgcaacagaatgtgttaaacaagcaagaaacaagacggcaactctcagtgttttcatacttctaccttagtcttttatgcgtatgtttaataacattataaaatctatatgtagattatttttaaagcaataagttataattgtaaagattaaaaaagtagattcatttaatcattatatctaagattaaaagcatagttcatatattttattcaactgtttggaattctccaacgcagtgtatattgtacgggaaattttaatcccaaaaaaacgatattattatcttcactatccggatttttttaagcatttctccggattttatgtgtcaaatatgcaatattacgcaagcaagcgtattgcgcatattcaactgcgtaaattaggcaaataccacggggaatatcaacccgaaaatattaaggcatatgcaggacgccaaggctgcggcaatatcgtcggcaacgcatccaagcccgccttcaaagtcttgcattttatttattataaaaggttttgtgatgtcaaaaaatctaaagaatgcgaatcccaacaatactccccatgcgctgtattcagaatgaaaaaccggcaggaagcaaaacggtattgcgcagaattcgtcgagcacaatgcacccgggatcgcgcatctttagaaagcgctctgcggtatcgcatataccgacgcatatgtatgcgaatatcgccgcgaaaattatgtacctgccaagcccgattccggcaaatagcgcggcgtacagcactattcccgcagcgcttccccatgtgccgggggcatttagagagccaagcccccaaagggtggcaaatcttgtggagagttttttgggaagggctgccgcccacgggtagagtttttttctggcagagtccatatttttgcagagtttgaagagctactctttcaataaatatccgtagcgggttccgtaaactgcgccggaccatacggacagtattgttgagagtatgagtgtaactattgctgagaaaaaggaaaatccgtacaaaatggagttttcgcattcaaagtctatgtcaagcgcgcgggcgcagattatcgccccgagcgagtacatttgaaatcccgccttgtatttgcccattgtttctgcggcaagcactatgccgcggcttgctgctatcattcttatgccgcttacaaaaaactcgcgcgacatcgagagaattgcgcaaaacagggccaataatgtccagtctccgaacatgccgagcgcaaaaagtgtgaggaacgcggttgaaaccattattttatcgctaagggcgtccatgaatttcccgaaggtcgtgacaaggttgttgcggcgggctatgtagccgtcgaaccagtctgtagcgcccgccgcgcagtatattacgaaggcggctgtcgcggcgtattttaacggcaggcacaagagcaacgccgttaaaaaagtcagcaagactctcagtgcggtcaaaaaattcggagtattcattgttaaaaaagtattgccactatttcgcgtttaacaagactttttgaatcgccttttttaggctcgtaaaaaaacttaatttaagcaaatgcaaaattgtaaaaaaatcgcggtctatcccggtacgtttgatcccgtgacgaacgggcatctcgatgttctgcacagggcgttgcgcctgtttgacgaagttgttgtcgctgtggcgcgcaatgctgggaaggggccgctgctcgacttccacacaagaaagcgccttttcgaggaaaatttgaagggaattaaaaatgtgagggtcgaggcgttcgacggcttgactgtcgattttgtccgcaatacgggcgcgagcgccatcatacgcggacttcgggcggtttccgacttcgagtttgaattccaaatggcgcagatgaaccgtcatcttgacggcgaagtcgagactatttttttgatgccatcccacaaatatttttatttgagctcaacattgataaagcaggttgcctgctacgatgtcgggcgcatcggagagtttgtgcccccgaatgtcttggaggcgttgaggtcggtgtttgcgggcgacgaggcgtaattttagagaattttttcccgccgcaccaaacaaaaaaatgtcccgcgagcattgcagcgggcgttttttttgtgaattgcgcggagtgcccgcgtgtttcacatcttgccattatatcaatggaaatgctgaaatcgttaagccaaattgtgctgactgcccctcaggatttataatcctaaaatagctgaaaattatcggcgttttttaggagggagtttttaaaatatttacgctgtttttttaccagtccaagggtgtcttttacgatttgctcttccaaatctgaaacgcagctgttgccacgttcgagccagtcgatagtttcgcggtatcctattgccgagcttgcggaagggttgttttttattccaaggccgattaggcgccgcgtttcttctattaggcctgcgcttatcattgtgcgggtgcgaatgcggacttttggggcaagctctgagtctggaaggtcgagaatgcgcactttgcggaaaatattgcccattgggcaggggagggtggcaaacctcgcggagagctcggcgcaagtcattcccgacgccatgcagcgcgcgagcgcgttttttgcgcgccgcgggtttaaaatatcgaccgtatccgcggcggcagggtctatttttagaagcgcctccttaagcgcgcttgctcctctctgctctatctcgtcgcagacgctttttatttccgacggtatcccgactccgtcggtgactgccgcgaaccacgcgcgcaggtaaaatccgctcccaccgcacactatgatttttttgccgcgcgctgcaatatcttcaagggctttttttgcgagcgcaacgtattccgaaacgtcgaaatgtttgtcgcagtcgcaaacgtccacaaggtggtgtggaatctccgacatttcttccgccgacgcctttgcgctgccgatatccatacccctgtatatttggacgctgtcgcaggatattatttcggcgccctctctccgcgcgagctccattgacatgctcgtcttccccgagcatgtgacgcccgttataatgaaaacttccgtcatttttttgagttaatggcggcgcaaatttcgcacatcgtttcgggagtcttgcatgtatgcgccttgcaaaaagtccttccgtaatatatgaattgcaagtgcagcgctccccatttttcttttggaaagagtttttttaggtctttttcggtttgctcgacgctgctgccgtcggagagtttccagcgctttgcgagcctgtgtatgtgcgtatcgacaggaaatgcgggcgtcccgaaagcctgcaccatcatcaccgacgccgttttatgcccgacgcccggcaatgcctccaattcttcaaaactgcgcggtactttgccgccgtatttgtcccttaaaatctttgcagtttgaagaatgttttttgcctttgagttcgatagcccgcacggctttataatctcccgtatttccgattccgaaagcttcgccattttttcgggggtatcggcaacggcaaaaagtttgggagtcacctcgtttacgcgcttgtctgtgcattgagccgagagcattacagccgtgaggaatgtgtagtcgtcaaggctgtcgagcggtatttccgggtggggaaaggccgcttcgagcctctcctccacaaactttgcgcgctggagcttattcatcagtcttcaatgcctttgagaataaacgagaactcgtaggtttttcccgattctaccgtatattgcttttcggcgagcccgcttttgctccatgaatttttcccgccgaccccggccgacagcgcggaaactgtgacgacgttaaagtttctgcgcggaatctggtggtggtgggacgcctgctctatgtcttcgggcaagcacggataggcggagaattctaaattcttggagtcggcagtttctatcagcagggcggcgtcggcgtcggagcccgatatttttgcgtatcttacgccaactgcgtttgacgattcctgcggctctatatacgggaagaacgagtccgagattttcgatttaaacacggcttcccacgcgccctcgcggcggtcggaatacgtttcgtacgggccttcgccgaaccactcgcgctcgtcgagttcgctcggaacgcggaattgcatgccgattctttggagcggcggcagcccggcggcgggggatacctttgccgataccgatattgagccgtccgggcgcacttcgtagaagaatgaggccttggagccgcgcgcgggaatgtcgtattgcgcctcgactttcagtatggattttccgcttccggaaacgtggtcggacttgaattttacgagcctcattctgtcttccgccgtgcgccataccgcgagctctttcgagagctttgcgcccatttcgttgtttgtaaagggccgcctgaggctcagcttcatcggcccgtcaaccagcagctgagagtcgaatttgaatgattcgagccagccggtttttctgttgaagcgtacggtaaagttttcgccttcggccactagagtctggtcgtttgtggtgaccttcatttcgcctttttcggacacggcggtgcgggcgtagcttccttcgagagggaattgttcccatgctatttccgagtcggcttcaatgccgtttgaagtgtcatcgcgcgttttgaagctcaggcgaagggcgtattcgccgcgctttgaaaagtcgcagtcggacagatctatttcaacgattttttcggtttgcggcgggattgccgggaggtcgaaatcgtcagaatccgtttcgcggccgtcgcgcgtgagcgtccatgaggcttcgatgttttcgaggccggtaaagaagttttcgttgaatattttaactttcaattttttgtcggcaaaaccgcacggcttcgcatgtatattttgatatactttcttcacttcccaagcctgtggcgacggcttccaatcggggcgcacgattccgttgaggcagaacgagtagtccgtcgggaagtcgccgaagtctccgccgaaagcgaagtatttgtcatcgcgcggcttttgggcgaagtcggcgaaatcgaccatcgaaagttcgcgcgcgccagagggcagggcggtgaagaagtcgcttccgattgcggcgtcgattacgcggaatttttttacggcgccggcgaagcgggagtgggtttccttgtcgtattcggctatcgacaggggcgcggcggacgctgtaaactgcgcgtcggcgacatcttttgaggcggcttcgcggccgtctatgtatattttcatcttcccgttgccgaaagatgccgcaatctgggcgtccttgcccaacaaatcggttttggcttcaaggtttatccattgcttgctgtcgaaaacggagaacgacactacctttctgccgttaaagaattttaattcaaacacgcccggctggcgcacaatggtttcctcgtcaagcttccacggggcgcgttttgtgttttttgcgccgccttcgtcgtagggcgtgcggggaacgaatccttcggatgagatttcaattgccactgtaaaggccttcgctggtgttctgaaaagcccggggaacgcgacgatggaagcgttttccattacgttctttgagacggtatcgttgaatacggcaatatccctttgcgggtcggcggagtcggatacaacagtgtaaggctccgaatttttgtaaataccctggtctttccagtcccaaataaatccgccttggaacattggttccttgcgtacgagctcccagtagtcggtgaggcagccgccgctattgcccattgcgtgggcgtattcgcagattatggcgggcattctttcggattccggcttttctttttggcgcgcaaggtggcgcgaaatatcttccggagaggcgtacatgcttgaatacatatcgacatatttctggccgtagtcgcggtcgaagtgcagtacgcgcgaagggtcgcgcttgcgtatcttttccgcagcctgcttaaagaatttattgtcgagggtttcgttgcagagcgaccatattacgatgctcgcatggtttttgtcgcgctccaccatattgttgattctatcccaaagggcggcgccccatccctcgccctccataaacggggcttttttgcccatgctgtcgaggtcgtgcatttcgatgttggcttcgtctatgacatacatgccaagctcgtcgcaaagttcgtagaagtcggggcggttgggatagtgtgaggttctgatggcgttgatgttgtattttttcatctccaagatgtcgcgccttgagacatctttatcgattgcctgggcgagcttcggatggtgttcgtgccggtttacgcctttgaacagcacgggcttcccgtttacgagaatttgcccgttcttgcgctccacggtgcggaagcccactttaaatggggcgtacatttttattccggaggccgtttcaaattcgagcagtaaagtgtagaggtttggcgtttccgcgctccactgcctgacgcccggaacgctcgggaaattccatttgcagacggcgaatttttttgaatcgaggctttttgaggtctccgcgaccgacaggcgttttttgccgtcaaaaaggaatcctttgagcttgaagccgcggggcatatcggtggggttttcaactacgacttccgcgtcgagcttgccgtcgcggtatccgtttactagcgtcggctttaaaaacacgtcgcggacgagtatttcaggcgtccagtagaggttgacattgcggaatacgccggcgagcctccaaaagtcttggtcttcaaaataagagccgtccgaatatttatatacttgaagtgcgatagtgttgttgccgaatctcaggtattttgagaggtcgaagacggcaggcgttctgctgtcttgggagtagccgacttccattccgtttacccaaatcctaaacgcgctcgcgacgccgccgaactttatgaatacctttccgttgccccagttttgcgggacttcaaagtcgcgccgataaaggcccgtcgggtttctgttttctattgggcgggtagtgaagcgctctttgggctcgtccattacgcgcggcgggtttttcgcaaacgggtatgtgatgtttgtgtaaagagcggtaccgtgccccgacatttcccagttggacggaacttctatgttcccccagttagagtcgtcgaagtcgggcttgaagaagtcggagggaacttgcgagggattaccgtagaatttaaatttccaagttccgtcgagcgacatttcgtacgtcgaatagccgccttgaagcgcgctttcggcggtgggatagaatttcattgtcgcggcggcgggctctttattgattctaaaaacggcttcgttttgccaatcgtccgtttttttgccggccgcgtttaatgaagcggctgcgattcccgcgcacaataatgtctttataaagcaattcatgtctggcagattattttttgatttgcgagtttcaagcataattccgcaaggggaatttatgcgctaaaaaaaccgggggcgttcaggctcccggcgtaagtatttttagtgttgcatcaagtgctgctgaggcgtctgcgggaagctattggccgcgcttttggcgttctttaatcagcacttcattgtacgggttttgggcggcctccgccttttttacttccgttttctttttgtactggtcgagagccgacgggtattcttctggcgggaaatattgcagacaccactcgacttggtcttttataaggccggctgtcgcgttttgcggggtcatatttatgggggagaatccgcgccacgaccatatatcgccgctttgcgggagcacagcctgtatttcaagggtggcgtaggcatctgcgttttgcattccaagcggcagcggctgcgacgcctgcattgatatcggttccggattgaaagattccggtgcggcaagcgacagattccatatagggcggaagattatctgggcgtcggagcggttttttacaatttgatatttttttgatttcagaaattcttcgactgcgagttttgtctgggaatttatttcgcttgcatttacggcaaacggagagccgaggccggaggattgttccacataaaccttgtcgaggtttgcgaaagacgcgccgtccttcatttcctgggtaaagttggagcagcccgatagaattaaggccgcaagcggcagtattgataaaaattttttcataatataaaagtttttcacgatttatggatgtattcaataaaataaagttccgagtcggcgttttgtgttgaaactaaggctatgtaggcttttattggaaagcggagaattttttatggacaatacccagagatgcatcgacgccgtatggacggcagtccgagaggaggcggcggagatagccgcgcgcgagcctctgcttgcgaggcttatagacgaagtgatactgtcgcgccgcgacttgtttgaatctctcagcgtgaggctttcgcgcaagctcggccggaacgcaatcggcgagggcgacttgtacacaatatttatggacgcgttttccgacgacgaggcaacgcgccgaaacatagtttacgacatagccgcgataaagtcgcgcgaccctgcctgcacggcgtttataaatccaattttgtattacaaggggtttatgtcgatttcttcatacagggttgcgcattggctttggggcagggggcgcaaatcagcggcgtactatatacagagcatttgcagcgagatttttggcgtggatatccacccggccgcaaaatttggcgggggaatattgcttgaccatgcgacgtcgtttgttgctggggaaacgagcgttgttgaggacaatgtatcgattctgcacgaagtcactcttggcgggactggtaaatcgaccggcgaccgccacccaaaagtcaagtcgggcgtgctgataggcgctggcgcaaagctaatcgggaacataacaataggcacgggggctaagattggcgccggaagcgttgttattgacgatgtccctccccatacaacggttgtgggggttcctgcgcgccccgtcgtatccgatatagaggcgattcccgcaaaggaaatgaatcaaaaattttaattttctataatgcaatttattttgtaaagtatttagtataatatttatatgatttatttatagtgtataatattacaaaaatttttaattaaaaataaagaacgcgaaattataaaattttcgcgttttctattattagaattacaatactttcttgtggccgtataatgaggcaatttgagtcaaaaatatacggaatatgagcaaaatatgatttaaatcaaaaacggcaaaatcgctttttttttgaaacgggcgattaaaatatttgactttcgattattttcgtttttaaaaaaaataaattactttaattatgaatattatgaagagaaaattaccccttaccttttctattgcctcgctaataatatctgcggcttgcgccagtgcagacacattgtactgggtggatgctacaacatactctaatgccgacgcttcggggaaaatagacggtagcgtcatatggaatatagacagagatttttcaagcgcggaaaaatccaagtactccgacgcatacaattgggcgaccgactatacgattaaggaagtgaaagtttcgtctgagtctggggaaacgacttattatgtgcccgaatacatatacgcttcgcctgttgtggctccgaatgaaaataccgacgtatattttaaattcacggatttttctcaggggagttctagtgtaggctaccgttaccgaattgctgggtctccggtattgacagctgacacaacagtaaaaagcataacgatagaaaacgcaaacgacaattggctgatgttcaaaacaaacggccacgatttaacaataaaagaagaccttacatattcatctgcagcagtggcgtatattggcagtgatactagaacaaatatatacgttggaggatatgtaaatatgcgcggcaatggcacttccgtatggaatacattacgaattggaaacgatggggtaaactctataaaaataggcaaagatattattattaaagaaaatcccgggcgcgtgcagctggcaactgcgggggctgctacgacattcgcgactccgcaatctgtcgtatccggaatagttgatttttcgggattcgcttcgcgtttggatttggggcgtgccggaaaagacggagtggagcagttttatgcgtttggaggtctaagtggcacaaatttcggggcgaaagtatccactggggctgaagtgaacgcgaatggattaaattccacacttgtgctaaaaaattccgccgacgcagaatttgcaggaatagttacaaattcattaacggcagacgacagcgacggcaaacccgcgataacgacgactatgaatgttgttatgaatggaagcgccaagcaggtgttgtccggcgacaattcatttaacggatacatacaggttgagagcggtactctggtattgcgtacagcttccggagcttcgcacggcaagcttacaattaacggcggaaagataggggctataacaaatatgaccgtatcgtccgcagagtggaatgggggcgcaataagttttatcaattcggacgaagcaaaagctaatgagacgcccgagactataactatagagggcgattttctgaaatccggagctggtaaaattatgatggatttcaataattttgatacaatcggtctcggtctcgtagataaagacatatggtttgatttgatatacgtggacggagaaacattaggtttttctgacgatgctaacgacaatttttatgccgcgaatttggacacgtatgcggatttccagtggattgccggcgaagacgggcttggcaaagtcttgcaggtatcgtttacatctgttccggaacccgcggagttggcagtgttaataggtgcgatagcgctgtctatggcggttttccgcaggaggcgttagtagtttagttagcaaggcggaggcgcgcctaaaaaatgcggagatttttttctccgctttttttttgaaatagatttattgaattgggcggattttttttctctctttcgcgcgagattagagctcttgatgtttatcgcgctattttgagaaaaatcctaaaattcttagcaagcgtttgcaccttggggaacataaaaaaatacccgtatttgccgcctataaaattttatctttcagcgttgcggcgaaatttttttaatttttccgtatatactgctttttttaatgaataaaaaaaggcataaaaacgattgttgggatttttagatttatcaaagagagattgcgtggggaacaaaaactttgcggttttgcgctcgcgcaatttaaaaaattttcaggcatctcttatgaattttttacacaaactaatcgccctttttaatactgtctgaaaagcgtatttttaacttgcagggaatgtctgtgcgggcgatttccaccccgtctgaaaataccgcaaaaccggcgcccttcccatagcgcgaaccgtctttgtcccataagactgatatgagctttcccctatatggaatattgtccaaggcaaaatagtcccatgaatcgggcgcgagaggctctattagcaagtctccgccaagctgcggctgtatgccgacaagtccgtttatgattaggtcggcgaaggtggagtggttgtagtctttgccgcgttcgacaaattcttcgtcccatgtaccgtttttccacttctttaatcttgtgcgcgaaatccagtctccgttaaagggatttatgttttcgtctatccaaaagacggttttaccgtcttcgcgcgttcttttatgggaggcagcgtatgtttttagggcgtcgaaaaaatcggatttatcgagtattttttgaggattgcttcgtatgaaatttgccattgcggaaatcgttatcgatgtagagtagggccatacggggccgttccattggcattcgtggccgacatagtttacgctgaacaggcggctgcggcgctcgagagttgtgaggccgaatggggctttgaatccattttcatctttaacttgaagccaagcttgcgcgtatcgctgcggggcgatattaaaataccacggggtgtagccgtggagttcgcggtggggcgagaatatggaggcgtctccgcttttggggagaactttatagaatttggcgctgtcgtcccagagcagagtatttatattgttctttaacattagcgcctcattggcatacagctcggattctttcttatagccaagcatattggcgatttttgaaagggattcgcattcagcatacatgtagctatttatagtggcgcggtatcctttccaaaatggatgcagcgagcccgaagccgataattccatgccatcggcgagatcggtcgtccagaaaaggccttttgatttgtcaaaattgctcttgcgccatgcggcgtagttttccttcaattttgggtacaggcgctttataaattcaatgtcgccggtgttggcgtaaatttcgagtgcggaggttgcaaaccaagaagagtaggcgcggggcttgccggacgaatagcaccagaaagccgcgtagtcttttgcgatattttcgtcgcgcaaccatcgcgcctccctcatatggtgtgcgctggcgcacgatatggtgttgtgtttcccggcccatgagacgtcgggcataaattctgtaatgacccagccgtccgattctgttttgcgcaaatgttttcggaatgtccaccagcggaagtaatagactttttcgattaatccgtctgggcaatcgaagcggggaacattttttagcataaattccgctgctttcgaattggggattttattcttataaagctctgtgtcgtccaaattaaacatgcggacattttctgcgagcgcgccgtctcccaattcgtatggaattacacttccgcgcgatatgagcgcacagaatgttaaaaataaaaaggtgattatttttattttcattacgataactttacgtgttcaacataagtactgtaaatattatgtagtaaaattgcaaaaaccaagcacaaacgcatatccaatttattttcgtcagtctttggacgcggtttacgttccgcgcctattgggggaaaaataaatatacgcaaaaaaaaaggcggcccgaaagccgccaaaaagtctcttttaccaattattttttagtgaagaactcggtaatggcaaggatcatgtaggaatgttcttcgggagagatttctccgctcttgcgcatttcgtcagcctttgcaatggacttgctgagctcgccgaacgggtcgttgccaactgagtcggggaggaaagccggcttgaggctttggtctatgcaggagggttcaaaagtcttgtaatagcctgcgtcaacgagggggccgaattttacaatcggattttccttaacagttgcgacattcatattgacatctttatagccctttttgacgagcttgatatcgtaaaccccatttgtttgtaggctgatagttgtgggtgtctgccccacgagttcattatttacaaaaacattagcgccttcgggcatcgaagaaaccgcgacatcttcggtgaaggtgcatgcggagaggataactgcaagtacaggggttaaaagtagttttttcatatcaattattttaagtgtcgaattgaactgttgttggttataggctgtcagtgtttttataaaaagtcaagtattttgattctttttttgggaataattttagtttttttttagagcttggaaagttccctcgaacgctcttgggctgctttgagcgcatcggaaacagtcttgcggaaaccgtttttctcgaatacgtcgagggctgcgagagtcgttccgccggggcttgaaacggcaatcctcagctcgtcggcgctaagcggagatttgcacagcagcattgccgagccaagcagcgtcttatcggtgagttttttcgcttcctcttcggtaaagccgatattctttgcgccttcgatgagagctgccgcaaattcaaaaaggtatcccgggccgctcccggatagggctgtcaccgcatcgagcttattttcgtcggtctgcatgtattcaccgatggagccgaggactgtttccaccgcttttagctctttgtcggaaagctcggattcgggcgcgaagcaggatattccttgcgatatttgcgccggcatattcggcattaccctgactattttacctacgtgcgagaaacattcgcgcaggcgcgcaattgttgttcctgcaaggattgaaatcaagaggcttgcgcgcgctcccgccgccgcttcggcgacttgcgcgagctgctgcggtttgcaggctgcgactataatttccgccgaagacagcagttcttctatattcttagcgagcgaaatccccgtttgttcggatagatttttgccggtgtcgtcgttgccgcaggcgcaaattatttcgcacggctttacggctcccgatgatatcattccgcgaactatggcgcccgccattttgccggcgcctataaacccaaattttttcataaaataggcagtaaacaatcttgaatgttttagtcaagaatcgattgtagttgcgctctgaaaacgatagaaagttttatgtagcgtaagtggagaagaaaactttttgtcttggggcacaatccacacagtttcaagcgggggcgtattggcagaggtttttccaaaaaaaatatgaaatgcggactttttttttaatcatgagaactttttttcccaaatagcctgcgaaatgctttacaatgcccggcagaccaggcaatagcaagccgctgcttactcattttggcagggaaacaaacgattgaaaaaacggcgtccggcgcaaggtggctggatattaatagtcaaatatagaaagatatttgcgcagggcggggataggctgggcctatttggcaaatattaataaacgcctaagtttttgcgatgcactctatgggggcttggaagataaatgtttttgcgtaatcacaaaaatgcgcccgcatacaatttgcgggcgcggatttatatcaaaaaatctttgttctgaaagtttcttacggcaaattagagcattcctagcgcaaagtcgcgcgcgattgcagcgaggaactttgcggcgcggttattcgcctctattatattaggggcaatttttgcgatttccccgattttcacgtcggagagcttcatttcctccagatccgcctcggacacctcggacgttccgcatagaatccatatgtgctttttatgcttttcagccatttgtgcgagcagatacggccctttgccttgcgagtcggtcttgtcgaacttgccttcgcctgtcacgagcacattgcactctttcacaaacttgtcgaggtttgcgtattcggcgaagagttcaaacccgctgactctctttgctccgaggaagtttataagcccgtatccgcagcctcccgccgagcctgagccgggggattcgtgcaggcttttgccgaggcatttttgggaaacctcagtaaggcgcttcatatttgcttcgagctcttttatttcggagtcgtttgcgcccttttggcgcgcgaattgcagcgccgcgccgtgttcgccaagaagcggaatatccacatctgttgcggctatgaagcgcgcgggtatgggcttttccggcgggactatttctgcgagttttgcaagtccccttccgttgggttctatcggctggcccttttcgtctaaaaatttaaatccaagcggtattaggaggccgattcccccgtcgtttgtcgcgcttccgccgacgcctacgattatcgttttatagccacgttccacgagctttgcaagaatgtttccggagccgatatttgtaagagttgcggggttgcggtcggattccgatatgaggttaattcccgaggcttcggtgagccccacaagagccgtttcgtcgtcgagcaatgcgcatttggctgtcaatgtttggccggtggggtctattgttttgagccttattacttttgcgccttttttaacttttgcgacggtatcgacaaagctgtcgccgccgtcagtcagcgaaaattcggtaattgtcgcgtttgggatagcggaggatatccccatttttattgcatgcgatgcttgcgccgcggatagggatccgcgaaatttatcgggggcgaccaagaaatttaaaggttttttcatagattcctttatgtgcaaagactacattttattatttttaactctaaagaaaaactaacaaaacacaatatttttttttagctaaattttctttgattgcttgggatttctttttgtttcaaagaaaatcaaaaaaaacttgaaaataaaacaaaataaaacaaatatatgtttcatatggcatcaagttataatactgcaaaacagatatacgccgattttggtgtggacaccgaaaaggcgatggaggtactcgacaaaataccgctttcaatgcactgctggcagggcgacgacgtcggcggatttgagactcccgacgcgacattgggttgcgggggcatacaggcgaccggaaattttcccggcaaggcccgcagcgtggacgagctaagagccgatatagacgaagcactaaaatatatccccggcaagacgcgcataaacctgcatgccatatacggcgaatttttcggaaagaaagttgaccgcgacgaaatttccttcgacaactttaagggctggacggattggtgcaaagaccgcaaaatgggaatcgatttcaacccgacatttttctcgcacccgcttgcggcggacggctttacgctctcaagcgccgacaagtctgtccgcaaattctggatagcccacgcgattgcctgccgcaaaatagcggaaaaaataggcaaggctttgtccgacaccgtcataacgaacttctggatgccggacggaatgaaggatttccccgccgacaggctctcaccccgcgagcgcatggcggcatctctcgatgaaatattttcagtaaaaatatcaaaaaaatacgcgcgcgacgccgttgagagcaagcttttcggcataggcagcgaaagctacgtcgtgggctcacacgaatttttcatgggctatgcggtcaaaaacggcctgatactcactcttgattcggggcacttccacccgactgaaacaatcgccgataaaatttcatcaatgctgatgttcgtgccggaactgctgctgcacgtatcgcgcggagtccgctgggacagcgaccatgtcgtagtctcggacgacccgactgttgcggcaatgcgcgaagtcgtccgctgcggtggcctttcgagagtccacataggcatggacttcttcgatgcgagcataaatagaatctttgcctgggcgattggcatgagggcggcgcgcaagagcctgcttttggcgcttctcgacccgctcgcaatgttgcgctcggcggaaaattccggagattacggaaggcgcttggcgcttgtcgaggagtcgcaaaatctgccgtccggcgacgtctgggcggaatactgcaagcgcgcgggcgttccgtgcggaataaaaatgctcgactccgttaaaaagtacgagcgcggcgtaatcatgaagcgtaaataaaaatgaatccattgctcggtgtttttctccacgggataggcggcttcgcgtcggcgtcgttttacgtcccgattaagttcgtaaaaaaatggcgttgggaagtcgcgtggattgcaatgggaattgtcgcgtggctcctaaccccaatgatagttgccacgataacgatgccgtcatggccgcaggctattgcgcagacagatagtcacatacttctgctcactgccctatttggcggaatgtggggcttcgggaacgtagcgtacgggcttactatgcggtatctcgggctggggctcggggttgccgtcgcgctcggaacatgcgcgattttcgggacgcttattccgccgattgtctctggaacttttctcgatatttttaccacgaccggagggttaatcgttatgaccggtgtggtaataggcgtcttgggaataatcataaacgggcttgctggggtgatgaaggagcgcgagtgcgcgcgcgtggattctcttccggagttcaatcttaaaaaggggcttgcagttgcgatattttgcgggttgtttagcgcgggattttcgttttccctttcaatcggctctccgattgcggaggtcgcaaaatccattgctgtggatactggcgcgctcgctcccgactccgccgacttttttaagaacaacgccgtgcttgtcgtgaccctttggggaggctttataagcaatcttttaatttgcggctacatgctcgtaaagaataaaagcgctgttgatatagtgtcggcaggggcgcgcttggggattgccaattttattctttgcgctatggcgggcgtttgctggtacggacaatttttcttttacggaatgggaaccacgcagcttgggaaggagtacgacttttcaagctggtcgctgcacatgtcttttataataatatttgcggcgttgtgggctcttgcattgcgcgaatggaagggcacgagcgcgcttacaaaaaccgttttgtggctcgggatacttgtgttgatagcgtccacatttgtgattgggctaggcaacagcgtatagggggtgtcgccgctcttagtgctcaggagcgtggcttgcggaattaaatgatttccattttttaaaaaaggttgcgttcgtcgctctccgcaatcaggcgttgctcggagcgcttgcgggggagggcggtaaagcttaaaaaactgtcttgtattttgtggcgcgctttatggcgcgcctatttttttagaaagcgcgctgggcaaattgcagttctaaaaaatttagcgaagcgataaagaaaggttctaagagttgcatttttaaaattttttgcgcagggcaaaccgagcgtggaaaaaagggaaacccgacaaagtatgccacgcttctcttagaatccgctttatatcttaaacgcgcgaggtttgcggtgctctgggaaaataagtggctttttatgggctttcttataaaaatgacggtaaagattttttatttattcaatgtaagactcgccaatataaaatctcgtattttggtacgcaatttcaattccgttttactgtttttatatcctgccgctatgtttttatttaaaatttctaatttaaaaagggcgcgggcggagtttttcactcaaatccgaattgataaaaaaggtgaaaaaatgccttgaaaatatggggaacttgaattgccgtgagattgctttttgaacaatcaaggaaaggtatgtcgcacgcagcgactgaaaaaaagcggaaaaaaatgaggggaaacaaatattgtaaaatataaaaatttttggccgccatttccaaaaaatattttttttgagaaagcttctggcgcatttctttatgaaaacatttgctttccacaaataaaaaaaccgcctaattgcggcggctttttgtttacttgaagctctgtcagtaaagcgagtttcagacaaattttattcaatctggggtagggcggaatcaggctaatccgacgaaattccccatttcttttgcaggttgcgctcaatcggcgaaaatattgccttgtctatcaataggccaatagcaattaccacgcacataatgccgattacttggtccattctcattagctctctgccgtagtggaggagctgcccgagcccgaagcccgtaagtatcgtgacgtaaatttccgcagccataagcgagcgccatgcgaaggcccacccctgcttcattccgccaattatgctcggcagcgcggcaggggcgataacgtgaatccaagtatgcagcccgcgcgaccccatggtgctcgcggcgcgcagatatatcgggggaatgttggtgacgccatgctgcgttgcgaggattaaagaccacacagttcccatgacaaccacaaacagcattgccgattcctcctgtccgaaccacataattgcaagcggcacccagcaaacgctcggcagcgcctgcaatcccaatgcgagtattccgatagtgtctttaaaaatattgaagcgcgaacagagcattcccattggaatgcctatgcaaatgcctatggaatagcctatgaacaatctctttcccgtgacccatacggctttggggagagataagtcgcaaatagcgccccacaggtacgcggcgacttccgatggcgccggcagcatatactcggcaaattcaaaatatcttacggcaaattcccagagcaataggacaatcgcgaaaactgccgccgaaaataaaactctcttgtactttttcattattctgcaacctctttgccgtcggtgtgttgttttagcgcggcggtgattttgagcgtatatgggctgagcgccgggtcgttgatgtcgcgcaggcgcggaatgtcaatttcgaacgtatttactattctgccggggtggggcgagaaaagaacgactctatcgcccaggcaaactgcctcgcggatattgtgcgtgacaaaaataatcgtctttttgcgcttctgccaaatttgctggagttcgccgtagagctgttcgcgggtgagcgcgtcgagggccccgaatgtttcgtccatgagaagtatccttggattcggcgcgagcgaccgcgcgagcgctactctttggcgcatgcctcccgaaagttcgtgcaccgccgaatgcgcgaacttgtcaagccccaccaaatgcaggtaaaattttgcaacctccttgcgctctggattggtgaggtttggcttcaatcttaggccgaacattacgttgtcgaagacatcgagccacgggaagagggcgtgctcttgaaacatcaccattctgtcgcgccccgggcctgtgacgacggtgtcgtcaacttttatagtgccgctgtcgggtttatcgaggcccgcgattaggtttagcaatgtggatttgccgcagccgcttggcccaaccaagcatacaaattcgccttcgcccacttttaggctgacgtttttgagggcctcaactttgccccccgccgaattaaatgttttgcttacgttgtcgacgacgagctttgccgtgacattttcgagttccgcatgaatattgctcattttttattttggtcggcgaagatgttttttatatcgagtttatttcgcaggaatccgcatttataggcgtcttcgacgaatttttcgagttccttatggttgacttcggaggtgaaaataagcctcggccaagcagccgcaacgagctcttttgatatgcttgcgccgcccatgagtgcgtcgagggcttcgagcgcgagtttttgcgcctcggcgggatttttgttaatccattctgtgagctctttgtgtgcggccacaaacttttttacaagctcggcgtggttttttagggttttattgtttgtgacgaggattgttgtgaccgcctctttttgttcgagaaatatttttccgccggcgtcttgttcgaggcgcgtgacccacggctcgaccgtccatacggcgtccaaatctccgcgtttgaatagtaggagctgctcaggattcgctgtgggaatcacccgcgcttcgcccgatatgagcgtgactttcacaccgttgtcgatgagccacgcgcggcatgcaacgtcctgtgtattgccgagctgcggggttccgatgcttttgcctttaaagtccttcggctcttttagcccaagtttggggtttacgaccagcgacgccccgccgtcggcggctcccgcgaggatacgaatatcgcgcccgcgagtttttgcgaaggcgtttattgcggggtttggccccacgtatgtgatatcgaccgcccccgcgaagatggactccattgcgcttggcccggcgttgaaaagcatccattgaatttttacgtctttgccaagcctttcctcaaaccaacctttgccaagcatgctcagtctgtgggcgaccagcgcctgagcgtgcgatatgtttgggaagtgcccgacacgcaatacggtttcggcgctgaccggcaggcatagtgttgcagcggccgccgctataattgctgttttcttaaaaaaagctttcatttctcagtgttttattatttgttattttttttatcgacgccccgatttcaagcattaaatgacatagcgtagagtctacaatttaagttgaaattgtatgcggaaggcgtgggcctccgcgcagccggttgcctgcgattgcggaattgagcccgagaactgtgagtattcgtaccccaactgtatttttaggtcgttgccgtttagataccaatttattccggcgtaaaaatcctgcacgtggtcgaagggagtccccacgttcggagcctgtcttacggcgtctgaaatggttatgccccttccgtctgtatcgagccagcagtaccggaatacggggcctattttcccatattcttcggtgtcaaacaggtactccacgcaaaaattaattccgtacggcgagcactgctcgcggtttcctgcggcggacacccgtccgtccgcgacaaccgagccgatgtactccgcccaaaaattaaaattgccccagttgccggctacgtacggatttatcgagtatatggccgagttgttgtcgcggtttgcgctcgaagaatacatagagtaagcccctattttgagtttccacgggttctccttgcctttcattgtgtacgacgcgctgaaccaatacgcgagggagttgtctataagctttgtcgagggcgatctgccgtcggttggcgagagctggtaggagtttgtgacagacagaatatacgccaatcccggaatctgccttacatttccattccatctgacgcctgcgtagcggttcccgacccccaagcgcgtcgcgcttgcggagcccgaccaaaacatagttgccggagagcgctctatcgcgcttagctcaaacgacgaaattacttcttcgtagatgaattgcggcttcatatatccgaggtacagagttccatcgatatattcactctctattgattttgcgacgtagttgtcgattaaaaagcagttcgcctgagtccttgcgaggtcaagcccgaattgggcagtccagccgccgccaaggtctgcgtctgcctgtatgaatattcttcgggcgagaaaagatgaagcccctgagtttgagttagtcccgcgtcctgaaacaagggagctgtcggtccattcgtattgcagctgcatgcggctggaaagccttagcttgcgcgtatcttcgcgctttggaacaacgtttgccatcgaccttgaaatctgcgaagcttccgatggggtaagaattccgcattttacataagagtccagctgctgtttttcagaagccgggagattgagtgccgctaccgccgcaagggcagccattacggttttggggagtttcatttttttatggggggtaaatttctaaaagatttttcctcaatcggagggctaatgttataaaaatgttagccgaatattattgaaaatgggagcggattcctccaagctcctctgaaatacaatgcattttgcgcttttttgcaaacaaataattaatgaaacaatttaaataaacaattttaaaataacgaacgtggcggagtgccgcaaaggcggcagtcgctttgattttcactgacaaattgaggaaatccgcttaaaaagccaataactatggatacccaagaggaaataaaagaaacattgaaatcaatcggaaatatggacaggcgccatttcgtaaagattatggcggcggccggattggcgactgccgccggggccggaacggcgagcgcagcgacttcttccgcaaagggcaagatagtggtggttggcggcggggccgccggtatttccacagcagccaagctgctcaggcgccttgaaagcccagacattacaataatagatccgtctgatttgcactattaccagccggggtttacactcatagccggaggagtttacgggacggacgacgtctataaaaaacaggcagactgcattccggacggggcaaaatggataaaggataccgtaatagaggtcgatcccgaaaaaaacaaggtagtgacttcaaagaacggtacgatagactatgattttctggttttggctcccggtttgcagataaactggggcggcgtcgagggtatttcgcgcgagaagctcggcgagggcgacgcctactgcatatacgaccaccagggcgcgatacgcacttgggacggcatgcaaaagtttgcgcgcaacggcggcaggggaatatataccgacacctacacgaagcataagtgcggcggagccccaaaaaagatatgcatgcttaccgagcatttgagccgcaaatacggcacgcgcgaaaagctcgatttcaatttctacacggctgccaatgagctgtatgatgtcccgtttttcaccaagcgcctgcttgaaatatacaaagaaaggaatatccccatttccacgcatgtaaggttaaagggcatagacacctccacaaagacggcgtattttataaaagagatagccgacaaagacaatccttcaaaaagcaaggttgtcgagactaaggagcagtacgacttcatacactttttgccgcctatgactgcccccgactttataaagaaatcagggctttcaatagagaagggcaagacggcggccgagggctgggcggcggttgacaagcagactctcgtgcacccgaagcacaaaaatataatagtgctcggtgacgcctccgccctccccacgagcaagacttccgcggcgatacgcaagcagtatccgatagccgccgaaaacctaatatcgataatggaaggcaaagagccgtcggaaaagtacgacggctacgcggcttgccccatagttacagactacggtcacgttttaatgtgcgagttcgactacgcaaaagagcctaaaatatcctttccgctttcgcttttcgatatgtcaaaggaaagccgattggcgtggtttttgaaggtctatatgctaaaaccaatatatttttacggaatgttaaacgggctgatttagcgttagcttgcgatattgcacaaaaaaaatctccgccttttggcggagtttttttgtcgggcgcggatatggaattttttcaatgcgtaaaattttttgagaaaaggtatggaaagggcgtcggctactttttatagaaaatagtttcgctgcttttcggatattggcaggccgacgcgctccattacggcgagcatatcctcccacacgaggcgttttgtcttcatattattgccgtattggagcaaaaacgaggggtggtaggttatcatcaagtcggcgttggcaaatttttcccacttgccgcgtattgcccccatcttccgcataggatcctcgccgagaagcccgttgacggcggttttgccaagcgcaactattacttccggttttacgatatctatttgcgccttcaaatatggtaggcaataggccatttcctcgcttgtgggggggcggttcccgcgggaggtcggcatttccgggcgccaattcattatatttccgatatagacgtcttcgcgcgacagccccatagccgatattattttagtcaacagctggccggctttgcctacaaacgggataccctgtatctcttcgtccgccccaggcgcttcaccgcagaaaaatattttggcggataggttcccaactccgaatacaacttttttgccgggttttacatgggcgttgcagattgggtcggagagcactatgtcgcggagtgcgctccacttttcggagggcgtggcgtccggaagcttgaagggtgtgggcgggggaattgtgccgtagtttggtgtgtttttcactatttttgtcctttcgcgcggttgctcttttttggattctatttttaagtcgtcgacgcccgcaaattttacttcttccggctcgtcttcggagggtatttcagcgcgcatttcagcagccaactcttcggcgttcatcctgcggaggattttaagcgaatcgtcgtcgagcgcgacggtttcgcaaccctcgtttagcatgcgcctcaattcgtcggctacagtttcgagaaactctttcattttaaattcttacttagtattgttgcggcggcgtccagaatagagcctatttctgcgagccttcccctgccggagaccccgcatgcgagcattccaacttcgggttcaacaaagtgcactccgtcgcttttcaatgcgcgcatattgcgcacaaccgcgggattttcgtacatattggagttcatcgcgggggctatgagcacggggcattttgcggcgaggtaggttgacgaaagcaggtcgggcgcaaggccgcacgcaaaattcccaatcgtatttgcggttgcgggggctactattataatgtcggcggattccgcgatggaaatgtgttcgggcttccattcggcgacgtcttcccacatatcggaatacgttttgttgcgcgagagagtctgaaatatcctcgggctgattagcttcttggcgcttgcagtcattatgaccgttgtgtccgcgccgagctttacgagcgccgacacgagttccgccgccttgtatacggcaatcgaactgcatacgccaaccacgactttcctgcctttaaacgactccctattattttccataaaaaaaatttttacatttatcgcgcaaagtgcaagctgtttcgcatgtcaggttttagagcgtattgcgatttttccgcttttagcgcgggcggcgagattcctgttggaggcgccgtggagctgaatgccgccgaaagccgccacctgtgcggagcgttaagggcgcgggcgggcgatatggtcgatgtgttcgacgcgaagggaagtgcttacagatgcgaactcgccggggcttcttcaaaatcggccgcactcagggtaatcgggcggctttatccgaaatctccgaaggttgaggtctatttggcgcaatgccttccaaagggtccggcgtttgacgaaattatacgccaaagcgtggagctcggggcctccgggatatatccgcttatgtcttgcaggtcagtcgtgcggctcggacgcgccgacgccgaaaaaaaatccgcaaagtggtttgagaaatatgtggaggccataaagcagtcgtcaaacctgtcaaagtttgaaatgccgcccgtttcggatatatcagattttctttcaaatagcggaggatttgaagtaaagcttgtggcgagcctcagggaaaacgcctcgccaatatataaagttctgaaatccgccggtgttgattttgcgaaaagcgcgtgcgttctgataggtcccgagggcgacttgtcggacgccgagtacgacgccgcggagagcgccggatttattcccgtgaaactcggggacaacgtaatgaagtgcgacaccgcagccgcgtgcgcgctttcagtcttaaaggccttttggcaaaaatgaaaaaatagcgcacaaaaaatctaattgattgtcaaattaagccgtgagaggattcagaaggacactgatattttgccttgcgactctatgcatggttttggcgctttcagtgtttgtgtccctcgtgagcgaatttggcgcgggcggcgcaaattcagaaaatctgcatccaacggttatggcggaaaagcgccattacgattggggaaacgaacttgcaatgcgcgcgcgccgcgacggaaagcttgtattttttacggtcggaatcgggcggaaatttgacttttacgggcggcttgaaaaaattcttggcaatagtttctatactacttgcctcgagcccgacagatatccggcagatttcagagtgctgcaaagcgtattcgagcgcggcacgggaaattccggctcaatagagggagggatattatccgcgcggctcgcccccctctatctgacttctaatcttgccggagacgccgcgcgcggcgttccatctgcggcggaggcggcgaaggcggccgccggcattttgcgcgtcgcccccgagggcttgcgggctgctgaaggcaatctcgcggggctgcttgccggggaggacgggcagaaagattatgaatatgcttcggacttgctcgcagacggattggactggaaatttgagtctgctaagcttgagaaatttttcggcggcgatgtatcggatagccccgtagcggtcgtcactgaaaacgcgcgtctggcggccgggattttttcggcatttccggagctaaaaagcgcggaagacgcggaagacaaagctcgcgaagggctcataaaaatgtttgcagagccccgcgcgctcgtcgagcgcctgctgatagcaagggctcttttggaaatgcccgccaaaaacggagacggggaagataagctaattcggtttgcggacgaattgctttctatgacaaagcccgacgggcgcatgatggaagatggccgcgacgcagtgactgccgaaaacgcgttggcggctcaggtattggcgcttgcctattcgcgctttaagcgcagagcgcatcttgaaggcgcggagagaatttgcgggtatatcgaatttctcttaaaaacttcttatcagctgccgtccgtatcgagcgtggcggtgaggtcgcaatcgtccgcgcgaacatacgcgtttgcgggaggggcgtttgcggatttgcatgcggcgaccggcgagaacaaatatattattttctgcagaatattattcgacgaactggacggattgtttatgtcggagtctggactttgggcgataaattcgcatgcgtcggctttgtcgggagttgcgcggcctattatatatgtagattcccgcattccgtcgtacatgggggaggccgcacagcagttgaagtatctttccgaggcggattcaaggttgtgtgccgcatattcaaaaaaactcaaaaaaatatctgaaggcgcgcgtcggcgttatagattcaacgattttgaaatggcctcctggaaaatttcccagcttccgcgtgtgaagaagcctgtcgggggaaaaaccgccgcgcgcataaattccagtgcgcgtgcgcggtttgacgctacgggcgtatatataaatctttcccgcaccggcgcgcgcataaatttagcgcagagcatgattcaaatgcgaattagccaatgagagtaaattccgcgaaaagtataatgcaaagggaatttctcgcaaggaatcacccaactccgcgcgcggtgaaaagccaaatttagggcggataatgcctatcgaaaaccgccgcaaaagcgcggcgggaatcttttttgcgattaccaccttatgtgcgattccgtattataaagcgggaagggatccgccgtgtatgggaagtgcgggctttccttaaattcggcttcgggattttcaaggcggtcagcgaatttcgggaattgtttgccaagctccgcttctgcgagatttttcatctgaataaatctgcttcttagcgcaagcgcgctccagatgtgggaggagtctgcgccgagtttttgcccggcttccagttcgtatttcaaaggctctttcggaaagtttagcagtattatttttccggctccgatgcgcttttcggctgcgaatgcaggatttgtaagcgcaactacggagtctccgccaatgtcgcccatttcctgcggcacccttaaaaaggtgtcgcgcgcgtcgagcgcgctccagtattttttcgcactgccaagaagc

SEQ ID NO: 2887 - DNA, 32759 bp, Unknown
  16S sequences of unknown bacteria
aacggaattttggtaaaaggcatgggcggagattgtttgaccaaactttcccgttgctgtaatccattgcccggcgatgatatcattggttttgtcacacgtggttttggcgtatctgttcacaaacgttcctgcagcaatgtgcccaaagacattgccggcagtccggaaccggagcgttggattgaagtacaatgggcaaatcaagtaaaagaagaatttaaaactacacttgaaatcgtggcaaaccatattccgggtgtgttgatgaatgtaacgcagcagctttataatttacgtatcagcgtccactctttaaactccagagagttaaaagacggcacagatgtaatttatgcgaccattaccattcaaggcttggaacatttgaatgctgtcatttcaaagttgtccaatatagaaggtattatcagcatcaaacgttcatagagtatatgagacgcttttcagaaaggaattatcaatatgcaaattcaagagattaccggcggaatgctgccgacaaactgtttcattgtaacggatgaggagacaggtatttctgcagtgattgaccccggctttatttcagatgagctgtttgacagaataaaagaattaaaaaaagtagacgcaattttattgacccacggacattttgaccatatcatgggtgtaaaaacggttcaggatatgacaggtgctaaaatctatatgcatgaattggaaaaggattttgcaaccgacagccgtttgaatttatctacggtcattgccgaacgacaatgcgatgcatttgtaccggatgtattgtatcatgacggcgataagattcaggttggtaatttgacctttcgcgttttgcataccccgggccataccattggaagcagctgcctgattgtaaaagataccatcttcagcggtgacaccatcttcaaaggttccattggtcgaactgactttccaacttccgatcctgcaaaaatgatggaatccgtacaaaaagtagctgagctggaagggaactatgcagtgtttcctgcgcatggagattccacaacattggattacgaaagaaacacaaatccgtttatgaagggcaacacagatgattttggttattgatggacattcttatctttatgaaatggaaagtctttgcgatatcttttttccttatgaaaaggtaactgctgtctacgaaaacggacatgatgacagcttattggtctacacaggttacaaagaagaaaacggagcggctcatttacacgtttctgtaaaaatggaggaccgctttgcagaaaaacgaggcactttctctttgggtgaacccgattttgaacgtcaatgtggtttggcaatggctgtgctgttgtatgatattctggtagaactgacaggatatcgtcctaagtggggtgtgttaatcggggtacgtcccattaaactgctgcgaaaattgacagcggaaatgggacagtccaaagctgcggaatactttttaaacagtttgcatgtttctcaagagaaaacagcgttgagtgtccgcaccatgcagcatgaacagcctattttggctgcttccaaacccgaatcgttcagtttatatatttccattccgttttgtccgactcgttgtgcgtattgttcttttgtggcgcagtccacggaaaagacaggtaaactcattccgcagtatgtagatttgctatgcaaagaactggaatataccgcagaagttgcaaaagcatgcaatttgagattggaaaccgtgtatatgggaggtggaactcccactacgctgaatgcacagcagctgggacaaattattgatacggtgaacaggaattatgatatgagcacatgccgtgaatttacagtggaagcaggccgtccggatacgattacggcggataaattgcaggcaatgaaagaacgcggtattaccagaatcagtattaatcctcaaacgttaaatgatgaagtactgaatctgattggaagagaccataccacacagcaaacgctggatgcattccatttagcgagagcacatggctttgacaatatcaatatggatttgatcgtagggttggcaggggacagtgtagaaagttttcgtaatacattggatggtgttgttgcgttacatccggaaagtattaccgtacatacgttggcattgaaacgctcctccaacatcaataaaaatggtaaaattcattttatcaatgatggtgaaggtgcaggtcaaatgttggattatgtggatacggtactgacgaaacaagattatattccgtattatttgtatcgacaaagtcgcatggttggcaacctggaaaatacaggatgggcaaaaccggggtatgaaaattattacaacgtttatattatggatgaaagtcataccattttggcttgcggcgcaggtgctgtttcaaaaattaaacatccgtataaagatgaactgcaaagaatatttaattttaagtttccgtatgaatatattgaccgttatcaagaaatgctagataggaaagaaaaagtaaaatctatctataaacaattcctgctttctgctactccatcaacaaattgatttcaattttgtaaggtatcataagctgtattttacaacagtaacaaaacaaatattgacggttatgaaaagaattttgctcttaaaaggtgaaacaattgtctatgttataacaacgttagaacagcggccaaacaaacattaaaagaacatctttccatattcaaaattttggctgttaagagaacattttcacgttctatcagttaaaaattgcatagcaatttcttttatgttataatataggtagaaaaaggaattaggaaccatttatcataaaaggagacgaatattatgggactatttgaaaatattgtgtcaaacgcaaaacaggctgctaatgttgttggtaaaaaaacaggtgaattggttgatacttctaaattgaaattacaagcagtagacctaaacagtgacattaaaagaaattatgaagcccttggcagagctgtttatgaatcacgcaaacaaggcattgattctacagaagaaattgatgacatcatcattctaatcaatgaaaaatatgatgaattggatgaggtcaatgagcaactgtccaaaatgagcaataaaaccttctgcacaagatgcggagaaccaaatccaaaaactgcaggtttctgcagccagtgcggagaaaaattggtgcacgaagtacctcaggatgatgcttatgcagcacaaggcggttgcagctgtggatgtcatgcagaagctgaaccacagcagcaagagcaagcgcaacaagaacaaccggctcaggaacaaacagaaaatcaaaatgagaatccacaagcataattggattcccgttcatgttgagagaggagagtatcctctcttttttattttcttttctaaggtgactatggcgaaaataggttgtctttggcataagaaggacaatgcaatcatataacattcatagtatttgaaagaggaatggatgtgtttgcatgcagccccgtaatcatcaaaaaagaaaacgtcaaagttttttacacggcgctttgattttaactgtcagcatgattttggtaaaactaatcggcgctatgtttaaaataccgcttacttggattattacagaagaaggtttaggctattttaatacagcgtaccatttttacagtcctatccatagtttggcaaccgccggatttcccattgccattgcaagaatggtttctgaaaatttggcgtgtggaagatatgccgatgtacggagaatccataaattatccattcccatatttttaattaccggcggacttgggcttgcggttatggtaatatccgcaccgttttatgttagagccattggaaacggcggagcattgccagccatgttttgccttgcgcctgctattttgttcagttgcttatcctctgtttatcgtggttactatgaaggtatgagtaacatgtatccaacagcaatttcagaggttatggaagctatttttaaattgttggttggactatcggccgcttatttggtattccgccttggtatgggagagttttacagttcaggaaccgtatgggggcagcaagttacttcagaggcgtttgccaaaagtgcattgttgccttatacggccgcagcagcagtattcggtgtaaccataggttcctttgcaagtttcttttatctctggattcgtcacaaaagaaaaggtgacagcattacatgcagtgaattgcaatgctctccgccatgtactgacagaaagagcattgtgggaagattaatcaaaatggcaattcccattggaattggagcgctggctgtaaatgttgctgcattggtggatactacatttcttcagacgagaatcaaccatattatgtcagtccatccggaaccgcttcttacgatgtatcaaggtatgataccggatttagaggttaaaatagcaacggggaccgtttccaactttttgtttggctgctactcgcaagcgttggcattgtttatgttggttcctggtattacacaagcatttggcattagcgccttaccaagtgttacgtcagcatggatgagtggaagccgctgtgaattgcaaaaaagtatttcttccgtactgcgtatgactgcattgttcagtattcctgccggtttgggtttaagcgtattatcaggtcctgtcagtcaggcggtatttggtgcgaaagcctctattcccattacttcgcgtacattggcggttatgggggttgctgctatttttgcatctttaagtacgcctattttcagtatgctgcaagcagtcgggcgagtggatttacccgtaaagctgctgtgtgttggcttaggattaaaaataggactaaactatgtgctgaccggtattcctgaaattaatattttgggagcgggaataggaactttggtgtgttatgtatttattacgatttcagcatgttatttcctttgcaaagaaacaaaaatacacttgaaatttcattctatttttacaaaaccggccattgcttccatgttttgttgtatatcggcatatttttcctgctttgctatgtcaaagattatgccggactctcttgctacgggaattgcagtgtttatcgcggttttcatttatattgcgtctctgttatgtttaagagctttatgcagagacgatgtattaatgttgccaaaaggtcaaaaacttgtaaaaatacttgaaaaacatcaccttatcatgtaaaataagccaatgtaaacacaatcttttgcaaaaggagtctagacttggattttcaacaaaaagaacgctataccattggcgacttagagcacatcattgcattgctgcgtgcgcccggaggctgcccttgggatatagaacaaacacatcaaagtgtacgtgccaatttgattgaggaaacctatgaagctgttgaagcaatcgacaccaataatatggaacttctcaaggaagaattgggcgatgttttaatgcaagtgctgtttcatgcacagatggaggcagaacagggaacgtttacgtttgccgatgtggtggacggcgtagcaaaaaaattgattgtgcgtcatccgcatgtatttggaaatgttcaggtaacagattctgcccaagttttgtctaattgggatgaaattaagaaaaagacaaaatcccaaacaacacaaacagaggtgcttgagagtgtttctgttgcattgcctgcccttatgcgcagttataaggtacagaaaaaagcagcaaaagttggcgtggatgtatcggacgcaaatgcagctttggaccaaataattgctcgtgcgcaggaattaaaacagacattgtcaaaacagcaagacagtaatttgttggaacatcaagttggagatttgttgttttcggcagtgaatgttgccagaaaatgcgaagtagaaccggagtattccttgacaaatgcatgtaatcgctttataatttactttactgctgttgagaaatatactcaggaaaaacaattatgttggtcagacctaacgcctcaggagttaaactctatttggcagtgggtgacaacagaacaattctcacaatgagatttattaaaatttcgggggtaaaaaacaatgaataaaacagaactagttgctgcagttgcagagaaagcagaaatttctaaaaaagacgcagacagcgcagtaaacgctgtaatcgagtccattattgaggccgttgcaagcaaagataaagttcaaattgtaggttttggcacatttgaagccagagagcgtaaagagaaaattggtaaaaacccaagaacaggcgaagaaatcaaaatcgcagcttctgtagtacctgcattcaaagctggtaaagctttcaaagatgctacaaacaaataatttagaatagcaaacttgtaatgtagcctgacaaatccgttaaggctgcattttttgttttataccattgggagaatcatatgagattagataaatatttaaaggtatcacgcctgattaaacgtcgtaccatagcaaacgaagcctgcgatgcgggaagagtattagtcaacggaaaaacagcgcgtgcatcttatgatgtaaaatgcggagatatattggaacttcagcttggcatgcgtacgataaaagcagaggtcatggccgtaaacgaatatgcaaacagagatactgcggcagatttgtatcgcatcatagaagaaaagtaacagatagataaacaagcagcatcattgttgtacaagataatagcggaataccgcatattgcccccggcaagtgcatacttatttgtatgaatttgttgggggtatttttatgatgacagatgaaagaaaaagcagtacaaagacacctcacagtttaattttagaaaacagaaaattattaactgctacaggtgtttccaacgtagacagctttgacgaagacaccatcattgcatatacagacttaggagaaatcgtaatcaaaggcaaaggactgcatatcagtaaactgaatttagaaacaggagagatgaatctggatggagaaattaattccgtatcatattctgaaaatcaatctgcaagtacaggattcttctcgaaactcttcaaataggggtgaactgttgtggaagtaactctgtcttcgcaactgttaagtcttggtatctctgcattggttggtttggcgttggcagttgtttacgatgttttccgcgtaacccgtattttatttcgtacaggcaaaattgctatgtatgtgcaggatattttatatggtatcgctgctgcgttcattacttttttgctggcgctggcagtgaacagcggtgaaattcgcttttatatcattggcggtgaactgattggcatggcggtttactttcttactttaggaagaattactgtgcgtattgcaaaatggattcatcgtatttgcgtgaaaattgcgttatggttcaaacgtcatatcagcgaaccgattaaagggttttatgaaaagaaaaaaactgccattgcgcaaaagaatgccgaaaataaaaaaagaaagaaaaattcagaacgaaatattgaaaatcccttgaaacctgcaccagacatagtgtataatcgaattaaaagtttttttatcggttctggtaaagagctcaaagggggtatcccggaagatgacacaaaattatgaggcagaaatagattctaaatcaaaaagaacaaaacgaaaacgtaccaaaaaatcaaagcgcaacatttttttaacagttgctgtgtctgtttttgccgtatatgttgttgcggtgtttattagtcagcagattcaaatcagtggcaaaaaagaagaattggcttctatgacacaagagctgcaagtacaaaacatgaaaaacaacgagataaaaaaatctttggatgcaaatataaatgacaacagtgaatatattgaacgcttagccagaacgggtctggactttgtaaaacccggagaacgagtatttgtaaatgtagcaggtaattaacctgtttaaggaggaaaccagtactaatatgcagcttgaagtaggagcgattcttgaaggaaaaattacaggtattacaaaatttggcgcttttgtggaacttggtgaaggtaaaacaggtatggtacatatttcagaagtagcgccaacttttgtaaaagaaattacagactttgtcagtgaagggcaaacggtaaaagtaaaggtactcagtgtaggagaagacggaaagattagtctttccatgaaaaaggcaatggaaactgtgccggcttccggtcaaaatacgcagcgtacacgttccggcagaaaaggtcccgatcattttgaatggtccaataaaaaaaatgaagcaaccagttttgaggatatgctgaataaatttaaacaaagcagtgatgaaaaaatgtctgctttaaaaaaaggtttggagtctaaacgcggaggtttttcccgtcatggctcaggtcaatccagataacaaagtggagtgttcgcactccactttttgtatccaaggcaaatgatgagaaaggtatttataatatgatattacagcacggcaccatacacactatggcaggcgaaaccatagaacagggatatattgtaattcaaaacggagtcattgagcaagtgggcacaggagaccttttgcatgtggaagatgaagatatcattgatttaaagggagcgcacgtctatcctggatttattgatgcacatacacatctgggcatttttgaagatggtttgaattttgagggcgacgactgcaacgaagatactgaaccgattacacctcatctgcgtgccattgatgccattaatccaatggaaaattgctttagagaggcgttggaaggcggcgttactactgttgtaacaggcccgggttccgccaatcccatttccggtcagctggcagctatcaaaacgtatggaaactgtatcgaccgcatgattgtcaaagcgccgcttgccattaaaatggctttgggtgaaaatccgaaaagtgtttatcatgataagagccaaacacccgttaccagaatggcaacggcagctttgattcgtgagcagttgcataaagcaaaacattatttggaagacaaaaaacgtgctttggaagatgaggattccacgcctcctgagtatgacttaaaatgcgaagcattaattcctgctttggaaaaagaaattcaggtacattttcacgcacatagggcagatgatatttttacagcgattcgtcttgcaaaggaatttggtttggattatgtcatcgtacatggtacagagggtcatttgattgcggacgagctaaaagaagaacaagtcaggattttatcaggtccgtttttgtccgaccgctccaaaccggaattgaaaaatctgacgccgtcttgccccggaattttaatgaagcatgggatacaaacggctatcattacggaccaccctgtaattcccctgcaatatttaactctcgcggcaggtctggcagtgcgtgaaggcgctgattatgacgctgccttaaaagcaattaccattgaaccggcccgcatttgcggtatagaaaaacaggtaggttccatagaaaaaggcaaagatgccgacttagttgtgtttgaacaagaccctttgttattgtcggcaaaacctaccatggtatttgtaaatggaattcgcagagtttaaaggagaaatggttatgagagaagtgaatgtatccaaaattacagatgcagtcaagcaattgtgtattgaaacaaaccgtatacttcctgctgatttggaggaaacaatctgcaaagcgtgtaaaacggaaaccaatgatacgggaaaagcaattttaaatgacttatgcagaaatatggatgctgcaagagaaatgcaaattccgatttgtcaggatacaggcatggcagtagtgtttgtggaagtaggacaagacgttcatttcattggcggagattttgaacaagccatacacgaaggagtaagacaaggttatgtggaaggtttgcttcgtttatctgtggtgggtgacccgttggaaagaaaaaataccaatgataatacaccggcagtcattcataccagaattgtgcagggggataaagtggagttgatggtggctccaaaaggattcggcagtgaaaatatgagcagaattaaaatgtttaccccttccgcaacaaaagaagatattatcaattttgtggtagaaaccgcaaaattagctggtagtaatccttgtccgcctatggtacttggcgttggcatcggcggagattttgagctatgtgcttatcttgcaaaaaaagcattgtgccgtgaagtatcggaacacaatccaaaagaagaataccgtttactggaacgagaaatgctggaacgagtaaatcaactggatattggtccccaagggtttggaggtatcacaactgccctctctgtagccattgaacagtacgccacacatattgcagggcttcctgttgcagtaaacgtgggctgtcatgtaacaagacataaaaaagtaacaatataaaaagaaatggcttccatttttttatacaatgtgttatactaatttcgtagtaagaaatatgaagacttcatttcaagcccccataatttttgctgcgagaatgttttgttaagggagatgttggtatgcatattacgattaccggcagaaaagtaaatctaaagaacaattttaaagaattagtagaaaagaaactttctcgttatgacagaattttcgaagaaaatgcagatgcacatgttgtggttacagtagaacataaccgtcaaacggtagaaattaccatacgtcaaagcggattgattttccgtgcggaagcaacagattttgaaatgaatgacgcactggatcaagtgattagtgcattgggcagacaaattagaaaaaataaaacaaaacttgagaaaaaactacattcgggcgccttgcgtgattatgtagaagattactacaatggtgaagttccggaacagccgacagtggaatataaaatagccagaaccaaaaaaattccggtaaaaccaatgcatatagaagaagctattttgcaaatggatatgttaggtcaccaattttatatgttccgtgacgccgaaacagaagaaattgctgtggtttataagcgtcacaacggcgggtacggcttattggaaccggatgaagatgattaatgtataattgtaaaaaaggggccgcgtgacagcgcggtccctttttaaatccagaatcggagtgaacagcagtatatggagaattttaaattggtttgcccttgtattttaggggtagaaggtttggtagcagatgagctgcgtgcaatggaagcaaaaaatgtagagccgcaaaacggaagagtggtctttgacggtgatatcaacatgctggtaagagcgaatttatgttcaaggtacagtgaacgtgtactgattttgctgggaacatttcaggctcgttcttttgaagagttgtttcaaggagtgaaagccttaccgtgggaaacatggattggtcaaaatgatatttttcctgtaaaaggacgttccctcagttctcaactgtccagtgtacctgactgccaaaaaatcataaaaaaggctgtagtggagcgtctgaaacaaaaatatcatgtttcgtggttcggcgaaaccgatacgttatatcaaattcaatttttaattatgaaagaccaagtcagcattatgatagatacttccggcgcagggctgcataaacgtggttaccgtgcaaattcaacagatgcgcctatcaaagaaacattggctgctgctatggcaaatttatctcgtgtacgtgtcaacggcaatatggtagacccgttttgcggttccggaacagttttgatagaatcagccttatatgccttaaatatcgcacccggcttgcgtcgtaacttttcggcagaaaattggaatcaaattgatgcttctgtttggagaaaagaaaaggaacgcgcacaggatttaatacgtagagatgctcgttttcaaggaagaggatttgatatagacggtgctgcggtttctttaaccattgccaatgcaaaaaaagcaggtgtgataggctgtattcaagcagaaaaaagagatatacgcgactttaagacggaaacagagacaggggtcgtcatttgtaatccgccgtatggagaacgcttgctggatatcaaacaggcagaagacttatatcaaattatgggacaggtatttcagccaaaacatggatggagctattccattattactcctgatgagatgtttgagcaatgttatggaaggaaagcggataaaagaagaaaattatataatggtatgattaagtgccaattatatatgtattttaaataaggaaaatatcagttgtattatgaaagagatgttctacctttttcaaatgaacggtattgtttgtgcactttttgtttgatggattgtgtatgtatccgttgtttgtgatataaagcgggttagaaagaagtaaccgtaatgataaaacagtagaaacttatgtgtaatttttttggtctttctacatgatatttttcaagaatttgaacaaattatgtttaggattgtaagtttgtataaaacgtgctacaatatagttgaatcttaaaacagaatagaggtcttaatgttatgttggaagaaattttacagtataacaaggagtttgtggaaagcaaagcttatgaaaaatatgccgccagcaagtacccaaacaaaaaacttgcaattttgtcttgcatggatactagattaaccgaactgcttcctgcagctttgggattgaaaaacggtgatgctaaaatcatcaaaaacgcaggtggaattatcgctgacccgtttggcagcgttatgcgcagtctgttaattgcggtccatactttgggtgtagaatatattttggtgattggacataccgactgtggtgtgcaagggttggatagtcaagcagttatgcaaaagatgcgtgacaacggtatttcagaagaatctatcgaaatgatgaaatattgcagaccggattttgacaaatggctgtgtggttttcataaagtagaaaattccgtagaaaattccgtaaatttaatccgtaaacatcctttgattccggataaagtacaagtgtccggttatgtgattgacgccactacaggacagttaaatcctgtaatttaatggaaaaaataaaaagcagtgtagcattagttacgctgctttttttagttgagacaaaaaaatgtgaaaatattaagcgaagagcgaaaaattgccgtcttggagtataatatactttacattaaattcacataaaagttcggtggggagagatttttatgtccggcaatgcaaatcaaaaaacaaaaatattataccttatgaaaatattgatggaggagaccgatgaattacatcctcttaccattaaagaattggttacaaaattggaccaatataatattcaagccgaacgaaaaagcctttataatgatattgaaaatttacgctcttttggcattgatatcgagaagaataatgcgcgtgcctgtgcatattatgttgccagccgttcctttgagcttcctgaattaaaattgctggtagacgctgtacaatcttccaaatttattacccataaaaaatcaacggagttaatacataaaattgggcagctgaccagtgtatacgaagcacgtcaactaaaaaggcaggtttacattaccaatcgaattaaaacagtaaatgaatgtatttattataatgtagattatattcataatgcgattgcgcaggacaaacaaattacatttcagtactttgaatgggtggtggattttcaacagcctgaaaaagtacgcaaacaatttcgtaaaaatggagaattttattgcgtcagcccttgggcgctttcttgggacgatgaaaaatattatttggtcgcctttgacagtgcaaccaatcaaatcaaacattaccgtgtagataaaatgtcatccattgcgttattggaacaaccacgccaaggaaaagaatgttttcaacagtttgatttggcggtatattctcaaaaagtcttcggcatgtatggcggtaaagaagaaaaaataacgttaaagctcaaaaattccttagtcggtgtaatgcttgataaattcggcaatcatatttctatttccaaatgtgatgaagagcacatttatgtaaaactgaaagtggccgtcagtccaccgtttatcggatggcttgttggttttggaaatcaagtaactgtagtagagcccagcagtttggctgaaactgtacgcaaaacattaacggaaatattaaaagcgtatgaaatatcatagcattccccgtttgaccaaataatcttctgtatgaaaagcatagatttgctttacaatagcttacgcttattgtaaaatagacaggtagaataaaaatttggaaagacggggtgtttcttttgcagcctaagtataaaagggttcttttgaaattaagcggcgagtctttggcaggaaaacaatctcatggaattgattttgatacagttttaaagttttgccagccggtaaaaacctgtgtggatatgggtgttgaagtagcgattgttgtaggcggcggtaacttttggagaggccgcagcagtggtaacatggacagaaccagagcagaccacatgggtatgttggcaacggtgattaatgctttgggcgttgccgatgcattggaacaattgggattgaatgtacgtgttcaaactgcaattgccatgcaggaagttgcagaaccttatattcgcaataaggcagttcgtcatttagaaaaaggtagagtagttgtattcggatgcggaacgggaaatcctttcttttcaaccgatacagcagcagctttgcgtgctgctgaaattgacgcagacgttattttaaaagcaaccatggtagacggtgtatatgacagtgacccgaaagccaatccaaatgctgtgaaatacgataagctttcctttatggatgtgctcaatcaagacttaaaagtaatggacagtacagcggcatctctttgtaaagacaacgatattgcattgttggtatttaatattgatgagccggaaaatattgtaaaagcaatttgcggtgaatctgtcggtactttggtagaataaatttaaaattatgctctatattatatcaataagtcatttagtaggaaggtattaggttatgaaagatattctaaaacaagcagaagaaaaaatgaaaaaatccattcacgttttatcagacgaatttgctgcagtgcgtgcaggtcgtgcaaatccggccattttggataaagtaatggtagattattacggcgcaccgaccgcaattaatcagcttgcggcagtttctgtttccgaggccagagttttggttattcagccatgggatgtttcttctttggaaagcattgaaaaagcaattcaggttgcggatttgggtattaatccacaaaatgacggtaaagtaattcgtcttacttttccacagttaacagaggaaagacgccgcgaaattgcaaaagatattggaaaaatgtgcgaaaacggcaaagttgctattcgttccattcgtcgtgatgccattgaaaaactaaaagcaatgaaaaaagatggcgacattacagaggacgatttaaaagacggcgagaaaaaggcgcaggatttaacagataaatactgcaaagaagcagatactatgcatgcaaaaaaagaaaaagaaattcttgaactataatcatagtaggcggtaattattatgaaatcttctgcaaaccaaggggagcgtattttgccggagcatctggccattattatggacggaaacggccgttgggcaaaaaaacgttttatgccccgttcaatggggcatagagcaggcgctgctaagtttaaagccattacccgctattgcagtaaaattggcattaaatacttaacggtatatgctttttcaacagaaaactggaagcgtcccgaagaagaagtgggcgctttaatggggttgtttaaacagtatttaaaagatgctctggaagatttgctcaatgacgatattaaaattcgttttttgggagatacttctatgttttcggctgacttgcaggaactgatagcagaaaccattgagacgggtaaaacccgtacaggaatggtactgaatcttgctatgaattatggtagcagagcagaaatcacacgtgctgcacagaatttggcagagcgagtgaaaaacggtgctctgcagccttctgagattacagagcagatgctgtccgaccatatgtatacgtatggagaaccagaccctgacctaattattcgtcccagcggcgaatacagactatccaattttttgctatggcagtcagcgtattccgaattgatttttatggatgttctgtggcccgattttaccacgggagatttggaacactgtttggatgaatatgcaaagcgtaacagaaggtttggaggtgtctgatatgataaaaaggatactttccggatgtctggtcataggtattgtagctgctatgataggtttccagtttatttttccgtattctttgaatatcattatggcactgattacagctactgctgtttttgaactggtttcagcagtgggactgcgcaaatatctcacgtttctattgccaagtgtcgcgtttgcgcttgcaattccgctaatacccaatcaaatgtattggtccatggttacatatttcctgtataccattttcatgctgggttctaccatatatcattacaaaaaggtcaagtttcaggatatttgtgtggtatacggcatgacattgttggttacaaccgcattgaatacagtatctctgatgagatacttaaatccacagcactgtatgctgtatgtggtaatggcgttgtttgctgcatggattgcagatgcgggagcatattttgtgggaagctttataggaaagcataaattatgtcccaatatcagtccgaaaaagacagtagaaggtgcagtgggcggatttatcataaatattggactgattatgcttatgggctatttatataatcttattttttatggctcacagctttctgtctcttatttatctcttgccattattggtggtgtaaccgcaattttatctattgtgggagatttgagtttttctattatcaaacgcagttatgatgtaaaagattttggaaatttaattcccggtcacggtggtatgatggatcgctttgacagcgttgtcattgtcggaccgtttatttatctgtttatccaactattaccagtgattctataaaattgtttgaaataaaatgacagattggtgaataataatggaaaagaaactttctattttaggttccaccggttctatcggatgtcaaacattagatgtcgtacgaggtcttggtctgtcggtaactgcattggcagcgtaccaaaatatcgcgttgcttgaaaagcaaatacgagaattcaagccgcaacttgttgcggtttttgatttagaggcagcaaaacagctgaaaattgcagttgccgatatgtctgttaccgtggtttctggcatggaagggttgtgtttggcagctgctgcgcaagaagcagaccttgtattaaattctgttgttggcatggtggggctgcgtcctaccttagcagccattgatgcaaagaaagacgttgctttggcaaacaaggaaactttggttgctggcggcgctttggtaatgcaggcggcaaaagaaaaaggggtacgcatgattccggtagacagcgaacattcagccgtatttcaatgcttatatggctgtaccgaccataagcaattaaaacggattatcttaacggcgtcgggaggacctttttttggtaagacaaaagaagagttggaacatgttaccgcaaaacaggcgctaaatcatccaaattggaatatgggagcaaaggttaccatagattccgcaaccatgatgaacaaagggttggagctgattgaagctgcatggctgttttcaatgcctatggagcaactggatgttgtggtacatcgtgaaagcatcattcattctttgattgagtatcaggacaattctgttcttgcacaattgggagttcctgatatgagaataccgattcagtacgcgattacgttcccgcaaagatatccttctccatgtaaacagcttgatttgactgaatgcgggcagttgtctttctataaaccggattatgatacatttcgttgtttaaatgcttgcagaaatgcatttatgcgcggcggcttaactccggctgcaaccaacggtgccaatgaggaggctgtaaaattatttttgcagggtcgcattgattttcttgccattggagacttagtaacacaggcgatggaacgtcaaaagcctgaaaaagtgacttgcattgaagatgtgctggaggctgacgcatcggctcgccgttttgtattagacaccataggttaacaaataaagaaggtgatttctattattgtcctactcattatcatagcgatattggcatttacatttgttgtgtttatccatgaattgggtcattttttgactgctaaatggtgcggtatacgtgtaaatgaatttgcgattggtatgggaccgcgcattataaagtgggggaagaaagaaacaaaatattccatacgcctgtttccgattggcggattctgtgcgatggagggtgaagactcaaaaagtgatgacgaacgtgcatttggcaataaagctgtgtggaagcgaatgattgttgtctgtgccggtgctgttatgaatattatactgggattcattttggcactggtattgtctgcacagcagcctgcgtttgcatctaacagaatcagtgtgtttgcagacagcgggtctgcgttgcaggacgcaggcgtacaagtaggcgaccagttttattctattgatggttatcgtattttcagtggtactgatttacaatttgcgcttgctacagccgacccgaatgcagtggatttggtggttctcagagatggcgaacaagtaagatttgatgatgtgaaattaaatacccgtgaaatagacggacaaatcagtcctgttttggattttaaagtctttcctattgagaaaaactttgcaaccaccattgccaatgcgggaaaagatacggtttccactgtacgtatggtttggtccagtttagcgggtattgtaacgggacggtttggatttaaccagctttccggacctgtcggtgtagccggagcgatttcacaagcagcgtctgcaggtttggaaaccagctttttgacagcgctgaataatattttaaatattatgatgattatcactgtaaacctgggtgttgtaaacttactgccattgcctgcactggacggcggacgtttgattttcctcattatcgaagcaattcgccgcaagcctatgaatccaaaatatgaagggtgggttcatgcggcaggatttgtatttctgatgtgctttatggtagtgattacctttggcgatatatcccgtttatttgggtggagttaaccttatataaaacagtatgaaagccaaccgaattttgtaatgaaatttggttggcttttttttcgcaaaaactattaaaatatcataacgacctagtaacaaatgaaaaataaatattgactgttatgaaaacgttgtaatgtttataagttagaaattgtcgtacaatttcttttatgttataacaatctagcaacagcgtcaaaactaaagttttggctgttgacaagaacgttttagcacttattggttaaaaattgcaaagcaattttttaaatgctataacaacctcaaaacagcgtcaaaattaaaaattttggctgttaagagaacgttataacgtttatgtgttagaaattgtttcccaatttcttttatgttataataacaaagaagataatattagaaaaggaagaggtgcttttatgaacaggcgttacagcaaaacgatatacgcaggtacgttggcgattggaggaaacgcaccaatcagcgtgcaatctatgttaaatgctgcggcagatgacattgcaggcaatgtagcacaggcaattgctttggagcaggcaggttgtcaaatggtgcgtgtcgcaattccaaataaaaatgcagttgccttgattcctgccataaaagaagccgttaccattcctttggttgcagacattcactttgattatagattggctctggaagctgtcgctgctggcattgataaaatcagaattaacccgggaaatatcggttccgacgaccgcgtcaaagctgtggcagaggtatgcagagagaagaatattcctattcgtatcggagtaaattcaggctccgttgaaaaagagattttgaaaaaatacgggggacccacaccgcaggctctgtgcgaaagcgccttgcatcatgcttctttactggaaaaatttgattttaccgatatcgtactttccattaaatcatccaatgtggataccatgataaaggcatatgaactaacggctcatcaatgtgagtatccgttgcatctgggtgtaacggaagcaggaaccgagcgcatggggttgattaaatcagcggtaggaatcggctcattgcttcagcgcggcattggcgataccattcgtgtttctttaacagccgacccggtcaaagaaattgctgcgggaaaagatatcttaaaagcgcttgatttggatagcacaggtcctcaaatgatttcctgcccaagctgcggcagaacaaaaattgatttaatcggtattgccaacgaagtagaacaacgtttgagagaatgtgataagcctttgaaagtagcggttatgggctgtgcggtaaatgggcccggcgaagcgaaagaggctgatattggaattgccggcggagacggtgtaggattaatatttaaaaaaggtgaagtgattaaaaaggtaccggaagatatcttgattgatacacttatggaagaaattttaaagatgtagaaggaacgggataatttgaaaaagattcgtacattttttcagccgtatattaatgtttccgaattatcggaaacaattgcggatggtgaaattcaaaaagtagaaattaatcagcaaatacggatgttgtccttgcaggtatcatttttagacttggtacagcgcaaggatttatttgcattggaaaaagcaatttggaaatctccgttggaactgcaaaaagttgagttgtttcctcattttccaaaagaacgtttttcagaagattatatcaatgagattttttgtgagctgaaacggcgcgatgccagtttgacgggatgttttaaagatgcgcaagtaacattacaagatgaaaaattaaacatcacattaatgcatggcggatttgaattgttaaaatcccgtcatgttgaccgttgcctgcaaaaattggtaatggacgaatttggaattccgctgacagtaagttttgacggtactcttaccattgaccacgaaagttctgtttacattgagagaaaaaaacagcaggaagaaaccatacagagagaacaagtggtagaacaggtggaacgctatgaagaatccatgcaggagcgtccgaatccaaaaacaacacagattcgtacaagcgagacgttaatgcctaccgttttacccaataccgcacgcgatatttacggaagacctgtaaaaggaaaaacgattgcaattggaaaggtaacgccggatgcaggcaatgttaccatttggggtgaaatctttgatttggaagaacgttttaccagagataagagcaaaaagatttactccattaaaattacggactatacaggttctatgaccttaaaaattatagatgatgttgccaattgccgtcctttggatatgctgaaaaaaggaagtgctattttaacacgtggtgaaattgaatacgataaatatgaccgtgaaattgtttgtcgtgcccgtggtattgctactgttgaattgctccaagtagtagaccaggcagaagaaaaacgtgtggaactgcatttgcataccaatatgtccagtatggatggtatcaatacagcaggcgatttaatcaaccgtgcttacaaatggggacaaccggccattgccattacggaccatggtgtagcacaggcatttccagatgcaatgaacgcggttaataaaatccgtaaaaacggcggtgaatttaaagtcatttacggagtggaagcctattttgtcaatgatatggttcctgctttgacaggtgaatcacggcgtagtttggacgatgaattcatttgttttgacgtagaaaccacaggtttaagtccaaatacggaccgcttaacggaaattggtgccgtgaaattaaaaaacggtgaaattattgacagttttaatacctttgtcaatccggagcagcatattcccgaaaaaattacccagttgacaggtatcacagatgatatggtaaaagatgcaccgtccgaagaagaagcggtacgtgctttttacgagttctgcggaacagatgcggttttggttgctcataacgcgaactttgacgcagcctttattcgtatggcggcacagcgtcatgatatgaaatttacctacccgtatatcgatacggttccaatgtgccgagccatgctgaaagacattaaaaactgtaaattggataccgttgcaaaatatttgaaattagacccatttaaccatcaccgtgccagcgatgacgcaacggttcttgcaaaaatactggccaatctgttagtacgcctgaaagaagatacgggcgcctccattgttcaagatattaacacatcgctgacagggggagacagcaaaaaaattcagcctgcacatcaaattattttggtgcagaatcaagtagggctgaaaaatctatatcgcttgatttccaaagcgcatttggaatatttttataagaatcctcgtattcccaaaagcgagctggtaaaatatcgtgagggcttgttgttgggaagcgcctgtgaatccggcgaattgttccgtgctatttttaacggacagccttgggaaaaactaaaagaaattgcaggcttttatgattatctggagattcagcccattggcaataatatgttcatggtggaagacggaaaagtccctgatgtagaggcgttgcgtgaatttaaccgaaccattgtaaaacttggagaggaaatgaataaaccggttgttgctacttgtgatgttcacttcctggacccgaaagatgcagactatcgcagaattctaatggctagcaaaggtttcggtgatgccgataaacaagcgcctttatacatgcgtacaacggcagaaatgctggaggaatttgcgtatttgggtaaagaaaaagcatatgaagtcgttgtcaccaacagccgaaaaattgcagatatggtggaagatgtcagcccgattccaccgggtgtgttcccgccgtttattgacggtgcggaagaagatttgattcgcattacatgggaaaaagcaaaagaaatctatggcgaccctgtgcctgaattggtcaaaaatcgtttggataaagaactcggttccattaccaaacatggtttctctgtgttgtatatgaccgcacaaaagttggtagcggattcagtggctcacggatatcaggtaggttcccgtggttctgtcggttcttcgtttgttgctaccatgtcaggtatttccgaggtaaatccactggaacctcattatgtctgtccaaagtgtaaatacagcgaatttattacagacggcagctatggttcaggatttgacctgcctgaaaaaaattgcccccattgcggtacattgttaaaccgtgacggacataccattccgtttgaaacgttccttggatttgacggcgataaaacgcctgatattgacctgaacttttcaggtgaatatcagagtgacgcacaccgttatacagaaacattattcggcaaagacaacgtgtttaaagcgggtaccattggcaccattgcggataaaacagctattggttacgtgaaaaaatactgtgaggaaaaaggcattaccatgcatcgtgcagaagaattgcgtttggctttgggatgtaccggtgtcaagcgtactacaggtcagcacccgggcggtatggttgttgtaccgagaggtatggaaatttacgatttttgtcctgtacagcgtcctgccaatgaccagaaatcggacaatattacaacccacttcgacttccattctatccatgataccatttgtaaactggatgagctgggacacgatgttcccaccatataccgctatttggaagactataccggtatatcggtgatggatgtttccatgagtgacccgcaggttatgtcgctgtttacttctacggaagcattgggagttactccggaagatattgactctgaaacaggtacgttttctttaccggaagttggtacaggctttgtgcgtcaaatgttgattgatgcacagccaaaaacattttccgatttacttcaggtttccggtttgtctcatggcacggatgtttggcttggcaatgcacaggacctgattaaaaataaagtatgtaccatttccgaggtaatcggtacccgtgacagtattatgacctatttgatgctaaaaggattagagcctaaaatggcatttaaaattatggagattacccgtaagggtaaagcctctacactgttaacagaagaacacatcaatgctatgaaagaacatgatgttcctcaatggtacattgattcttgtatgaaaattaaatacatgttcccaaaagctcacgcagctgcatatatgattgcaacgttgcgcttaggctggtacaaagtgcataaaccgctggagtactatgcagcttactttaccgtacgcggtgaagattttgacggcgctaccgttattttgggaaaagaagcggtaaaacgaaaaatgcaggaaattaccatgaaaggaaaagaagccaccaaaaaagaagaagatatgtatgcaaccttccagattgccaatgaaatgctggcacgcggaattgaggtactgcctgtagatttatacaaatccgatgcggttaaatatttggtggaggacggcaaaatccgtttgccgtttgcttccctttcgagtgttggagatgctgctgcacaaagccttgcagcagcaagagaaacaggcggagaatatatctccattgatgatttgcaggcccgttccaaagtttccaaaacagtgattgagatgctccagcaggctggtgcactaaaaggtttgcctgaaagtagccaaatgaccatgttctaaatttgaaatatttattcaattttatcatttacattcttatgctaacatgttattatattagcatactaaagtgataaagagaaataaaaccgaaatggtgggatgaaatcatgagaaaatatcataaaataactccagaaggaaccaaagatttactgtttgaagaatgtttaacgcatcgttacgtggaacgtactttggcagatgtgttttcttcccatggatttcatgaagtcataacaccgggactggaattttatgatgtatttgatacagagtcctcgggaatcgggcaggaagtcatgtataaaatgagtgataagagagggcgtttggtttgcatgcgtcccgattctaccatgcctattgccagattgacagcaaccaggctgcaaaatcttccaaaaccaatcaggttgtactatacccagcatatttattgcaacaatcctgggcttacaggccgcaatgatgaagtcatgcagtcaggcattgaattgttaggcgccagaggacgcagagcagacttggaggtattggcaactgccattgaagcactcagcagatgtgtgccgaatttccgaattgaactggggcatgcaggatttttcaaagccattgccgcccagctgcccattgacgatgcggtaagagaagatatccgccagtatattgaagcgaaaaactatgcggcacttgatatggtgctggaccaattgggagaaagcaagtcagtcaatgcaatgcgtcgtttgccgcgtttgtttggcggggaagaaattttaaaagaggcggcagaattctgtgttgaccatgcttctgttgaaacgctgtcttatttgcaggaactatacagcgccttaacagatttaggcattggcgaccatattatgatagatttaggtctggtacaaagaaccgactactatacagatattgtattcagtgcttatgtggaaggttgcggtgacgcggtattaacgggcggacgttatgataatctgcttgcaagctttgacgctcctatgccagccatcggttttgctatgaatgtggatgccattacggatattttaatcaataacggaaaaggcaagaaagcgcccaatgtagatgtattggtacattgtgatgacggttatgagatgaaagcattttgctatgcggccaacttggtgggagaaggaatgcgatgtgaaaacagcgtctttgcaaccagaaaagaatctttggattatgccaaagaaatgggaattccaagggtagattttgtaggcgaaaaaatagagactttaacaagataggcggtgaatcgacatgaagccattacgaattgctttgacaaaaggcagactggaacgagatacggttgcaatgtttgaacgcattggttttgattgtactgcagtacatgaaaaaggcagaaagttgattttgcctatcggagacaatcaatttgaggtggttcttgcaaaagcagccgatgtgattacgtatgtagagcatggcgtgtgcgatttgggtgtggtaggaaaagataccatcattgaaaacggcagcagtttttatgaagtattggatttggggttcggcaaatgcaaatttgcactggcagcgccaaaaggcatagacttttacagcggatacgcctcaaaaaccattgcgaccaaatatcccaacgttgcccgcagcttttttgaaggcaaaggcatggatgtaaaaattatcaaaatagaaggttctgtggaattggctccgctgttgggattgtcagatgccattattgatattgtggaaacaggttccacattgaaagaaaacggtttggaagtcatagaaaaagtgtgtgacatttctgcaagattgattgtaaatacagcaagcatgaagcttcgcaaacaggagattgatacattaatcaatcagatggaacaggcaaaggaggcaaaaaaatcatgattcaattggtagaaaaagatgaaaatacaactcgtacctatgtacagcagttaaaacaacgctgtgatgaaaaggacagaaaagtagacgctatcgtagccgatattttggaaaatgtacgcaacaacggagacaaagccgttgctgaatacactttaaagtttgacggcagcattccggagcaagtggaaattacaaaagaacaaatgaaagaactgaccaaacaatgcgatgcttattttttggaagcgttggagcgtgcggccaaaaatattcatgaattccacagtcgccaaaaacagcaaagctggctggatacaaaagacaacggtgttattttgggacagcgtgtacgcggccttgcaaaagtaggtatttatgtaccgggcggtactgcggcttatccttcttccgtattgatgaatgccattccggctaaaattgcaggcgtgcaggagattgtaatggtaacgcctcctggtaaagacggcaagccaaatccggacattatggcagctgctttggtagcgggtgttgaccgtgtctttttggttggcggtgcacaggcagttgcggctttggcatatggtaccgaaaccatgccaaaagtggacaaaattgttggcccgggaaatatttttgtagccactgcgaaaaaacacttatacggtacagtggatattgacatgattgcaggaccaagtgaaattttgattgtagcagatgaaacggcaaatccaaaatatttggctgcggatttgatgtctcaagcagaacacgacgtattggcttccgcaattctgctcaccacatcttccaaaattgcggaagaaaccattgcccaaatttatgagcaggtagagtgtttggagagaaaagatattatcaacaaatcattggatgacttcggcgcagtcattgtatgcgataccatggacgaagccattgaatttgcaaatgatttggctcccgaacacttggaggtttgcgttgcaaatccgctggaatatatcggccgtttggacaatgccggttctttgttccttggaaattattctcccgaaccgcttggagattattatgcaggtccaaatcacgttttgccaaccagcggaaccgcaagatttttctcgccgttgtccgttgacagctttgttaaaaaatccagcttcatttattacacacaagacgccctgaaagccgcaaaagatgatattgttgctttagcagaagcagaaggcttaacagcgcacgcaaattctatcaaagtacgttccgaatgataaaaaaaggggggaaacacgtgtcatacagtttaaatgaaaaaatcaaagatttaaaaccttatgaccccattcaaggggagtatcaaattcgtttggatgccaatgaatcttttttgtccgttccaaacgaaattttggagcaattccatacctctgtgaatcaaattgcttttaaccgttatcctgacccatatgccaatgcaaccattacagcatttggacgtcattacggtgtaaaaagcaatttagtgacagcaggaaacggctcggatgaattaattcaagtgataatgtctgcttttttaatgaaaagtgaccgtgttcttaccctttcacatgatttttccatgtatcgcttttatacttctattgtagaagcagagtgtattgaagttcctaaaaatgaggacttgaccataaatgtagataacgtcattgaaactgccaatgaaaagcaagtgcgtatgattattttttccaatccgtgcaatcccacttctttgggactttgcaaagatgaagtacgccgtctgattcgttctgtcaatgcccttgtaattttggacgaagcgtatatggatttttgggaccagtcgctgttacaggaagcagaatcctatgataatctgattattttacgtacatgttccaaagcgtttggtatggctgcggttcgcttgggatttgccgtagcgaatcaaacgctgaccaatgccattcgcgccgtgaaatctccgtataacgtaaatacggtgacacaggcattcggcgcggcggtgttaaatcaaaaagaactaacagacaaagccattattacgcttttatatgcaaaaaaagagctgttcgatgcgatgaaacagctggcacagcagtttccgaacagtttgtatttatatcacagttgcaccaactttgtatttgtgcgtacgccttatgcaaaggaattgtatgactatatgttggataacagcgttgccattcgttatatgggtgactatctgcgtattaccgcaggcagcccacaggaaaatgaaacggtagtgcggttatgcacacaattcttatcagagaaaggagcacattaacatgcggtcttctacgcaaaatcgtgtaacaaaagaaacggatattcatctttcgctgtgcttggacggcggtgatgtatctgttaatacgggaatcggttttttcgaccacatgttaaccgcatttgccgtacatggcggatttgggttacagttgcaagtgaagggtgatttgcatgtagactgccaccataccatagaagacacaggaattgtgctgggaaaagcctttcaggaagcattgcaggataaaggcggtattgctcgtttcggcagtttttatgttcctatggacgaagctttggcattttgttctttggacatcagcggcagaccgtttttagtatttcaagcagagtttgtccaggagcaggtaggaagttatgacagctgtatgacggaagaatttttccgtgcattggcaaccaatgcaggtattaccatgcatgtgaagctggaatacggaaaaaatacccaccattgtgttgaggcaatttataaagcagtggcgcatgccatgcgtttggcgtgtaaacaaaccggcggagaaatcctttctaccaaaggtgtactgtaatacagaaaggaaacgaacagaatgattatttttcctgcaattgatatcaaagacggtacttgtgttcgcttggtgaaaggggattatgcaactgcccataaagtggcggaaaatgcagtagagactgcaaaatcctttcaaaatgcaggcgcttcttggatacatatggtagatttggacggagcaaaggatgcaaagcctgtcaacagtagcttggtatttgacgtgcttgccaatacggacttaaaagtggaaatcggcggaggtatccgcaatatggaaaccattgcattttatttggagcaaggtgtttcccgtgtcattttgggttctgtggctcttcgcaatcctcagcttgtaaaagaagcagtagccgaatacggagacaaaattgctgttggaattgatgctttgcacggcaaagtagcggcagaaggttggatagaacaatcggaagtggattatattactttggccaaagagatggaagcggtaggggtaaagaccattatctttactgatatttcacgtgacggtacgttaacggggccaaatttggagatgcttgaccaattaaaccgtgctgtttcctgtaatatcattgcaagtggcggggtcagcaatttggatgatatttatcagctcaaagcgctgaacttatacggcactatttgcggtaaagcgctgtatacaggagatttgaatttattccaggccgtatccgcagcaagaggagaatctatatgagtgaaattttgacacaaagcggcgctgtattacagtccgattttctggactctttttttcaaaagggagagttgattcctgctattgtacaggaatcaggaagcaaagaagtgttgatgctggcgtatatgaatcgagaatcgctgcaaaagacgctggaaacgggttatacctggttttatagtcgttcccgtcaagagctttggaataaaggtgctacatcgggacatttgcaaaaaataatccgtatttatggagattgcgatgacgatacattgttggtagaagtggaacaaattggcgctgcttgccataccggttctcacacttgttttttcaatgagatttggaaacgataacatttataacacataaaagagggatatctatgagcaaccctatgaaagagttgtacgatactattattacgagaaaagacgcccacgcggaaggttcctataccaattacttatttgaaaaaggattggataaaattttaaaaaaatgcggcgaggaatgcagtgaagtaattattgccgcaaaaaataatgaccacaatgaattggtaatggaaatttcagatttgttatatcatttgacagttttgatggtacatcaaaatgtaacagtggaggatattaatgctgaactggaaaagcgcagcttaaagtccaacaacttgaagcaattccattctgtagataaaaatagttaaataaaagagagtatggcttgatagtgcttactctcttttgtttttgcatcacagtcggatattacaaacagtttgatagggggatatgtgaaaagagaacacagtaatctagcgctgtattagagttgaaaaagagtaaacaacaaatttatattctatctttgtgcctgtaaactaaattttaaggagaggtttagaaaagaaaaaataaagtaaaaattttaaacagatgtatctacaaccaaccttattgaagggttatgtggtagtattagacagagaaaaggcacaatatggaaggattatagattttatttttaattttgttaaagccgaatatataaaagcagttccattctgtagccaaaaacagttggtaaaaatgataaggacacattcgctttcatgccaatgtgtcctcgtttttgccatgtaatacagcttatggaacaaaattttatgttttgttacaaaaaatatatggaatattttattttagatgattgattagaaaggaaggtactgttttacatcacgtaaataaacataaaatatgctattgaaatttttgaaattcttttaaaaaccaaatatcttttacagtaaattctttttggtttaaatagtctaatatacctgcgggcgtttcaaaagaaaaacgcagcttataagaatatagtgcttgataacggaatggattggttttatttaatgcattggttccgtattttccgtcacctgccaaa

SEQ ID NO: 2888 - DNA, 2878 bp, Unknown
  16S sequences of unknown bacteria
ataagagacagcaccgggtggctgctatcagcgcggccagtctccgcttgcgggggactaagggagtatcctgtttcatttgctttgccatggaatatacctccgttcgttttactaccgctatcataaaacaacggacggtctgttccattggcaaaaataaatgaacatttctatgaaaattgtgatagtatcacaaggggggcagaagccatgacatcacagcacacagcggactatcccacactgcaggaggtgctgcgcctgcctgtgttcgcaggctgcacggtctgcggcggcgcggcgggacttggccgtagggtcagcggtgtcaatctgacggacacaccggactacgcgcgctggctggcgcagggagaactgctcatcaccactggttttgccatcgcagacgatccgcaggccgtggatgcgctgctgcccacggcggcagaaaaaggcctgtccggcgtgggtatcaagccggggcgctacctgcccagccccctgccggcggcgctggcggagaaggctgaccgactgggactgccgctgctccaactgccgaccgatatgcgctttgccgagttggccgatgcggtgtcccgcgagatcgcacggcggcgaataccggcggaacaggagcggcagctggccgtattactgcaccatctcatctctggcgcgccgctgagcgaagcgatggagcgtcaggcggcggagtccggtatccatttggaatgtccgcatatcctgatgtggatacaggctgatgcgccggagttgcagcggcgctcttggctgcacgaggtagaagagcgctaccgggcgttgggcgcggacatgtggggcgcactgtcggaggatggctttctgctggcgctggaggcggacgacctgttcgcgctggagatgccgctgcggcgggtgatggcggactttgccgccgaccacggcgttatctgcggcgtcagccgcccctacggcggtacggtgggttttcagaaagcagaccgcagtgcccgtgcggcgctccacatggcggcgcgaacggaaaccccctgcgtgacagacgacccagcgggggtggtacggctgctggaggaatcctccccggcggaaacggacgcctatatccatcggcagctgggaacgctcctgcggcagccagagccgcggcggcaagagctgctggacacgctggcgagctggctgcgctgtatgggcaaccagcgccggatggcgcgggagctgcacctgcactacaacaccgtgagttaccggctccagcagctatggttgctgctggaggccgatccggtcgatccgatgaagcgattggcattggaaacggccctgtatctgtaccggtacaggcgcacataaaggagtgactgatcatggataagagcaggacgggcggtgaatgggagcggatggtgtcggggcgtctctatacgcctaccgatccggagattgccaagcggcaccgggtgggtatgcgccgctgtgaccggttcaaccgcctcccgctgtggcgtaccaagaccaagcagcgtgcgctggagcgcctgatcccctccgcaaaagggaagaatttcgaggcgtttgcacccttttactgcgagtacggcgtgaatatctatgtggggcggaactgtttcatcaactacaacagcgtatttttggatgtagcgcccattacgctgggggacaatgtgctcattggactcaatgtgacgctggccacgcccaaccatccgtttatcgccgaagaacgagcctatacagattaccccaacggctgccatgcgttggagtatgccgaacccatcaccatcggggatcactgctggctgtgcgccggtgtgcggtggcgtgaccatcggagcgggaagcatcatcgccgccggcgcggtggtgacgcgtgacatcccacccaacagtatcgctgccggtgtacccgccagagtgctgcggcagatcgacgagcgcgaccgcctgcatgtatgggagaagtatgtgaagaacgaactgcccaatgcgcagcggtgacaacaaaacccgggagcaattacaaaaaccgtctcaaacgatatgtttgagacggtttttgtatgcggaaagttaggagaattgaaacctgatttgaccactactgcacattttgcgatccaactaaactattacgctatgtcatatctccagcatcccttgcagccccgcgctggcggcctttttgttcttgtcgaaggcgtgggtgtagatgtccagcgtggtggagggctggctgtggccgaggatgcccgccaccgtggccacatccgtgccgcccgcgatcatcagactggcggcggtgtgccggagggaatggacgttcagctcctgcggtaggccgttcttcttgaggatcagcttgaagcggtaggtgaaggtggtgggcgtcatggggagccgcgctccttgacggcggaacaggaaatcatcatcggtcagttgccgctggtcataggtttcagtgatataccggcattctttttgatactcccgcaggagactttccatctcggcggagaagtacacatagcggtcacctgcgcgggtcttgggttcttttacgaagatctcctcgtccgtcaccttgactgcgttgcggcagatgtggatggaacgctgctcccaatcaatgtcgcaccacttcagaccgcagcactcaccccgccgcattcctgtggcgatgatgagcttgaagtaggtttcgtacttgatgctctcgccctccagcgcggcgatgatcttctgcgccgtttcctcggccgcgatctttttttcacatttgcggccggcgtagcggtaggtgcgccacgccggattatgc

SEQ ID NO: 2889 - DNA, 25541 bp, Unknown
  16S sequences of unknown bacteria
acaccccacttgttattcagtataccatactgtctaacaaatggggtgctgttcaccggcgcgggcctttcttttttgcccgcggcgcgggacaaatcccacgaaaaacccaatttttaacgcaaaacccgggaaaagagttgacaggggagggactggcctgtataataaataagaatgttcccgtgtcgaaacgcacgggagcgtattttccgcgcaaggaggtgccacagcatgcgtgttaagatcaccctggcctgcagcgagtgcaagcagcgcaactacgataccaagaagaacaagcgcaacgatcccgatcgcctggagatgaacaagtactgccgcttctgcaagaagcacacgctccacaaggaaacccgctaggacttgtccacaaaaggagtattgaacgctatggctgaaaagaaagcggtcgcaaagaccacggacaagaaggcggcagccaagaagtccgattccggcaagaagcggttcaacttggtcaagacgttcaaggacatgtgggcggagctgaagaaggtcacctggccttcccgcaaggacctgatccgccagtccaccgtcgtgatcgtgttcgtgctgattctcaccgtcgtcgtcggcctgatggactacgtgctgtccaacctgctcaggctgatcatttcctgatgaccgcgcccggcgcggcagtagcaagatcccattcattcacacggaggggcccaatccgggctgtaagacgcgatgcctgaggaagaaaagctcgactggtatgtggtgcacacctattccggttacgaaaacaaagtcatggactccttgcgaaagaccgtggaaaaccgcaacctccaggacaagatcgaccgggtcgaagtgccggtggaggaagtcatccagatcaaggacggcaagcggcatacggttcagcgcaagctgtttcccggatacgtgctcgtgcacatggccatgaacaacgatttgtggtacatcgtgcgaaacacccgcggctgcaccggctttgtcggcccgcagtccaaacccgtacccctttccgacgaggaggccgccgccatgctcaacgccggcgggaccaagatcgtcaacgtcgacttcgaagtcggctgcaaggtcgccctcctgtccggttcctttgagaacttcacgggcaccatcgtcgagatcgacgaggaaaaccagaagctcaaggtctccgtgccgctctttggccgcgacaccgtcgtggacgtcgactacgagagcgcgcgcaaggtcatggacgaggacgaataggcgcaaagctacgcgcccaccaaacacgcaaacaggcggcccccgcattgagttgcggacaaggccttgagcgcgccaagactgcgcgcgtgggaggaagagacacctttccgctaaaccacacgataacctttggaggtgtaccaattttatggctaagaaagttgctgcgatcgtcaagctgcaggtcaacgccggcaaggcgaccccccagccccccatcggcccggcgctgggtcagcacggcgtcaacatcatgggcttctgcaaggagttcaacgagcgcaccgccaagcaggcgggctacgtcatccccgtggtcatcacggtctactccgaccgctccttcaccttcatcaccaagaccccgcccgtcccggtcctgatcaagaaggccgccggcatcgagtccggctccgcccgccccaaccgcgacaaggtggctaagctcacccgcgaccaggtccgcgagatcgcgaccaccaagatgcccgacctcaacgccggctccatcgaggcggccatgagcatggtcgccggcaccgcgcgctccatgggcgtcaccatcgaggactaaagggttgaaggaggtcatttaagccatgaagcatggaaagaagtatcaggacagcgcaaagctgatccagcagaataactacgagccggacgaggccatcgcgctcgcgctgcagaccgccaaggccaagttcgacgagacggtcgaggtctccgtccgcctgggcgtcgacccccgccacgccgaccagcaggtccgcggcaccgtggtcctgcccaacggcaccggtaagacggtgcgcgtcctcgtcttcgccaagggcgacaatgcccgcatcgccgaggagaacggcgcggattacgtcggcgccgaggagctcatcgccaagatccagaacgagaactggttcgagttcgacgtctgcgtcgcgaccccggacatgatgggcctggtcggccgcatcggccgcgtcctgggccccaagggcctcatgccgaaccccaagagcggcaccgtcaccccggatgtggccaaggccatcgcggatatcaaggccggtaaggtcgagtaccgcgtggataagaccgccatcgtgcacgtgcccttcggcaaggtctccttcggcgccgagaagctcagcgagaacttccgcgtgctgatggacgccatcctcaaggccaagcccaccgcggccaagggcacctacgtccgctccgtggtcgtctccaccaccatgggcccgggcgtcaagatcaaccccacccgctttgtcggcggcccggctgcggccaagtaaggcgcaaaaaagaggaattttcccatctcccgttgaactttcaacgggagatttttttgtgggaaagggggcggacgcgtgatccgctgcatcctctttgacgtggacgatacgctcatggactaccacgaggccgagaccgcgatctttcgccggctctttgcagagcagggccgcgccatcgacgcgccggcgctggacgacctctgggaaaagtcctggctctactggaacgggcgcggcctggaccggcccgggcgcgaggacgtgcggcagacttaccacgagcgcagccgccaggccgtcgaagacctgtgcgcctacgcccgggagaagtacggcctggccgcgtccccggcggcgctcggccgccggtttgccgcgctcatggccgaggccgtcacgctctacgacgacgcgctgcccgcgctgcgcgccctgcacggccggtttgcgctctgcgcggcctccaacgccctgaccgagagccagcgcccccgcctgcggagcctggagggcctgctcgaccacgtcttcctctccgaggagatgggcctggtcaagcccgaccccgccttcttcgcccatgccgcccgcgccgcgggcgcgcgccccgacgagtgcctcatggtcggggattcgctcgtcagcgacatcgccggggccgcctcggccggcatgcacacctgctggctcaaccgcgccggccgcgcagcctccggcgggaccctgccggagagcgagatccgctcgctgcgcgagctcgtcaacctgccccttctttcggattccaaaaaacggaggaacctgccatgatcgtctatgaagtgcccggaaagcagcacaccgcggaaaccctgcgcctggccgccgagcgcgcccgcgccgcagacgtccacctcgtcgtcgcctccaccgccggggatacggcccttgccgccctggacgcggccgaggcggccggcatcttcgacaagctcgtcatcgtcggctccgtgccggacaagggtgtgcagaagatgcgcccggaggtccgggaggccctggcgcgcaagggcgtgcccctggtgctggccagccacgtcctctccggcgcggagcgcggcctgtccacgaagatgggcggcatctacccggtcgagatcatcgcgcacacgctgcgcatgctctcccagggcgtcaaggtctgcctggagtgcagcgtcatggccctggacgccggggccatcccctacggggagaaggtcgtcgccgtcggcggaacgggccacggcgcagacaccgcctgcacgctcacgcccgccggcgcaaacgcggtgctggattgtaaaattcacgagattctctgcaaaccctcttgacgcgggcggggaaacccgctatactatcaagcgttgtgagaattctctcgtgcgcctaagacagcgagtgctcccgacgggagctcaaagggaaatccgctcgccgaggacatgatggagcgctgaaaaatacgcggcaatgcgtttttgtgtgccctcgtgccttccaccaggcgcgagggctttctttcatccgactgccggtcccccttcggcttgggtccggcggaaaaggaaagtgaggtggaaagaaccatgtccaagaactacgagagcaaggctgtcctgatcgaggagatcaagaccctggtggatacctgccagtctgctgtgctcgtggactaccgcggcctgaccgtggaggaggacaccgccctgcgcaagaagctccgcgaggccggcgtcacctacaaggtgctcaagaacacctacatcaagcgcgccgtggacgagctgaacgtcacgggccttgacgagcatctcaacggccccaccgccgtcgccttcggcatgaccgatcccgcggcgcccgcgaagatcctcaaggagttcatcgcggacaagaagaagatgaccgtcaagtgcggcatcgtcgacaagcaggtcatcgacgtcaagggcgtcgaggcgctggccgacctgcccagccgcgaggtcctcatcgccaagatgctgggcagcatgaacgcgcccatcaccggacttgtctccgtgctcggcggcacggtccgcaagctgctctacgcgctcaacgccgtggccgacgccaagggcgagaccgctgcgtaatccccgaaaaccacgcatgatattgaatggaggaaaaaaacaatgacccgtgaagaaatgatttccgcgattgagtccatgacggttctcgagctcaacgagctcgtcaaggccctggaggagaagttcggcgtttccgccgccgctcccgttgctgttgccgctgctcccgccgccggcgctgccgctgctcccgccgctgaggagaagaccgagttcgacgtcatcctgaaggaagctggcgccgagaagatcaaggtcatcaaggtcgtccgcgaggtcgtctccggcctgggcctgaaggaagccaaggagatcgtcgatggcgctcccaagaccctcaaggagggcgtctccaaggacgaggccgagaagatcaaggccaagttcgccgaggttggcgcgaccgtcgagatcaagtaatctcgcctgcccaaattcttgggaagacaatgggggagcagtgcggcttttgctgcgctgctccccttttttgcgcataaggagggaaaaaccatgatcgaagagatgtccgccttcttcgccgcgcgcgtggagggctatgacgagcacatgctgaccgacgtcgtgggctgccgcgaggggtacgcgcgcctggcccaggccctgcccgcggacgcgcgcgacgtgctggacctgggctgcggcacgggcctcgagctggacgccctctttgcccggttcccggacctgcgcgtcacgggcatcgacatgacggaggagatgctccgcgccctgcgcgaaaagcacccgcacaaggcgctgcgcctgatccggggcgactacttcgcctgcgactttggccgcggggcctttgacgcggtcgtttcgtttgagtcgctgcaccactttccccgggcgcagaagctcggcctctaccgccgcgtcttcgcggccctgcggcccggcggcgcgttctgcaacggcgactacatggtcgagaccgaggcagaggaggaagccctcgcccgcgaggccgcgcgcctgcgcgccgaggcgcgcgtgccggagggcgtcttcgtccacctggacacgccgcttgccatcgcggccgaggaggcgctgctgcgccaggccggattctccaacgtcgagcgcctgctgcgcgaggggaacaccacgctcctgcgcgcggagcgggattgacttttgcaccccgttatgctacattcagaaggaaccgggatgcgcgcaaagccgcgcatcccggcgaataaacaagggggatcacagaaaatggcacagaattccggttttctgctcgacgtctccgcgggctacttccgcaatgcgggcgtagacgtgatggcgtttgacgacatctaccccgccgggcaccagtccggcgtgagcatcctcatgcacggcaaccgcgtcgccacaaacggcgacatccgctttgagcagacgcccggccagtggcagcccctgcccaagcagggcgagcgcaagctctccgaggcggagaactccatcaccacccgcctgcactacccggatatggacaatcatctccaggggttcaaccccatgatctaccccgactgcgtgctggactacgaggtcaaggtgcgcggctgcggggacgcggtcgtggtgacggtggacctggacgcgcccatcccggaggcgtttgccggcaaggtcttcttcaacatggagctcttcccggggacgctgttcggcaagccctggctcctggacggccagcagggcgtcttcccgcgccagcccaacgcgccgacgaagaagcagacgcccaactgcgagatcggggagcgcctggcgcccctgccggacgccctggccgaccgcgaccacctcgaggcgcgggacaagggctacagccccatcgtcgccgacgacctcgtcgccctgccctatgcccagggccgccgcttcacctgccggccggacgacccctacaaccgcttcaccatcgagagcaagaccggcgacatcgccctctacgacggccgcatgaaccacaacaacggctggttcgtcctgagcacgcaggtgcccgccggcgcgaccaagggcgcgatcgagtgggtcatcacgcccaacgtggtcgcggactgggtctacgcgcccgtcgtgcaggtctcccaggtcggctaccaccccgcccagaaaaaggtcgccatctgcgagctcgaccgccgcgacaacagcgagggccaggccgtgctcctgcgcctgggcgagacgggcgaggaaatggtcaagaccctggagcccaagaagtggggcaagttcctgcgctacaactacctgcgctttgactttacggacgtgacggccccgggcctgtacaaggtccgctacggcgcgagcgagtcctccctgttccgcatcgcggaggacgtctacgaccgcggcgtctggcagccggtgctggagtacttcctgcccgtgcagatgtgccacatgcgcgtcaacgagaagtaccgcgtctggcacgaccactgccacgcggacgacgcgcgcatggcgcccacgagcctgaatcacatcgacggctattcgcagggcccgtccacgctctgcaagtacaagagcggcgacgccgtaccgggcctcgactgcggcggctggcacgacgccggcgacttcgatctgcgcgtcgagtcccaggcgggcgagagctacatcctggcgctggcctatgagtgcttcggcgtcgattgggacgagacgaccatcgaccagaagaaccacctggtcgagatccaccagccggacggcaagaacgacatcctgcagcaggtggagcacggcctgctctcggtcgtgggcgcgtacaaggcgctcggccgcctctaccgcggcatcatcgcaaacggcttgcggcagtacgtgctgttgggcgaccccgcggccatgaccgacggcgttcccggcaacgaggacgaccgctgggtcttcaccgaggacaatcccccgcgcgagctgaccaccgccgcgcagctggccgcctgcgcccgcgtgctccgcaatttcaacgacggcctttccgcggacgccctgtccgctgcgcgcgagctctacgaccgcacggaggtccgggacgaggccgcccgccgcgccaaggtccacgccgcgtgcgagctcctgctgaccgcgggcgaggagaagtaccgcgccttcctgctggagaatgcggacttcatcgcgcagaacgccaagacgctcggctggatcgcctgccgcgcggtcaaggccgtgaacgacgacgcctttgccgcgacgctgcgccgcgccatggtcgacctcaagaaggagatggacgacctgagcgccgagacgccttatggcatcccctaccggccgcacatctggggcgcgggctgggacatccagcgcctgggcttccagcactacttcctgcaccaggccttcccggacatcttcggggcggacatgatcctggacgcgctgaacttcgtgctgggctgccaccccggcagcaacacggcctcctttgcctcgggcgtgggcacgcgctcggcgaccacggcctacggcatcaaccgcgcggactggtcctacacccccggcggcgtggtctccggcacggcgctgatccggccggacttcccggagctactcgagttccccttcctctggcagcagacggagtacgtgctcggcggcggttcctcgcactacatgttcctggtcctggccgcacagcagctgctgaagaagtaaagagagacgacaagcggggcgcgcccatcccttcgggcgcgccccatttttttcgacggaaattgcaggaaatgccgccgaaggatacaacttggaaatatctctgccgtatactggagacaactgagcgcacggaggggaagaccatgtccgaaaaacaacttttgatcgtggaagatgaaaagcccattgcagatatcttggcctatggctttcggcgggagggctttgccgtgcgctgcgcctacaccggcgccgagggcctgcgcatggccgaggaggagcggccggacctggtgctgctggactggatgctgccggacctgagcggcgtggacgtgtgccggatgctgacggagacctacaacgtgcccatcgtcatgctcaccgcgcgcagcagcgtggacgacaagctcctgggcctggagaccggcgcggacgactacatcaccaagccctttgacctgcgcgaggtcgtgggccgcgtccgcgcgatcctgcgccgctttgacaagaccggccgcgacgcgcccgcgcccgaggccctgctgcgcagcgggcggctgaccatctccgagcgggagtgggccgtgctgctggacggcgagcgcgtgagcctgacgcccaaggagttcgagctgctcgtcttcttcgtgcggcacccgcgccaggtcttctcgcgcgaccagctgctcagccacgtctggggctacgacttcgagggcgacagccgcaccgtggacatccacgtccagcgcctgcgcaagaagctggacctgggcgggcagctgctcacggtctttggcgtgggctataagtatgcgccgcgcgcctaaagcggggcgcgcagccgctggcgcggacgccccccgccggcggctgcgcggcggcatccgcttccggctgacggtggggctgctggcgctggccgcggtcggctgcgtgctgctctacgccctggccatgaaccagctcgaccgcagcgtcgaggcgagcgtcaccgaggacctgacgagcctgcagagcaacaccgccgtctacgtgcgccagtccctcatgctcgaggagcgcaacaacgacgaggagagcttccgctccgcggccaagtccatcgccgaggagctctacgccacaaaccggcggccgctgacgctctactccctctccggcgagcgcctgctgcgcctgggcgacgcggggacggcgggcagccccgccggcgcgcccgaggggcagcagcaggaccccgccttccagagcgcgctggagggcagcgccgcctacagcctgcactacggcgaggaccgcaccctcacggcgaacttcgtcatgcccgtgaccgtcgcgggggagacgatcggcatcatcggctactccctggactatacctcgctctaccgcaggtttgaccagctcgcgcacacgctgctgctgggcacgatggccgtgctgctgctcatctgcggcgtggtgctgctctacctcaaccacatcctcaaccccatccgccgcctgagcgccctgtccacgcgcgtcgccgcgcagatgcgaaagggcgccgtgcccgcgccggaggagggcgcaaagcccgcccgcggccgccacgcccggaagcggcgccgcgccgcggtcccccgggacgaggtctccgagctctcgcagaactacgacaccatgctgcgcaccgtgggcgagcagttcacccgcatccaggaggaccgcgtgcgcatcctccagctcctggacagccgccaggccttctacaacaacgtcacccacgagctcaagaccccgctgaccaccatccagggctatgcccagctcctggagcaggcgggcgcggcggacggggagctcttctcccgcggccttgcgcacatccagcacgagagcgcgcgcctgcaccgcatggtcattcagctgctggagatgagcgacatcgaccgcgggggcagcctggagcccatggacgcggcggcggtgctgcgcagcgtcgcgcagtccatggccttgaaggccgtgcgctacggctgcgccatccgctttgacggcgaggagagcctgcccatcctcggccgggaggagcgcgtgcgccagctctgcatcaacctgatcgacaacgccatcaagtacggcgcgccgggggagaccatctgggccgtggccgaccacagcggcagccgcgccagcctgcgcgtgatcaaccggggcgagggctttacggacgaggaggccgagcgcctgtttgagcccttctaccgcgtggacaaggagcactcccgcgagatgggcagcgcgggcctgggcctgtccatctgcaagaagatcgtcgaggagcacggcggcgccatccgcgcccgcagccgcgggggctacacggtctttgaggtccgccttccgctcgacaaggcgaaatgggaaggaggtgccccagcgtgaagacgcgcatccgcttcgccgcgctgctgctcggcctggcgctctgcgccacgggctgctcgtccatcgggctgcgggaccgcacgatcgtcctgcccacgcccgagccggccctcaccctgacggacgacgccgcagccgaggccttcaccgtgcagaacatcgaccagttcgccttccagacggactgcctgagccccggcggaacccgcacgcccatcggctttgcggaaggggacctctacatcgtctccggcgcgccgggccaggacctgtgcctcaagcgcgtggacccgcgctacggcttctacgaggaggccgcggacctgggcgcgatcgactacaacgacatccgcctctcgccggacggccgctacctgctctacgacgagacggaccgcgaaaacggagtcatttccctgcgcctcttcgacgtcgaggcggggaagagccgcctcgtctacacctgcccctgggcgagctcgctgctccggctcgactactgcttctccggcgacggggagtccttcttctgctggctgacctataacgacaacacccgcatctgggacgcggattacgagtggttcggcggcatccccacgatggacgaggacatggaccgcgtctttgggcagatcggcgcggaaaacctgccgctcaatgaggtgctgcgcggcgcgtgccgggagggcgaggccgagacgtacttcacactcgagacgatggaggagacgcccgactacgcctacggcgtggtgggggacttgggggccgcctaccagaaggaggtcctcgtctccgcggatgggtcgcgcatggccatcacctcctacacgcccgaatacggccgcacctgccgcatcgtggaggacggcgcggaggacgccgcggagagcgagcgctacaccgcgctgctgcaggacgggggcgagctcctgcagatcacgccggacgcggtgctgggcacctgcgtccgggacggggactacctgcccttcctcggccgggggaccggcagcgtcgtctactggacggagctgtcgctggcaaacgccaacctcatcgacctgcgcctggcgcctgatggcgcccacatcctgaccgcggagtacggcgccaacggcgaatgcgtcgtctgcctttacccgctggacgcggggcggcagcccatgcaggccagccggcgcgtgctctaccagagcctgcaggagtatgcggacctgctggtgacgccggagcaggaccgggtggtcgtcctgtcccacagctatctgctggccgaaagcgaggtcgcggaggcgtactccggggacaagtacgcgcccacgccccgcgcctccgacgcgtctgcgctgcgcgcctcgttcatcgcgacggtgctggagatgtgagaaatcggggccgcgcccaaacgggcgcggccccgattttgtgagctgaagcgcgaatttgcaacaattcggatacaagcgcgcgatgcgtcggatacaaccgcctgctaccatgaagagcgtggaaggaaaaacagaaagagaaaggggagggccgtgtgaccacgctccgcatccgcgcatccgccattgaacacaacctttgcgccattcgccagaggacgagcgcccgcatcatcgccgtcgtcaaggaggacggctacgggctgggcctgggcaacgcccgcgccgcctgcctgccgtgcggggtggacttcttcgccgtgggcaccgcgcaggaggccctgcgcctgaaggagatgggcggggaggaggtcctcctgctcacgcccgagctctgcccggaggcgctggaggtgctcatccgccgccgcgtcctgttcatggtcggctccgcgccgcaggccgaggccctgcgctgcgcgggcgggcgcgcggggatggcgccccgcgtgcatctgaaggtggatacgggccttgggcgctacggctaccggtgggatgcgctggcggacgtgccccgcgaccttgcgggcctgcgcctggagggcacctacacccactttgccacgcagacgcgcgactacgtccgcgtatgccgccgccaggccgcgcgctttgcccgcgcgctggacgagctgcggggcatggggatcgacccgggcctcacccacgcctgcgccagccgcgccttctgcgccctgggggacctggggtatggcgcggtgcgcctgggctcggcgctgctgggccgctgcacgggcccgctgcgcgccgccttccagaacgccgcctacctggaggcgccggtctaccaggtgcggctccaccggcggggcgacgtcgtggggtacgacgcgcgctgccgcctcgcgcgggatacgctggtgggccttgtgcgcgtgggccacgcggacggcgcgttcctctccggcgcggcggagccgcagggcgtggtccatgccctggcccgctgcgcgcgccgcgccctcttccccgcgcagagcccgatctccgccggcgggcgacccgtgccgctgctggggagcgtgggcatgaaccacctgctcgtggacctgacggacgcgcccgagcgagaggccatccgcatcgacgtcagccccctgctcgtccggcgggagatcccgcgccggctcatcgccggggacgcggtctgagaaaaaacaatccgcccccgggctcagctcgtctgcaatccgcatcggcggcgtgtgcgccgccgaaaccctgaaccgccgctggcggttcgggacgaagccggagggggcgcatcagcaccccctccggccgagcgttttgagtccggagggcgaaaataagccagcttttccccgggcagccgaaaggcggcacggggcgaagtgagcgaaggcccgctttccggtttgccaacgcgcgaaaacgccccctgggctccgtttgtcgaacccgggggcggattttgcgcgcgttttacgcggcaaagggcacggcgcagaccaggcgctccggcccggaggcggcgccatccgccgcgcccgcctcgtagacgaaggcccagccgcccgcaaaggagaggcggagctgctcgacataggccgcgtagtagacgccgtcctccgactggtgcgccaggatgaaggcctcctcgcccgcggcctgcacctcgtcatagtcgtagaaggagtagacggactgcacctccagcaggctgacgggctcctcgtccatgaggaaggtgatcaccgccgcgcccaggtccatgtccatgcgcaggaccgcgcgcaggtccgcgtcgcccgccgaatagacgtaggtctgctccggaatctccccggaaacggagcactgcgcctggggcaggccggcgggcgcataggtctccgcgtcggccagcggcgcttccccggagaacggctccaccgtgcgcgcggccaggtccagcgcatagccctgcgcgccctgctcgtcctgctccgcctccagcgcgtagaagtaatagacgccgtcggcgacaaagcactgcgtcagcagctggttcgacaggtcgacgccctcgatctcctgcacgctccccgccgcaagatccaccagcagcagcggacggtccgcgcgcatccccacgcagaccagctgcgtttcgctcacaaagagcaggttgctgacgctttccgccaggggctgcgcgttctcgccctgcgcatccgcgaggaagaggtcgtacacgcccgcgtccgagtcgtgggagaacatccaggcgggcagctccgcggcgagcgcctgctcctgcgcataggtcaggcgcttgatccacagcaggcgcccgtcctctaatttatacaggcccaggtactgccggctttcccccgcgtccacgaccgtgtcctgctcgccctcccggcggtgcaggccgtcgttgcccacgtagaagagccgctccccgtcccagagcgcccaggggtccggcgcgctggactcggcggcggcctcgaccgtcggggccggcggcgcggtgccgtcctcgggcgcgggggccgcgggcgtcgcggccggctcctccggcgcggtgccggccgcgcagcccgtcagcatcgccagggccagcatgagaatcaaaaatcgcttcattcgcttcatcgtcttccatctcctagcgtttccatacattctaccaaagaaggtaacgaaatcgcccggccggacgctccaggtcgggcgcgatttttggagaaaaaattttttcattcgccgtttgtatccaaaagaagaatggaaaagaatagaatataggtattggacaggcaggaggattgtccgtatcatggagaaaagcaacccccccgcccagcggggatgaacagccccagattgtgcggacagtagaaaaagcccctggtaggaaatattgagttttagtaggagaggcgtcgcgccagcggcgcctctccagtcttaaactggatgcgctcgtaattgtaaaagtggatatatcggtcaatcatctcgttggcctcagagaaagtggttggcttatgtcgggaaatacactctgttttcaggatggagaagaaattttcggccatggcattgtcatacgggtttccccgtcttgacatggaaggcgtaatgccgtattgtttagtcagctggaaatatgcttgggatgttgtattgaaagccctggtcgctgtggagctgcaactctgcagcgatcctctttttctctttcctcatggcaaaacgaatggtgtccagcaccagattcaccgtctgctgtgttccagtcttgtgggccgcgatacggttatcgtagaggtcacggatcatggacaaatacagcacaccttgcttcgtttggatgtaagaaagatctgttacccatttgctgttgggcctgtctgcgtgaaactccctgttgagtagattttgatatttatgtacttgctgtcccagattcttcctcttccgctctctccgaatttcagataaaggaccgtattttttcatgaccttaaggacagttttcgggttgtggtgaacgccttgccgttctaaccacaggtgcatccggtcctggataccccaaagaatgtgcacatgacggataccggatatgcgtcctgatgacgatagattacttgatacttgaccttcggcctcacttccttcccatgagcgtaataaaatcccccttgatgtagtcttattttcctacatcagggggattttgtctactgtccgttttttctggtccggttcaaaaggcggcacggggcgaaggcgaagggagcgcgtccgcgctcctgtaggccgagcgtttgggccgaaggcccgataagccggccgcccccccgggccgccaacggcggcacggggcgaaggcgaagggggcgcgtccgcgctcctgtaggccgagcgtttgggccaaaggcccaataagccggccgaaaccccgggccgccaacggcggcacggggcgaagccgctcggtgcggacggcgcctgtttttttgaaaatccgagggaaaaatttctaagggaaaacctgttcgatctgcattgcatcttccctgcgcgcgtggtacaatagagacgaatgaagggattatgtgttcgtctatattccgctgcgaaggggaggtgcgctcatggagcagagggcgtatgccgccatagacctgaagtccttctatgcttcggtggagtgcgtggagcggggtctggacccgatggacacgcacctggtcgtcgcggacgaggagcggacggacaagaccatctgccttgcggtcacgccgccgctcaaggcgcagggcgtgcccgggcggccgcggctctttgaggtgcgggagcgggtgcgcgcgatcaacgcgcagcgcctggcccgcgcgcgggcgaagacctttgcgggcgaaacgcaccgcgcggaggagctggccgcgcatccggactgggcgctgcgcttcctcgtcgcgcggccgcgcatggcgctctatctggactacagcgcgcgcgtctacgccgtctacctgcgctttgtcgcgccggaggacgtccacgtctactcggtggacgaggtgttcgtggacctgacgccctacctgcgcctgtacggctgcacggcgcgggagctgaccagccgcatgatccgcgcggtctaccgggagacgggcctgtccgccgcggcgggcatcgggacgaatctctacctctgcaaggtcgccatggacatcagcgccaagcgcgcccggcccgacgcggacggcgtgcgcatcgcggagctggacccggtgcgctaccggcaggagctctgggaccacgagccgatcacggatttctggcgcgtgggccgcgggtatgcgaacaagctgcgcgccaacggcctgcacaccatgggggacgtggcgcgctgctccctgggcgggccgggggacgtgcacaacgcggagctgctctaccgcctcttcggcgtcaacgcggagctgctcatcgaccatgcctggggcgaggagtcctgcaccatgcaggacatcaaggcctaccgggcggaggagaagagcatgggctccggccaggtcctctcccgcccctacgcccacggcgaggcggcgctcgtcctgcaggagatggccgaggccctggcgctggaccttacggcgcacggccttgcggccgggcagatcgtgctcagcgtcggctacgaccgggagagcctgcgcctgggctacagcgggcgcacccgcgcggacgcctatggccggcgcgtgcccgagggcgcgcacggcagcctcgacctcggcgggcagacggcctcctgccggcgcatcgtagaggcggctgcggcgctctttgcgcgcatcgcggacccggcgctgctcgtgcggcggctcaacctcaccgcctgccgcatcggccccgccgatcaagcgggcaggagcgtccagctcagcttcttcgacggggaggacgccgcccgccgcgcggccgagcgcagggaggagcgccgccagcgcgcggtgctcgccatccgggaaaagtacggcggaaacgccatcttccgcggcgcggacctgctcgaaggggcaaccggcctttcccgcaacgcgcagatcggggggcatcgggcatgagcgggcgctacgacgacatcctgcgccgggagcggccgcagatcccggggcatccggccatgccgcgggccgcgcgcgcggcgcagttcgcgccctttgcggcgctgacggggtacggcgcggtcgtggccgaggtcaaccggcagaccgagccgcgcgcggacctggccgaggacgcgcaggccgccctgcaggaaacgctgcgccgcctggccgcgcgcgcggacgagcacccgcgccttgccgcgacctacttcgtgcccgacgcgcgaaagagcgggggcgcctatgtcacggccgtgggcgcgctgcgccgcatcgacgaatgcgcgcgggccctggtgctcgagggcggcgcgcacatccccctggacgatctcttcgaccttgcactgctttagagcgggacggaaaccaggcggtccccaaaaacaggcagcgcagcccgggaggctgcgccgcttttgccgcgaacgatttcgtgcccagcgcgcgaaagagcggggcgcctatgtcacggccgtgggcgcgctgcgccgcatcgacgagagcaggcgggtcctggtgctcgagggcggcgcgcatccccctggacgacctcttgacctcgcgctgctttagagcggagcggaaaccaggcggtcccaaaaaacaggcggcgcagcccgggaggctgcgccgcttttgccgcgaacgattttgtgcccggcgtgcgaaacggggccttgcgctgctttagagcgggacggcgagcagatcgcgcaggctgtccaggaacaggcgcgcggcccgggagaagacctggtacttcttccagaccaggcaggcctcggccacgagccccggggacagcgggcggaagcacaggctgctgccctgcgtgttgaggagcttgtccagcgtcacggcgtagcccagcccctcgtccaccaggagcgaggcgttgtagagcaggttgtaggtcgcaacgacgtggagctgcgagggctcgcactggaaccagcggctcagccggaggtcctcgttccgctggtgggagaggatcaggggcttgtcccacaggtcctccggggtgatggcctccttttctgccaggggcgaatcccggcgcatgagcacgccccaggtgtccgggtaggggatggtgaagaagtcgtaccgcttgggatccgcgccgccgaagatcaggccgaagtcgaacaggcccttgtccagggtctccagcacgtactccgcgtttccgctggagatgtggtagcggatgtccggatagcgctcctgcagggaccgcgcggcccgcgcgaggtagcggacgatgtcgctctcgcccgcgccgatgtagacgtcgcccacgaccgcctcgtccgagcgggtgatctcgtcctccgtgcgctgcacgagggagaggatctcctcggcgcgcttgcgcaggatcatgccctcctccgtcaggagcaccttgcgcgagccctttgtgccccggatgagcagctgcttgcccagctcctcctccagagcgcgcagctgcgtggagagcgtcggctgggacaggtgcagggactccgccgccgcggagatgttctgctcccgcgcaaccgcgaggaagtattgaagcacgcgcagttccaatgccaaaacccctttccgccttccgcgcgcggcgcaaggcgagcgttttttttcattgtaccacagcgcagcgccggacgccgcattttttttgcaaaaaaacgccgcgcgccgctctggctaaaaaaagcggacggcccggacgccctggggagaccagagcgtccgggccgtccgctgcgcggcggctcagggccgcaggcgcagcgtcttgacctcaaagggatggaagtgcaggtgaagcgcgcccgcggaaaggtcgaggtcctcgaccgggttctcgagcatgtcgcagacctgcgccgaggagacgggcaggcgcagcgcgagctcgcaggccgtgtccgcgcgcttggcctcgtacaggcgcaggatcacgtcgccgctgccgtcctcggcgggcttgaccgtgtccacgaacacgttctccgccgtcagatccagggccgcgggcaggtccgcgcaggagccgagctccgtcgtgagcggcacgttcaggtcgtacgcctcgcgaaccaccgggctggagaggaagggcccttcccacccgcagaaggcgtaggtgaagtggtgcacgccgttgtccgcgcgcatctccggcgcggccggcgcgcgcaggagcgtcagctgcagcgcgttttccttcatgctgatgccgtatttgcagtcgttgagcacggccgcgccgtggctctcgtcgcacagcgcgctgtagcgctggttgcagacctcgaagcggtcgctgtcgtagaggcgggagcggtgcgtcggccgcttgaggtagccgaactggatctcgttgatgccctcgctcgcctggacggagacggggaactccaccttgagcaggcggtgcagctcgtgccagtccacggtcgtgacaaagtccacgcgccggccgtccgccgcgagaacgatgtcctgcgcaaaggccgagtgcagaatcttacgctccaggtgcagcaccgcgcgcgggccctccgcttcctggaccgtgagggtcacgggctcgtcgagcgcgaggggggagagctcgtagttggagtccacgtcccaggcgtcaaagagccgcggcacgtccttgaaggccagcaggcggttcatgggcccggccgcgaactcgcgcccggtcgccttgtccacgaaggagacgatctcgccgcgggcgttgaacgccgcgcgcacgtgcgcgttctccaggaccgcgccgtcgtccgtcagggccgcgcgcgccgcggggccaggggcgctcaccgtgcaggggtagagcgtcaccgcgccaagggcgggcgccggcacctcggccaggacgccttccgcggtcttctgggtcgggatctcgcagccgtccgccgtgcgcgcgccggaggcgaagcagtccggcaggaccacgatccccttgcgcgcaaaggacagggagttgaagaccgtgtagccctcgccgttggccagcgccttgcgcgcgccgtccgcgacggactccgcctccgccaggacctgcgcgtggtccgcgcgcgccttttcatagaccttgccgatggaggagccgggcaggatgtcgtggaactggttgagcagcagcagcttccaggccgcgtccatcttctcgagcgggtagcggtactccggccgcagcagggaggccatggccccgaggaactccgcctcgcgcagcgcgagctcgctcttgcggttgccgcgcttgatcgcggcctgggaggtgtagacgccgcggtgcgcggagaagtagagctcgccgacgtaggtgtgcttcgggccgccggcggcctccatgtcgtggaagaactcgaccgggccggcgctgcgcacgcggggcagaccctccaggtcctcctcgcgccgcaggaattcgaggtagtcgcgcgcgggtccgccgccgccgtcgccgtagccatagggcagcaggaacgcgtccaggccgcgcttctgcacgcgcttcttccaggcctgggagatctcgcccgggtccgtgcggtaggtgtagctcgtgggcaggaaggtctcgatctcggagccgtccgcgccctgccaggtgaagtagtggtaggggaagcggtcgccctcgttgtaggaccagaagatcttctgcgtcaccaggtactgcaccccgcagcccttgaggatctgcggcagcgccgcggagtagccgaaggtgtccggcagccacagcacgaccgagtccacgccgagctggtccttgaagtagcgcttgccgtgcaggagctggcgcaccagcgactcgccggaggtcatgttcgtgtccggctcgacccacatggcgccctcggcgatccagcgcccctcgcgcacggcggcgagaatccgctcgtagagctcggggtagtacttgcggcacatctcgtaggccgcgggctggctctgcaggtacttgtactccgggtattcctccagcaggcggagctgcgccgcgaacgtgcgcgaggtcttgcggtaggtctcctccatgggccacagccacgccaggtccaggtgcgcgttgccgatggcgtagaagaccggcgcggtggagccgttcctggcggcaagggccggggcgaggacttcgcgcgcgcgggcgtagctcgcgctgcggcccgcctcgtcctgctcaaagtcgatggcaagcgtcgcctgctccagcgcgtccgcgatcttcgccgcgcgcaggctctcggggtcgacctcctcgcccagcaggcgcagcgtctccaggtccatgtagagctggtaggcggtttcgttccagacgccgtaggtcatgcgcccgagctgcgcgcgctcgccctcgaccttcgggtcctggtaggagcccggcagcaccgggccggtcgcacagccgccgagcgcgctctccgggtagtagtggccggcgtaggcctccagcagcaggtcgtaggcgcggcccggctccccgcagcgcgtcagcacgttgtccaccaggaagtggtgcggcacgttcacccagcccgcgcggtaggtgccgaaggacttgccgtccacaaagaccgtcgtctccccgccggtgcacaggtccatggcgatgcgcttgccccgcgccgcctccggcagcacgatgcgcgcgcgcatccagcagtattcatagctgcggccccagagctggccagggtgcatgggctggaagtccccgcgctgcgccgcctccgcgggcgcgagctggtccatggtcaaaaacccttccacggggatggtgcccaagggctggtagaggtccttttgcagcgtgaggagccagtgctccaggcgctgccgccactccgagtgcatgtacttcatggcaagtcgccgtcctttctctccgcgtcagggcgcggaggggaaaataaaaggtatatcatttcatacaggaaccatgtcttacgctccattatactgcgcgtggcggaaaagtcaaacgctttttccgctgcgcgcgctccgaaccccaaattgcgggcgatggagaaacttgacagaaccgattgcggctgatatagtgaacatactttgatcgggttggtgtaagcgatgagcgaagagaatatgtatcgtacaatctaccgcgacctgctgcgcaagatccgcagcggcgagttccggtgcggggaccggcttcccacggaaaagcagctctgcgaggcctttgctgtcagccgcatcacggtgcgccacgccatggagatgctcgtgcgcgacggtgcggtcacgcgcatcaaggggaagggcaccttcgtcgcccccgggccggtagggcgcgaggtgcccggcccgaacgcgcctgcgcggcggcagatcggcctggtgatcccgaacttttccgacgcgttcggcgcgaagatgctcaagagcatcgagcacgcctgcgcgcagaagggatacgacctcgtcctgcgcatctcctggggcgacctggagaacgagtgcgccatcatcgacgatctgcgcgactgcggccttgcgggcctgatcgtgcagcccgtcaacggcccgcgctacaacgccagcctgctccggctcatcctgagcgagttcccggtcgtcgttctggaccggcgcatgcccggggtcgaggcatgcttcgtcggcacggacaacgaggccagcacccggcggatcgtgcagccgctcttcgacctgggacatgagaacatcgccttcgtctccccgccgcccctgcagaccagcaccctcgaggagcgcctgcacgccttccgcgcctgcttctacgagcggaaccgcgtgcccgatgaatcctactttttcaccaacgtgcgcgcgaccctgcccggccaggaccgggaggagatcctccgcgaggatctgcagaacctcgcgcagcacctgcgcgcccatccggagatcacggccgtttttgcctcggagtataacgttgcctggctcgtccggtgcgctgcggaggccgtgggcctgcgcgtgcccgaggacctgtccatcgtctgcttcgacatgccgacgcgctttgcacaaggggatgaattcacccacgtgcagcaggacgaggagggcctgggccagaaggccgtcgatctgctcctgcagcgcatcgcagacgggccggagttccacccctccatcctgctgccggccgctttcattccaggccggagcacagccatgcccaaagccacgacacggaccgcctgacgtgtaaaacaaaaaaccgcagtctcatgcaaagagaccgcggttttttgtttttgtcttattttaatgtcataccaaatttgtgaagaaaaatcacgaatcgagatattgtaataagtgcacaaaaaatatgatgaaaattgtgcaattaataaaaatacaggaaaatcttcacgagtagttgacaaaaaatggaatgttaatatgacaacacacggaacaaaatgggtccgcaaggatttgttatatatgtgtttgaccttgtttggcgaaaggcgctttttcctaaaaagcgattgtttgccaagggcagagaccgcacccaatagagcgcagcgtgcaatagaaaaagatagagaagggggaacctcgcgatgtacatgtcgcccaacgcaaaccggatgcacgacgtgatgaaccttcgcaccaaaaaggggtggaggctgctgggcaagatgatctggagatacaagtggatttacctgatcatgctgctcccaggtctggcgctgacgatcgtcttccggtacctgcccttgccgggcatcctgctggcgttcaaaacctacaagcccctgttcggggacagcagcctgtatggctttctcggtgcgagtccctgggtggggatggaccaattcatgcgcgtgttttcggaaccggccttttggaccgcgacgcgcaataccgtggtcatctcgcttctcaagctcctggtgggtttcccgtttccgatcgtgttggccatcctgctgagcgagatgacggggaagcgctataagcgcgtgctgcagaccgtgtataccttcccgcacttcctgagctgggtcgtcctggcgggcatcatgctgaacctgtttggcgacaccggcgcgctcaagaagatcgcgatgctctttgacccggacgtcgcctcagggtggaacatcctctacaacacgcgaaccttccgcaccatgctgatcctgtccgacgtgtggaaagagggcggatggggaacgatcctctaccttgccgcgatcacgggcatcgacccgagcctgaacgaggcggcgaccatcgacggcgcgaatcggttccagaggatttggcacatcacgctgcccggcatcctgaatgttgagagtatcattaaatgcagaagaaaccgttacggattttcctgcattatttttttatccgaaggcaggcggaaggaggttaaaacattga

SEQ ID NO: 2890 - DNA, 3382 bp, Unknown
  16S sequences of unknown bacteria
tgaacattttcgtatgcatcaagcaggtgcccagcacaagcaaggtacaggtggacgaaaagacaggggtgctgaagcgggacggtgtggcgagcaaaatgaacccgtatgacctgtatgcgctggagacggcacttaggctcagggaggcgcacggcggccgcgtgacggtgggtacgatggggcctcctcaggcggaggcggtggtgcgggaagcgtacatgatgggagcggatgaagggtacgtgttttcggaccggcgattgggcggcgcggacgtgctggcgaccagctacacgctgtcgcaggcgatccgcagcgtgggcgactttgacctgatcctctgcggcaagcagaccaccgacggggataccgcccaggtgggcccggcgattgcggagcacatggggattccgcacgccgcgtgggtgtcgcgcatcgaggcggaaacgaacggcgtggtcgtggagcagcagctgcaggatgtgatcgaaacggtgaggatgccctttccctgcctggtcacagtggaacaggatatctatatgccgcgcctgccgtcgttaaaaacggcgcgccgggtggcggaccggccggtgcatgtgatggggctggacagctttctggataccgatccggagcattatgggctgtcgggaagccccacgcaggtagagcgcatcttcccgccggaaaacgacgttcaacgggagcaatggacggaggaaaacgcggcggagaagctgcacggactgctcaaacagtggaaatttgtataaagaaaggggagttggagcatggcacagatagcggttttggaacgcaaatgcacgggatgcggcctgtgcagcgaaagctgcccctttggggccatcgatatgaaggacggcaagccggagctgaacgcggcctgccgtgtatgcggtatctgcgtaaaaacctgtccggaaaaagcgatgatccggctggaaacgcgggtggcatccgtggacaaaagtcagtggaaggacatactggtgtttgccgaggtggcggacggccggctgcatccggtcagcctggagctgatcgggaaggcgagggaactggcgcagggggtgccgggctttcaggtcaaggcagtgctgctgggaaatggcgtgatggagcttgcgcgggaactacagcattatggggtcagcgaagtagttgcgtatgacgatccggcgttgagctttttccgtgcagatgtatttgcaacatgcatagaggactatattcgtgcggcacggcccagcgtggtgctggtgggcgccacgtcgctggggcgcagtctggcgccgaggctgtccacacgcttccatacgggcctgacggcagactgcacgcggcttgaactccgggaaaacaccgatctggtgcagattcgtccggcgtttggcggcaacatcatggcgcagatcgtcaccaccaatacccgcccgcagtttgccacggtgcgctacaaggtgatggacgcgccggcgcggcaggaggaagcgtccggagaggtgaaggtgcgccccgtgcccaggtcagcgctgaaatcggcggtgacgcatgtgaacacgcagccggtacccgctggaaaaaccatctcggatgcggacattctggtggtgggcggaaggggcctgcaaaaggaagccgatctggacatgatccgggagcttgcggcgctgctgggcggcgactgggcggtgtccaggccgctggtggaaaagggctgggcgaccaacgcgcgacagattggcctgtccgggcgcacggtgcgcccgcggctgattatcacctgcggggtgagcggagcgatccagtttgtagcctgcatgaacgccagcgaacatatcgtggccatcaacagcgacgcgcaggcaccgatttttgaggcggcgcacgtaggaatcgtaggggacctgtatcagattgtgccggatttgatcgcccggctgaaggaggcgcgaggatgaaaccgtttaacagggtgaacgaagcggatctggcgttttttgaaagcattctgccggggcgggtattcagcggcgaggcgatctccaccgactatgaccatgacgagatgaccatctatgggcactatgctcccgaagcggtgctgcaggcacagagcacggaggagattagcgccgtgctgcgctactgcaacgagcgcaacattgccgtaacgccgcggggcgcaggcacggggctgtgcgggggctgcgtggccacggaaggcggcgtggtattgtccaccgaacggatgaagcaggtactggaggtggatacgcgcaatatgacggccacggtggagccgggcgtgctgctgatggagtttcccaaggcgctggaagggacggggttgttctatcccccggatcccggtgaaaagacggccaccatgggcggcaacgccatgaccaacgcgggcgggatgcgcgcggtgcgctacggtgtgacaagggactatgtgctgggcatggaagtggtgctggcggacggggaactcctgacgctgggcggaaagaacgtgaaaacctccagcggatacagcctgatcgacctgatggtaggcagcgaggggacgctgggtattctgaccaagctcacggtgaagctgattccggagccgaaggcgaatgtgagcctgctgattccctttgagcatctggaggcatgcattcaggcggtgccggaggtgctggcgtgtggctgcgagcccacggcagtggagtttatggagcgggaagtcatcgcttgcgcggaaacgtatctgggcaagcagtttcccgacgcgagctcggacgcatacctgctggtgcggctggacggggcaagcccggaggcgctccgcccgatggtggaccggctgacggatgtggcgctggagctcggggcgcaggatgtgctgctggcggatacggacgagcgcaaggagagcatctggaacgcgcggggcgcatttctggaggcaatcaaggggagcacgcccaacatggatgaatgcgacgtggtggtaccccgggaccggattgcggcatttgtgaagcacagcgtaagcatcgggcgcgaggaaggggtcaggatctgttcgttcggacatgcgggcgacggcaacctgcacctgtacatctgccaggacggactcaaggacgcggtgtggacggatgtggtggagcgcgtgatggagcggctgtatgcgcaggcgcgtgagcttggaggcgaggtgtcgggcgaacacggcatcgggcatgccaagcgcgccttcctgctggaaagtgcaggagcgcgccagatcgatctcatgcgcggaatcaaggcggtttttgaccccaacggcattctcaatcccggcaaggtggtatga

SEQ ID NO: 2891 - DNA, 3961 bp, Unknown
  16S sequences of unknown bacteria
gatttttgaaaagcaaaagcgggctgaatacaaagcacgggattacaagcgaaggtgtgatcgatgtggggtatacaggtagtattgtggccaagctgtacaaccacagcggcacggactacaaggtcaacgcaggagacaaaatcactcagctggtgatcgtaccaattttaacgcctgaacttgaactggttgaatctttaggaaaaacagaacgaggcaataaagggtttgggagtacaggaaaatgagtgaagccaagcaaagcaaacaagaattcattgaagatgtaatatttacgcctgtttttgaggggacaagatacaaatatcatttatgtagctcttgtgggaatcagataaggataagacaagatatatttagtccaatacaatttgatggttacgaagatgtcaaatattgtccgatgtgcgggaatcatattattagattcgagaaaaaaccgatatatgaaaaagaaataaactttgaacctttgagaccgttttatgaggaatgggaaaggtatgagagaagactgaggtggttgtattactgcatttttcatgacaaaaaagaagaaattgaagcactaattccattcgctaaagaaagaccagcttatggatgggttgggattgcatgcagcgctttgaatgtagcaaaaaaatataatacagggtggagagagaaaaaacgactaattgaagaatttgggagcactagaaaatgagtgaagccaagcaaagcaggatagagtttgaaacatgggaatacatcctgcccgccatagaggagatcgcaaaagtaagcgccaagggctttgcaaagtacggggctgagaactgggcgcgggtagagacaaaggacaatatcaaccatgcgcttcggcatatctgcttatacagagacaagatggagggcgtcccgctgccagagggagaggaaaacgaaaaccacctggcgcatgcgtgcgcccggctgatgatggagatagcaaaggagggctaaatgccaacgtgggcgaggatgtggattttgtgcacggggctggtgtgctttgtggcgctgtatgcggtagccagggagatcaagcacaaaccaacgcgcattgcggtatgcggatttctgatagggcttgtgagtgcgttgatgattgtggggctgtgggaatgagaaaaagagcaaaaaagagaccaacgctgtgcttgtcatgcgcgaggttttgcgggcagtgcagctggtcggcgcggttcgagccgatagcgggatggagcgcagaggagggaagcctgacgcgacaatacggaggcacactgaaaacctacactgttctacaatgccctttgtatgaaagggattcggaagaggacggaaacaggagggcagaaagccacgccattgccaaagcattgtaacggatgcttttacaggcggagccttggtgcggacagcggggaaaagttttgcgcgtacatcctgatagagggacattcgagaggatgcagcgtagaggtgtgcgataagaaaagaacggataagaaaatcaggaagaaaaaacgctgggaggatttctattgacgaggatacgaacaaggagtgttacgggcggaatagagcctagaacatacaaaagccttgtggaagagatcaaagagattgatcgtgctatttttgaatgcagaagagagctagctagagataaggtgcaaacatcggataaatctttcccatatacgcagcatgggaaaacaattgaagggattaacctaacaaggcttaggcgtctcgaaatacagagaaagcgggccgagattagaaagatggagatagaagattttgtatcggggatagaagacgtagagtcaagaagaattgtccgcttgcggtgtattgatgggcttccatggcgggtgatagggcgtagggtacatatggattatagcgctgcccgaaaaaaatataataaaatcatgggagaggtaaacttgccacaaatgccacaaaacccatgatataattttattgtggatagttatacgagaacgacgcacaatcgttcttcaatcattcctcattaaaatgcagctgtcttttttttgatagctgctttttgtttggcaggccggatacagttgcgataaagccggtacaggggatggcaagcgcaggcgatgagccgccagcggtgggtgaatatgcgcaaaaggcaagcatcgtttgcttacctttcccaagagcgcttttttatgtccatggtggcattgatgccggggtgtgctttttgcaggtctttgaagcgtttaattgctttgtgacggtctgcccccttgtactcttcacataggacgcgctcaacggccccattggagtacgtgcgatcaatcctaacatagtagaattttctattatcatagcaacagcggcgcactagagacagtgagagtgtataagtcagactttgtatttcattgtatctctctgaaagggcgactctgtattgcttaatttgggagataagaaattccaattcggctatttctctctcggcccttttatctgcctctaataggcgttttggctctatgtctttagggctgactgcataaaagtaaatattttctcgatgctcgttgcgagtgttgaaccaatctttatatggtgttgtatacattgcaaaacctccaaggggccaggggccggctttatgccttagcccctattcttgtatagttactttcttctgactgtcctttgaaggtttgagagccatattttgtgcggatctcgttcatagaatatgtgccgcgacgccatttgcgcccttcttcagcgtgatgccaataccatagctttttgtttttgctccaacggcagctaagggcttttaactcctctttgtgttcgcgggtatttcctccgatccagagccaggagccgcacaattcaatgtcaaggccgggaatgatgattagtttcataatgatttcgcggaactcttccggggtttctgtggtttggtggtattcgtctgcgcttgcgttgtgctttttctttaaagtttcaaacaatgcgtcatgttctgcgttgatttgctgcatgatttctacgctgccgccgtggtcggggtgattcttcatagcgagtctgcgatatgcggcttttaggtcgtctagtgaatggatgttgttgaaataagtcataataaatgcctcctaaaatttgatttttgggaggccatagagtaaaatataaatggtctcccggttcgtagttgttctggggtactgcctcggcatatggtgcgccaacaccgccgaggttttaattatttgtcgtgctttagcccaattctgataagtcttttaatttctgtctgtttgggcttatcttctatcgcttgcaaaatatctttatctgtgttgttgttaagttttaacccaatgaatgtcgtgttcttctttgtccactctttatgggcctttgattctgggattgtaaccacctccggcacgtgatataataggggcaaggaagcggccagtggaacggtcgcacccaagaaatcaagttttaagcttgaggatacgccgtgccactaggtgcggctatttctctttaatggtgataacaatcaaaaggattataaccatgagagttattacctcactcatgacctcacccccttggggtttgaccatagccgcttgccttaccgtggttacatattagcatgggtttaactcattgtcaatagataatttgaatttttttgtgtaagtttttagggcgccaaaagagtgctttttttattatggcaatgcggaagagcgacggataaacaaaattaaggggaaaacatgctagacgtatataggaggtgatataaatgccaaaaaaacgaaggggaacacttaccccaaggcaaggagcttttgtaaatgaatatataaggcaatac

SEQ ID NO: 2892 - DNA, 6252 bp, Unknown
  16S sequences of unknown bacteria
agatcgagacgacgccgtagacatattccggcggtttcattcgtccctcgattttcagcgacgccgcgccgagtgacagaagctccgggatgtgcccggcaaggcacatatccttgaggcttaacgggtattcacagcgttttctccccttctccttgcagtccccgtgatacggaaggcggcagggctgggcgcactcgccacggtttccgctccgcccgccgatgagtgagctcgcgagacatccgcccgactgtgagacgcagatcgcgccgtgaatgaacagttcggtttcaatcggcgattcgcggcagatggttgacagatcgtcaaacgagagctctctcgcggcgaccatgcgcgtgaagccgagttttgagagctcccttgcggcgagcgtgttgtgtccggtggcctgagtcgacgcgtggagctccatttccggaaaatagtggtgtatgagccgcgccgcgccgaggtctgcgacgatgagcgcgtccgcgccgagagtgtaaagcccctcagcgcaggcgagcatatcgcgtatttcgcggtcatgtacgaggatattgagcgttatgtttgtcttcacgccgtaataccggcatttgcggaaggcctcccgcagtgtgtcgccctcgaagttctttgccatcattctcgcgttgaacgcggacgcgccgaaatatacggcgtcggctccggcggctatcgcggcgtcgagcgcttccggggttccggcgggcgcgagcagctcggggagcggctttcttgttgttttcatgttttatgtttccctttcgcggagcggcgcgtgtaccgtaccgcgcggtcatccgtgatcaagtttttaatttttctgaaacctattgaaattttcgttttgacaggttataatatatattataatacaaatcccgcgatttgggaatagcaaaagcaaatattaacaaaaaagttcgcttcgacacgttccgacgttcgcggtggacgtgtatgaaaggtaattacataaatgagcatactgaaaaacaacgcgagaatagtcgtgaaggtaggttcgaacactctgacctattcgaccggaaacctcaacctccgccgtatggagagccttgtcagggcgctctcggacttcaagaattccgggcatgaggtgatccttgtcagctcgggcgccgtcgccgcgggcatagcgaggctcggactcgagcgcagaccggagagcgtcgaggaaaagatggcgctctcagcgatcggacaggcggagctgatgcagatttacgagcgtcttttctcgacctatggtcataacgtggcgcagatactcatgacgaaggacgtcatagacaaccctgtccgccgcgccgcagccgagagcacattcgagaagctgctgtcttacggcgtggtgccgatcgtcaacgagaacgacgcggtctcgagcaccgagataaagttcggtggaaacgacactttgtcggcgtacgtcgcgacggtctgccgcgcggacattctcatcaatatgtcggatatcgatggtctcttcgacagcgacccgagaaagaacccggaggcgcggctcatcggcagggtcgacaagatcgacgagaaggtcctctcctacgcgggcggagccggaaccgaccgcggaaccggcggaatgataacgaagataaaggcggcggagatagccggcagcgcgggcatcccgatgctgatcgtcaacggaaagaaccccgacgtcctttacgagataagcgacgggcatcatataggcacgtatttcgccgcgagcggtgaaaagcgtccgaagcccgcgaagactgaatctgaaaaggaaagctgacatggcggacgccagaaagactgtcccgcacccggagggcggaaagaatatccggaagacggtgaacgagtacctgctgtgtgtcgcgggcgctctgttcgtcgccgtcggcgcgtatttcttcaaatttccgaacaatttctcgatcggcggcgtgaacggtatatctgtcatcctcggcaattatttcgggctctcgagcgccggaattattgcggcgatcattaattatgctctgctcattctcggtttcatcgttctcgggcgcgggtgcggactcaagaccattgtcggtacgactaccctttctgtcgcgcagatagtgctcgagaaggtgtacccgatgtcgcacccactgacgaatcagccgctgcttgagcttgctttcgcggtgctgctcccggcgatcggttcggcgatacttttcaactgcgaagggagcacgggcgggactgatatcgtcgcgatgatactgcggcggcacacgagcgtgaatataggcacggggcttcttataagcgacactgggataacgctgctctccttccttttcggagcggagacgggacttatttcactgcttggtctgatactcaagactttctgcatcgattcggtgatagacagcatcaacaggtgcaagtgcttcacgatgataaccgagtctccgcaggatatctcggacttcataacgcgcgagctgaaccggagctgtacgatactcgagggcaccggcggcttcacacattcgaaaaagtacttcatgaccgccgctatgaaccgctatcaggcggcgaggctccagagatatctgaaggaaaaccatccggagacattcatgatgataacgaactcaagcgagataatcggtaagggcttcagaggtttctgagtcccgccggataatcagaagggattacaaatgtcaagatggaagatagaatcctgccgccgcgatgacaggctggcagaccgcgtatcggctctgcgcggagacgcgccgtactcgatagtatggtatgccgataaggatgaaacgcataaggacgatatagaaatggcaggcaggctcgtgtccgagatagtctcatacggctgtgagagcggggttctgtcactctgccatcatccggttttccccacgctgcgcacccgtccgaacaacactcacgcgtcttttcagacggatataccggaaagattgatccctcgtcccgacggcgctgccgaaaggcttgtcagggtcaggatcgacggcgttcttacgatagacacggtgtcggactgggcagagaccgagcatatctgcttcccggcggacgccgtacgcgcgtcatttgagcttgtgacgataaggaacaccagtgacgcggtgaggacactgagctcttcggcgcgcacaggcgaggcggcgcatacgatcggtccgatgggcgttgatatcatatggacggagagcgatttcactgaaacgacgctcgcgccgggagagagctatacatattatatcgctttccggggcggaatcgcgaatgagcctgtagccgcggtcgacccggcggcagagctcgcgcgcaggcgctgccgcgcggcggagcttatggctccgatgcttcttgataccggctcggatgttatcgacacgatgttcgctttcgcgaagctgcgcgccggcgagtcggtgttcgatacgcggtacgggcctgtacacagtccgggcgggacagcgttttacgcggcgacatggtgcaatgatcaggttgagtatgccgggccgtatttcgcatatacgggcgatgagagactgcttgaggcgtctatgaacgcatacaggatgtatatcccgttcatgagcgatcactatgacccgatcccgtcgtcggtcatagccgaggggcttgatttctggaacggcgccggagatcgcggggacgcggcgatgtatcttttcggcgcgtcgcggtttgtcatgacttccggacgccgggactgggcgcttgagcttcttccggcgatcgagtggtgcgccgagtattgccgcagaaggataaacggggatggcgtcatagcgtcggacagcgacgaactcgagggcaggttcccgagcggcgacgcgaatctctgcacgtcggcgctggcgtacgacggatacaattcagccgcgatgatcgagagtgttttcgggaatccggaaaaggcggcggagtatgaattgctcgcggccggccttgaaaaggcgatcgagaggcacttcggcgcggaggtcggaggatatcacacttaccgctatttcgagggatgcgaaaagcttcgctcatggatatgtatgccgctctgcgtcgggatggatgcgcgagcgcgcggaaccgtcgcggcactgtgcgacgacaggatgatgcgcccggacggggtgctgaccgaggagggcagcctgactatctgggacagatcgactctctacacgctgcgcggaatattcgccgccggtgagacagataaagcctgcgggctttttgagcgctactcggagaaccggctgctcggagagcgggtgccgtacgcggtcgaggcgtatccggagggcggcagacggcatttgtcaggtgaatcggcgctttactgcaaggtgatcatcgaggggattctcgcgatgcggccggcggggttcgactgcttcaccataaaaccggttcttccggcggccatggatcatctgtatctcagaggaatacacgcttatggcggggttttcgacattcttgtcggacacgacggcttcgaggtgagaaattataatggggatatgcttgcgtccgggcggaacggcgaggagacacttgtgatgcttaaggatacgctgaacaatccgggctttcacggaaaaaaggcttgaatttatgggcttttctctgcgaaaacaaccttgaatcagtgttttcttaatggttgaaaaaaccggagaatgatgaaaatggttccgcgggcgtcggctgacgctgtcataccgcggcgatatgagaaaggataaacaggatgtcaatattaactggtcttgatttcggcggatacggcactgagatctgcacggcggacggcggaatagtactgagacagccgtcgctcgccgcggtcgacgctgagggcaatgttgtcgctgtcgggaccgaggcgtatctgacagcgggacgcacacccggttccgtgacagtacgcagaccgatacgcgacagcgtcgtcggagacttcaacctgacggcggagctgctcgacagactgctcgagacggcggtgccgaagaagcgcaagcgtgttctggcggctgtcagatgcggcgtcggcgcggagaaccgcgcgctgataaagaacgccctgctcgactgccgcgtgtcaaaggtcgattttatagacgcgccgttcgcggcgttcgagggcttttataaaagcgatgacgagaaattgtcggaatccaacgggatacttctctgcgacatcggcggcggctcggtcgagtgcgctttcgtgcgcggaggtgagatactccggagcgagacttatttcggaggcggaagcgattcggataataccatctgcgtttatctgagacgccattatggccttgcggtgacaaagcaggaggctgaggcggcaaaactgaagcttgacctgactgtcccggagcagccgccttttgtgatgtgcggtcttgacacttcgacgggtcttccgaagcgtcttgagataccggcgtcggatatcctgaaatgttccgctccgtccgtgaagggcgcggcggactgcataaggacggtcctgacgaacctcccgagattcgccgggaagcctacagaggctgacaggatacttcttatgggcggcggcgcgaacctcccggggatcgacggatatattgccgccgagcttgatacggagattccggttgaggtcgctgaggagccgtctgattgtgtcgtacgcgggcttaacaggataatctcacgcgagaaatgacaggtacctgcggcggtaatccggcaaaggaatggaacgcgaaaagaagacgactttccgcggcataactgaccgactgtataatactgtataacagtgaaattctccgcatggcctgagtcatgcggagaaaatgtttatggaaacgctgaacaattcgggttttcgcggaaaaaagccttggatttatgggcttttttccgcgaaaacaaccttaaatcagcgtttcttatatcctgccgccgtgtctgctgacggcgggtgactgaagtgtccgcgctgcggcatcacgcgtttctccggctgatcaaaatcaaaccgaaggctctgtcaccgcggtaattcaccttcatcggcgggcgatgcttcaagcccggcgttcagattgttccagt

SEQ ID NO: 2893 - DNA, 26114 bp, Unknown
  16S sequences of unknown bacteria
aggtatcggacagtcgcgcctttgtatgcttctcatgcagaccgcgcacataggagaagttcaagtttccgtatgggacgacaaaaccatgagcgaatgtgaaaaagccggaataatgctcctgtgatttttaattttatttaatctgttcttaattgatttggtcagccgcgcgcgttataatatggaagctatcacacaaaaggatacggcttatgaaaaaactgctcagcgtgtctcttgctcttgttatgtccctcacactgcttctttcgtcatgcggcaaaggggacttttacgacgtcacatataaagtaaggctgcacaccgactgtggatttgtgtattttccggacagcgataccgcgcattactttgccgataaggacacacgcatatatcccgcaagcacgacaaagctgctcaccattctcgccgcacttgacattatgccgccggacgagcttgttgaaccaggagacgaggtttatcttcctgagacaggctcatctttggcttatatccgaccgaatcacatgctgaccgtcgaaatgcttgtcgagggaatgcttctgccatcgggaaacgacgcggcttatgctctctctgctgcctgcggatatgttctgcttgacgacagcgaggcggaatacactgacgcggtggagaaattcacggactacatgaacgaatacgccgagaagttaggctgcacgggaacgcactttacctcgcctgacggatttgcgggacgggagcattactcaacgctgcacgatatgcttcttatctcaaaagcggcggcagaaaacgaaatcataacgaaatattctgctatgccgtatggcgatgtggtttacgcgagcggacacacaaacacatggacaaacacaaacaagctgcttgacgaaaactccaaatactactgcaagggtgttgtggggctgaaaacaggcagtcttgaaaacaactattcccttatcgtgctgtatgacgacggggagacgaggtttgttataggctttttgttcggggagaaaaccgatgacgacagatacaccgacgcactgaaccttatacaatgcgttatagacaattacaactgaaaaaaatcgggtcttgtgagcgataaaactcatttgacccgttttttcatcccatcgtcataagctcggacacggtgacaaaattatatccctcgtcgagaagagtcggtattatctgcttcagcgcggcaggtgtgggagattctcccgagacatagtcgtggaacaggattatatccccctctttcacagacgacagtacgtttttgacgatctcatccgtcggagtgtgcgcccagtctcttgtgtctaccgaccagcatatgatgttgtagtcgttgtcggcagcggctctgagaagtgtatcgctgtagattcctcccggtgggcgaaggagctttgttcggtattcgatgttctcgtatatcacgttttccgcgttttcaatttcggcgcatataccgtcatatgacagctttttcaaattcatatgatgagaataggtgtggttccctatctcatgcccgctttcgtattccgttttaacaaggtcgccgtaccatgtcgcgttctcgcctatcacaaagaatgtcgcttttatgccgtattccgcgagaatatcaagtatctcgggcgtgtgaacggggtgcggtccgtcatcaaaggtcagcgcgatgttcttcttactgctctggcaggagtatatcacatcggaagccgcggcgggatatgctccgcaggtacacattgtaatgactaatgcaactgcggcggtgattattttctttgtctcattcattgttgccaccgttctgtcccgtcagctcgtcaagcgtaccgaaagtgaatcccatctcgcgccattttgcgataagctcgggcagtatttccgcgttggtttttgaggtggggtgcaggagtatgacctcgccgttatgcgtgtttgtgattattttttcgacggctttttcgcggctcatctggtttgcgttgtcccagtctgcatatgcaaagctccagaatattgttttgtacccaagctcatccgcccatgcgaggttttgttcgttgaactttccttccggcggtcggtagtatcttgctatctcacccccgattttgtctcgatatacgtcctccatagcccgaagctcagccgcaaaatcttcctttgaagtcatttttgtcatatccttgtgttttgccgtgtgattgcataccgtatgtccttcgtctaccatgcgcttaactaaatccgtatttgttttcgcgagattgtcaagaataaagaacgctcccggtacgttttcctgtttgagcgtgtcgaggattttttcaacgtttccgttctcatatcccgcgtcgaaggtgaggtatattactttttcgtcctctccaatgtagtatccgccgtgctcggtgatgtagctcatctcagacggaattggtggacgcgtcccgtccttcatgtgctgacagtaccatccggagctttcgttcattacagtaacggcgtccgaaaacgttgattgtgcttcactttcagtctctctcggcgcgtattttcctcttttcggtgttatatcctcgcattccggttcagctgtttcctgctcgggtgagaatatttctttgaatttatcgacaaatcccgtggatgtgattattcccgccaatagaacaagagctgcggcttttcttatcagtttcatttttccctcctgttttgtttttccgtgcgtcaatattttctcccgaacgacgcgaaatactcaaaaactccgcttcctttttcgggttacggtgctaatttttgatttttattgcatattaatgcgtttagatgtatatttataatttattttacttcatcaccgctctttttgtctgaaatgcatattgcaaaagctcgcgcgtgattgtataattataaccattaattacataaaaatacatagagcaattacaatgagcaaagaaatcaaaaaaatagtattggcgtattcgggcggacttgacacttcgattattattccatggcttaaagaaaactatcccggatgcgaggtcatagcagtatcgggaaacgtaggacaggctgacgagcttgacggacttgaagaaaaagcgatagctaccggcgcgtctaagctttacatagaggacctgcgcgaggaattcatcacggattacatctatccctcaatgaaagcgggagctaaatacgagaacacatatctgctcgggacagcgtttgcacgtcctatcattgcgaaaaggcttgttgaaatcgcaaaagctgagggagcggacgctatagctcacggatgcacgggaaaaggaaacgaccaggtgcgttttgagcttgcaattaaggcgtttgctccagacatgactataatcgctccgtggagagtatgggacataaaatcgcgcgacgaggaaattgactacgcagaagcgcatcacattccgctgaaaataaaccgcgagacaaactattccaaagacaaaaacctctggcacttgtctcacgaaggacttgaccttgaagatcccgcgaacgagccgaagtatgacaagattcttgagatgggagtaacgcccgagaaagctcccgacaagcctacatatctcacgctccactttgaaaaaggcattcccacatcaattgacggcaaggaactgtccccagtagagctgattgaagcgctcaacaaggtcggcggagaaaacggtatcggaatcattgacattgtcgaaaaccgtcttgtaggaatgaagagccgcggcgtatacgaaactcccggaggaacaattctctatgccgcgcacgaaatgcttgaaacaataactctcgaccgcgaaactacccacctgaaacagatgcttgcgggaaaattcgccgatcttgtgtacttcggtcagtggtttactaccgcgcgtgaagctctgtccgcattcgttgacaagacgcaggagaatgtaacaggagacgtgaaggtcaagctgtacaaaggcaacatcactcccgcgtcggtcacatctccgtattcgctttacaacgaagacattgcgacatttgacgaggaccatgtttacgaccaaaaggatgcgggcggatttatcaacctcttcggacttccgataaaggtcaaggctatggctgaggcaaagtggcagaataaatgagttttaaggagctgttataatggcaaaaatgtgggacgcccgtttttcaaaggaagaaaactctcgcgtgaacgacttcaactcctcaatttcctttgactgccgaatgtacaaggaagacattgcaggctcggtggctcacgcgaaaatgctctcaaaatgcggaattatttcaacagacgacagcgagaagatagtggacgaactgctcggaataaaaagcgatatcgaaagcggtgcgctgaaatttaatcccgaagcggaagacattcatatgttcatcgaggaggagctgacaaaacgtataggagacgcgggaaagagactgcataccgcacgaagccgtaacgaccaggttgcgcttgacataaggctgtatctcagaaacgagattgtcgaaatacgctcgcttatctcttccctgcttgaagccatagtcaaaacggcggaagacaatatcgactccgtaatgcccggctacacgcaccttcagcgagcacagcccgtcacattcgcgcactatattcttgcctatgcaatgatgttcatgcgtgacgacgacagactcagcgaaacttacgagagaatgtcgtactccccgctcggctcgggtgcgcttgcttcgacgacatatccgatagacagattctttgtggcggattctctcggactgagcggtgtatgtgaaaactcaattgacggcgtatccgacagagattttcttgccgaatgcatctttgacctttcacttatcatgacgcatctctcgcgattctccgaggagattattctctggtgttcgagcgaatttaagtttatcgagcttgacgacgctttttccaccggctcatccatcatgccgcagaagaaaaatcccgacatagccgagcttgtacgcggaaaaaccggcagagtatacggagatctcacggcggttctgaccatgctgaaaggtcttgtgctcgcctacaacaaggatatgcaggaggacaaggaggcggcttttgatgcgctcgacactgctgggatatgccttgagctgttcacgtcaatgctgtctaccgttaaggtaaacaagtcacagctgagaaaagcggctgccggaggattcataaacgctaccgactgcgccgactatctcacaaaaaaaggaatgccgttcagagacgcgtacagagtcagcggaaaaatcgtggcatactgcatagaacacgacacggatttcgagcacctctcgcttgatgaatacaagagcttctcttcacttttcgaggacgatgtatattccgcagtggatctcgacaactgcgtgaactcacgaaaggtatacggcggtccttcacgcgagtccgtcctgcaccaaatcaacatcgtgaaaaagcatattgaagaaataaaaagtgagataaaaatataaacaaacagttactccgctataggcatgatttaacgcaaattttcacttgactttgcataattttgtggtatcatatattgtgtagatttattgcgctaaacggagctgttatgaagaaaagatcccgtattttaagtaagattattattctttgtcttatggcgggatttttttctgttctctcgtcgtgctcagtactgcgtcctctcgacaatacgaaaagaaacgagtctgaaaccgtcataatctcaaatcctgccgatacacttgaaagtgagaagaatgttccgccggagaaaagcattgagcaggaggatatcaccgtggaaattacgaaacctattcacgaggaagccgtcgcgtgggtacagtattatgaagccagatacggaaaaggctcagcggatgagataattatgtctgggcatgatattgaagagtacaacaagaagctcttgtcggaatgcactacgctttatgacatgacttccccgcctgaaaccgttgacggagctgaagtgcgcggcgctattatgaagtattccatgccgcacggggataaatacgacaggcacaagacaaaaatcggcgaggaaaagcgagaaaagataagcggaaaccgaaacctcgacaatattcccgaaaaagtggcggtcagatacggcgttgtaactcagcggtgcgacatgaaggccttccccaccgaaatcgggttctatgacggagagacgggattctacagctcgattcaggaaacggagctcattacaggctttccggttttgattctgcacgacagcagcgacggactgttttattttgtccgctcctactattactccggatgggtgagcgcgtcatgcattgcctctgccgagcgtgagaattatctcgaatatctctctcccgaaaagtttgtcacggtgcttgaacctgagataaaatgcggaaacacgattttgtcgatgggttctaagctaaaatatctctcggaggacaaggaaaagttctatgtttctgttcctgcgcgggatgaggacggtaagctgtcgtttgcggagcactcgcttgacaaaagggcggcatgctacggatatctcacgtacaacatgaaaaactactacaggcaggcgttctcgtacctcggaactatgtacggctggggcggagatggcggcggtgtggactgctcaggcttcgtttgcgcagtcttccgcacattcggaatatatctgccgaggaatacgggtgaacaggctcgatataacggcacggttctatcgtttgagaaccaaagtgcagctgaaattttgaacggcgtaaaatatcctgcttcggttcacagaaaagggcacgttatgctgtatcttggggaaaaggatgggatatactatattatccatgcgccgaagggtggtgagagagtatgcattgctcccgtatccgttcccggaaaccttacaaatgtttgcgtgataaaataatttcctgctctttcctaaaattcacaacaatcataatatgttttagttgacttatgttgacttttgatatataattatattgtatttttacggaatcaaaatttaaggaggcatcatcttgaaagaatcaaaaaattatcctctctatgaagttacaccggtcaattccattcgtgagctgcttgacattgccgaagcagaagttccagaaaaaatcgcatttaaatacagggtcaaggacgacatcatcaaggaaatcaagtacgccgagttcatccgtgacgtaaacgctgtcggttctgctttatgcgagcttggcgttgtcggagagcacattgcgcaaatcggtgaaaacagttacagatggatcaatgtttatctgaccgtgcttgccggaaacggcgtttatattcccgttgacaaggatctgccggacggagacattatcaatatcttaaagcacagtgacgcatccgttctgttctattcaagcaagtttgacgactttgtccaaaagtacgccgcgtcggagcttgccgatattcactacttcatccgtatatgcaataacgaagaaatagcggacgagatacccgaatattttggaacaaatccgcgcttcctttcgtttgaaaagctgaaggagcatggctatgagcttcttgacaacggatatgacgaatatctcaagagacacagcgagccttatgacctcaaaatgatagtctatacctccggcactaccggtcttgctaagggcgtaatgctttgcgagcacaaccttgtatctatagtttattacggacttcaggtttccaccgtttatgaaacatacctctcagtcctgccttatcatcacacatacgaggcggtcgcaggtcttctcgtgtctctgcatcatcactccacaatctgtataaacgaaaacctcaaatcagtcatgaaaaatctcgtgacatacaagccggactacatttaccttgttcccgcattcgccgaggaattctaccgcagaatatgggctaccgcaaaacgttccggcaaggaaaaaggtctccagactctcattaagacgagcaacaatcttcgcaaggtaggaatcgacgcacgacgcaagttcttctctactatccatgaaaacttcggcggaaacctcaagaaaatcgtatgcggcggcgctcccattcgtcccgaaatcggcgagttctttgacgacatcggaatcaacctgataaacggctacggaattacggaatgttctccccttgttgcggcaaaccgtgacttcttcaacgactggaacactgtcggctgcgttcttccctgctgtgaaataaagcttgaagacgtaactcccgaaggaattggcgaaatatgcgtcaagggtgacatcgtaatgctcggatactacaaaatgcccgaggaaaccgccgaagttctctcaagcgacggatggttcagaaccggtgactacggcaagataaactccaaggaacagcttataattaccggacgcaagaagaacatcatagttctctcaaacggtaaaaacgtatatcccgaagaaatcgaaaactacatccagaacatcccgtatgtcaaggaagttgtggtttacggcttaaagaacgaatacggcgaagaatacaagctgtgcgccgaggtattcctgaacgcggaaaagctcgaagaaatgggcgttacagatcccgcagatatgcttaaagcagatatatcaaaggcgtgcgcttcccttccggtttacaaaaacatcggtaaaatagtaatccgctcgaaggaattcgacaaaacaacgacaaacaaaattaagagacagagcataactcacgacgacaaggaagctgaataaagaaaaggcaggtcagggtaaaaatcccgagcctgctttttgttatgcaataaaaaagtcctgatttatagtcaggacaattttttaagcttatctgcctgtcattttgtaacaagcaaatatatcagaaagccttgcggctgttgttttcccaataaagggtcatcacttaatgaacttctcgaactcgaagtagcagtcatggtcggtttcaacgtagatttcatcccacgaaacctttgcgagagttacgccgaggaagctctttgcattgagtctgtgcttaccgtttacaagtgtaacatcgtacgggcacttagatgcaatacgggcaaattcgaggatatcgtttgttgtgataagttctaccttgtaaagatatttgctgttgcagatcatatgagtacctcctgtacaacgatcgtattttgttttacgaccaactgaattattttctttggcttggctttctttatttccccttgccgtgttatattatactcagatttttttcaaagtcaataggcaaaatagatgttctccctattgaccgattagagtttcacgtccgaaagcccgattgttgtttttgcacaattcgaatgagcgcaagttgtgcaagtgcgataagcgacaaggctgtagtgttgtttgatgtatgaacatttgtttttatgcgcattgttaattccccgcggataattttgtgactgtttgtacagaatatagcatagccaaacaaattaatcggagttttatcatgaaagacaatgaattaaccttatctcggcgggttttcatactctcggcggggtctgttaccggacaaaaggagaaaaacggtccgctcggcaagctgtttgacatatcgggagacgacaaattcggcaaggatacatgggaaaaatcggaagcggagatgcagaggcttgcactgagaatcgctctcaacaaatcgggaatcagcgaaaacgacattgacgcgctgtttgcgggagacctcatcaatcagtgcatttcgtcgagctttgggcttatttcgttcaacattccgtttttagggctgttcggagcttgctccactgcggctgagggcatgataatgtcggcggtatatgcgtcgtccgtatgcagaagatgcgcttcagtgacgtcctcccacttctgctcagcagaaagacagttcagatatcccctcgaatacggcggacagcgacctcctacagctcagtggaccgtgacgggagcgggtgcgtttgtgtattcttccgatgtgcgggatcttatggcatatcaatatgacacggtaccggaaatagtctctgtaatgcccgggctgctcactgactggggtataaccgacgccggaaacatgggtgcagctatggctcccgcggcttctgacacgcttgagaggttcatggcgcaccattctccgagcgaatacgacatgataataacaggcgacctcggaagagaaggaagcgcaatactcgtagatttactgaaatcaaagaacattgacatatcgggaaatcacgttgactgcggcatgatgatttataattcagacaaatcagacacacacgccggtgcttcgggatgcgggtgcagtgcggtggtcatggcggcggacatactcgaaaacattcgtcaaggcaaactgaaaaaggtgctgttcatggctactggcgcgctgatgaatactctttcggtgaatcagggacagtcgataccgggagttgctcatcttgtggagatacactcggcggatgtcactaagctgagaggagaaaaacaatgctgattgaatatgtacgtgcgttttgcgtgggcgggctgttctgtcttatcgcgcagattcttatcgacaaaaccatgctgactccggcgcgtattcttgtgtcgtatgttgttgcgggagtgctgctcggagctgtcggtatatacaagcctattgtggatttcgcgggtgctggggcaagcgtgcctttgacgggattcgggtatctcattagtaaaggggtacgcgaagctgtggacaaggacggtcttctcggtgcgctgacaggaggaatgaccgcatcggcaggaggaatcacggcggcattgtttttcggattatgtatgtcgctgattttcaaaagcaagccgaaaaacgtgaaataaagaaagaactgctcgcgcggaaattctctctccgtttgagcagatcttttgttatttgctttcctttgtgtcaacaagattgccgtaattgtcaataagcgacgctgtgtcgtcctttgagtcgtgccatacgttcgtttcgttccagataatgtctccatcacttcccttgcaggcgagagtcagcgtttctccggcttttattaccgttcctttcgggaagcagaagacctcaccgccgcggcttgaagtgacataccatccagacaggtcaacatcatatccggctttgtttttgagcattaatgtctgagtggactttgaaacgctgtcgatttttatcttttctgcactcgcggatgtttcaaagttgtcgaatatgattcttccgtcctcttctattttcatcataattccgaggtcgtagtcttcggtgatgtagacttcgcagttgtttttttcgagagcttcaatgacgttttcatttgcggagcgttcttcctcttcggtagaggtgctgattaccgcgtattcaggctgtgccgattcaatgaatttttcagaggtcgcgtcttttctgccgtggtgtcctaccttcagcacgtcgcacttgaagtctatcccggcattgagcagacttttttcttcctccttcttcatgtctcccgcgaaaagcaccgtcactccgttcactctcagtctcagcacgagcgaattgttgttatcgtcatctgcgttatattttataggcccgagaacttcaaaatacacgccgtcgccagcgcttaccacttctcccgggtcgagctttacaagagtatccttcacggcagctccctctatcacgtacatatccccgcatatcgacgaagaatatacgcactcaacctcgtatttgtcgcggatgtagctgtagcctccgacatggtcgcggtcgggatgagtgatgaacacgccggagagcttatctactccgagagcctcaagagcggcgaaggtgtacggcacggactcgcttgttccggtgtctatcatgtaatagctgccgtcgatgtctacgattatagagtccgcctttcctacgttgacgaatagtacgctcacatcatgctcactggacggcgtaatgtttctccagtcatctttcatcactttattctgatgctccgagcttacttccgctgttgtttcggtttgggtctcttccgtttcgatatcgttcgcgcatgaaacaaaagataacgcaattattgccgcgaaaaatgctttgattcttctcaaaaatcagccctccatagtatttgacgaatgaaccacggacgcgagcttgtatataacctccgctgcttcccctcttgttgacggagcctgcggttcaagctttgtctgctcatttccgggttcaaggattctgttttttatgcagtatttaattccgtcgactgcccagtttgatataaggctgctgtcttcgtattcgataaccgtgccgcttgtgtctgtctcgccgaagccgaacatactgccacattcagccgcgattttgtacatctgctcacgcgttatgacgtctgtaggagcgaatttgccgttccccatgccgttcacgagatttttctcacttgcccactctacatacggcgagaaccaatatcccgctttcacatcgctgtagaccgtcccttgatacatagcagtatcgacgccgcatagtctgcctaaaaccgtgacgaacattgctcgtgtcaggctgtggttaggcgcgaatctgtttgacgaaactccgctgaacagaccgtgattgtatacatattttatcgcaggatagtttttgtcgagctttgacacatcctcaaacgggaactgccgccttgtatattccgcatcaaagtccttcatctcaaagtattcgatacggtgttcggttgaatttggcgagtcggagatatagtattcgagcgtgtttttatagatatttgagccgtagagagtttcgccttcctttgcttcatagaaaacgcttactcttcccgtcattgtgttgtaggcggcaatttcgctcggtgtgtttataaaaacatttccgaggaaagtcgatactcccgagaaaacgcctatccagtatcttttgtcattctcgctcatgtaccatttttcctcaaacgtgaatatcgtgctccggctttccgcgtctgagaatttgcgtgagacaagggatgcggcgttctggtcgatataataccattttccgccggaatacaccatgcgcgaggacacgttcttccatatgccgtccttgtatttctcggaagttgaggtgaagcggcttatccatcccgtgtgagggtttgcggcgtttttcatttcttcatcgttcagaagaaaatagtcgtgcagcactcttcccgttctgtcaggagtcgggtcgtcgaacacaaggtcaacatgataccactcgtcgccgagctttactatattccatgaatgattcatttccggagaaataaccatgtagcactctattccaatctcacgcatcaccgcagcatatgccagcgaatacgcctgacaaactcccttgcgctctgtgaacagtccgtatgcgtcataaaccgtctcatcgttgtcatattcatacgacgcggcgaagtagtcatgcacccacagtgccttctcaacatttgtcattccgacgtcgatttgagacacgatatagcttatctcttcatcatatcgttttacggcggcttttctttcatcggcgttcattgtatacgagaagtacagccgtgtcacataatgtatcagtccgaggtcattgtagtagtatcttatctgcttatcgaggtagaaaaactccggcgaggtctggtataggtctccgtagatttttataatgtcgtccgttgtgattttatactgtgtgaggtcaacatagtcgtctccgtcagccaccgcttcatacattgccttgtacgcttcgtcgtagttgtcgatcatatccctgtacggagacacgatgtagtcgttcgcgtaaaccgtgactgcgcagaacacggagacaaacaaaatcacaagcgaaaataatgcttttttcattattatcctatatttactaattagtttagcagattaaaagtgttgttctatcaaattttattaatgtaaaattacaaaaatagctcgtttttataaacaaaggctccaaaaaacattattagccgaactctcggtgtgaaagtacggctaaaatgattcctgttatactaaaattatctgaattcgtcgatgaggacgtgcatatctcttacaaggtcgggaacttcaacggttctgccgcactcaaacgcgagccaacggtcatatcctgtattctggattgccttgaagatgttcttgtagttgagttcacctgtgccgggctgatttcttcccgggttgtctgcgatgtggaagtgacctatcatgtcgatgttctcggtaatattgcggatgacattaccctctgaaatctgctgatgatagatatcgaagaggagcttgcagttcttgctgtcgacagccttgagcattcttactgcttctttggttgttacaaggaagtatcccttgtggttaacaagaacgttgagcggctcgagaattatcataatgccctcttcttcagcgatgtgggacatttccgcgagagtctttacgcatatctcaaactgttcttcgcgggacacgtcaaatctttcgttgccggttgtcgcgatgatgttcggaacgttcatagccttagctgcggcaacggattcacggaatgcttcgacgaagggctttcttgtgtcttcccataccatgccgtggctccactggatagcgctgttgtactcctgatttgcggactggatgatgatagcggtagaggtaactcctgtttcgtcgagtgtcttcttagccttatcaaagtcaagaccgagccaaccgagctgttctacgccgtcaaaaccgtaacggtagccgagctctactttgttataccagtccgaaccccaccaaccgcctgctgctgaaaatttcataatcttttcctccgtagttattttaaaaacgagcgaattaattataatgattttacagtataatatcgagtttgtcaagcactatttattaaaattgtatattcaattggaattttttcggcaatcctcctgcggaatcggtcaattcttgctcatttgcggctttattcccgtaacttcctgttgaatcctccgacaaatagctgtataatagtaatacagaaagggagatgttatgctaaaaagaattatttcatttgctctcgtcctgctcactctttcgtggatgggcattatcttttcgttctcatgtgaaaacgggggtgagtctgcggagtcgtcgggcggattcatcagaaaaatcgtttcggtaatcgacggtgactttgacacgctctcgccggaggaacagacgaaaatcgttgaaaagtacgatcattttgtgagaaaagccgcacatttcagcatatacgcggtgcttggcggactgttatacctgacggcgttttctctcggagcggacaaaaagaaagggtacgtcgtgtcagtcgtcataggcgcgctttacgcagtttcggatgaggtgcaccaatacttcgtccccggaagagcctgcatgatacgcgatatgctgctcgacagtgtgggagttgctatcggtgcggcagttcttttgggacttgtgcatattatcgtgaaaaaaactaataggagaagcgcgtaactcctcctatttttgtttttacagcatttttataagatccgggatgcattcctcgaattttacactgtaccagtgttccttgtctccgatggtgtgttttatgcagtcgacagtcatctctaccgcaattttctcggcttcaagcagggtctttcctctgaggagtgccgcaaacatggttgacgcgaaaacatcccctgttccgtggcagcttacaggaagattttcttgatagtacgagctgaactccccgctttcacggtcatatccgactactccctgcttatcaggtgcggacttatatcgaactcccgttattgctgcggtttttggaccaagctccgtcagcttcacgagagtttttttgatgtagtcctcgtcgtatgttccggcttcacgatattcgacgcaggtaagaagcgatgcctcggtgatgttcggtgtgataatgtcggcttttccgcacagctttcgcatggcttcaacgattttttcgtcaaatccggggtacagctttccgttgtccgccattaccgtgtctatgaacacaagcggcggcgcaaattcgtcgacaaaattttctatcatttcagcctgttcgggtgagccgagatagcctgtgtatactccgtcgaatttcagtccttccctctgccaatgctccgtgattttgggaatgtcctcgctgaggtcgcggaacgtccatcctttgaagcctcccgtgtgagttgatagaaccgctgtaggaataacggcgcactctactcccatcgcggaaattatcggaagcgcaaccgttatcgaacactttccgaagcatgatatatcctgtattgttaccgctcttttcactttatactccaaatagttttttaaggataagcttcctcagtataatactgccgagcggcaaaatcaagcgttattctgtgaacagaagctgtcttgcctgtccgccgacaagagttacttcttttacttcctccatcgggagctttactttcactgttttgtcggtatctgagtaaagcgttacggatttcacaacgcccctcttccattcagccgataccgtaacatttccgcgggctttgaagttttcaaactttcctgagatatctgtcggaagtgcgggaagtattgcgatatatccctcgtggctctgcataagcatttcaccgatacctgcgccgccgccgaagttaccgtcaatctggaacggaggatgtgtgtcgaacaggttcgggagagttgaacgtgtgaacagtgctctgacgttctcatatgctttgtcagcttttccgagacgtgcgaagaggtttataagccatgctcttgaccaaccggtatgaccgccgccggacgcgagacgaagctccatcgttctctcgattgccttgaacagctctggtgtggagtggttaatctcagccgccggataaagtccgaagccgtgtgagatatgtctgtgtccgggttcgacttcatcataatccttgagccattccatgagctgaccgcgctttcccactctgagaggaggcatttttgctctgagttcacgtgctttcgcggcgttctccgggcatattccgaggatatcttcaacctgtgcgtagaaatcaaaaagtccgccgactatttctatatccattgtgggggatatcgcgaggaaaatctgcttcttttcgccgtctacgtccttataatagcggttttcgggagaggtagacggtcctgtgtgcatatatccgtctttgccttcaaacatattgtcgaagaagaattccgcgcactcacgaatgtatgtgtaggctgtatttctgaggaagtccttgtcttctgtgtagagatagtgctcccagaggtggtacgcgagccatgctcctccgagaggccaaagtccccacaatccgtctgccgccgcagcgaatccgtagatatcggacaggtgatgcacaaccataccacggctctcataattctcacgcgcgactttcttgcctccggggagcaggtatttgttcatgtagtcgaacaatgcggaagtacactcgccgaggtttgcttcctctgcctgccagtagttcatttggaggttgatgttcgtgtggtagtctgatgaccacggaggtgttaagccgtcagcccatacgccttgcaggttagccggaagagtgccgtttctgctggagcttacgagcaggtacttgccaaactgccagtaaagcgccatcaagctatagtcgtgtgcttcaggctcgtttttcagtctctcaagtctttccgtagccgtaagttctgacaattccgcgtcatcttcaagctcaaggctcgagcgtcccataatggctgaaaagtcggcgatatgctctctcttcatctcatcgtagctcttgtcggcatggctcagaagttcttcctttgccgagactaaatcggaatgcttgaatgtcgtgactatgcaggtgtaaagctcgatatatccggcttcttctatggtgattccggtgagatccgccgtctgctttccgtccgttttgattctgacgcagaccttgaagccgttgtcgccgtacattgtcttgcagtttgcttcaagaattcccgcgcggtatgtaacggacacgactttttcgcgtgtgaagtttatcgaagccgagaatttcttatccgcagaatatcttgcgcagataagcgacgccggatatgaagcgaaatattctctttcatattttccgccgtcctttgtgtgcgagatattgagaatgccgtttgtcaggtcaaggtcgcggcggtagttttcgcattcaccgttttcgtgaagtcttacattgataattcccgcgtattcgtaggattttatcctgttgaagcactcgctcatgttttcagtagtccaagcgtcggcttcttcttcgcggtcgtcaatgaaaagctgtcgtatgtaccttattttttcggcatatccttcgacctttgtgccaacctcaccgcccgaccatatggactcttcgttcagtgtgagcttgtccgatgctactccgccgaacaccatcatgccggatgtgccgttgcctatcggagacgcgttttcccattcgttcgcgggatttgccaaatgaagaatagatttgttcatgtattatctcccttaaattatgttgatacaaacttgttacaaaaccatcattttgtaaatcacgttcaataataattcaagtataaaataatatattctccgtgtcaatacatttttgcgtttttctcgcgaatttttttgtcttattcttcttttttcggttttatgcttgagagcgggttcttgctcatcgcttcttccatgtgctcgtcggaaacatgagtgtatatctgtgtggtattgagctgctcgtgcccgagaatgtccttaagcacgcgaatgtctacatctcccgactgatacatgagcgtcgcggcggtgtgtctcagcttatgcgtggagtagtttttgtattcaagtcccgcttcgccgagatatttcttcaccatccactgaaccgtcttcacggacagtcttgtgccgaggcgggagagaaacattgcacgctccccgctgacctttggcttttcggcgttccgtatcggcatatacgcttcaattgcagctcggcaggcgtcgttcaggtagactattctctccttagagccttttcccgtgaccttcagcatatgcatatccttgtcgaaatcggttaagttgattccgcaaagctccgacagacgaagtccgcagtttagaaagagcgtcagtatgcagtaatctctttcacgggtctttgactccttatcgtttgtcacgctgtcgagcagatccacgcattcgtcaacgctgaggtgcttcgggagctttttcggctgcttcggaccttcgatattcgcgacagggtcgttttcaaacaccattattcttgcggtgcagtatttgtagaactgttttatcgcggacagctttctcgctctcgcgtcggttttgttttctctttcgtttttgacatatgacaggaatgaatacacctctgtgcttgttacagacgcgaaaaactcagtgtcaagtcccgttatgtcgattttttcaaactcttcaccttcgagcgggagtgaatttctttccgccaaaagatattttgaaaacgttctgaggtcaaatagatactccgtcacggtttttgtcgagcatccctgcaccacttctttataattcgcgaatctcctgataagctcgggaaattcgcttttaaattctctttcgtccattttataccccggttcatggtttcagtataatttaattataacgcggtcttccctcaaaagtgcagtaaactttaatgttttgatggatagtttgtaaactttcgcgttatagtcttgtaattggagagaaaaaacaatagaatatatatagtaaacacacgcgcttatttttttgcgcattttagtaataatctggagaacatatgaaagatttttggagtgaaaactcaaaaattatcggcaagatcatattgaaccaattcggagcgaccttcctcggaatcatggtcgtcacagccgcatcttccgctcaaagtcaaaaggcgtggctcatgctgtttgcaagcgtctttgcttcactgttctacctctttctcgtttacaacgttatctgggaaaagggcggtcaggacagaatcaagatagacggcggacgcgctgcaagaaagccgctcaaaggtcttatgatttctcttgtcgctaacatacctaattttattttagctttaatcgtgcttatttcaaatcctttcaaggaaactgctgcatgggcggcttcgcttaacgttgccggaagagcgctttgcctgctttgggaaggaatgtacgcaggtcttgtttcgtacttctccccccacaatcctattatacatctgctctacatcttccccgcactcgcagttacgactttcggatacattctcggcttaaacaacaagcgcattttatcggtctttgaattaaagcagccgaaaaaataatgcctgtgcattgctgtataagaaactttctatccgcacgatccgcctgaaacggtaatgcggatatttttttgcataaaggagtttaaactgtcttcatcatgtcttttataaagaaaacactgtccgccgctaaaaatctcaaagcaaagagcattattgtatcgctcctcggttctgctattctcgcgttcgggctgtataacgtccactcgatatcatccgttaccgaaggaggcgtgctcggacttacgcttctcctgcaccactggctgagcatttctcctgccataagcggttttataatgaacgccgcgtgctatctgctcggatggaaaacgctcggtacggaatttatcatatactccgtcatctcgagcgcaggattttcggttttctataagattttcgagctgttcccgccgttttatcccggttttgccgaccatccgcttctcgcttcaatagtcggagctttattcgtcggtatcggagtgggactgggcgttcgtgtaggtgcggcttccggcggggacgacgctctctcaatgtcattgtcgcacatcacgggcttgaagatagagacgatatatcttgtgtcggaccttgtcgtgcttctcgcgtcgctcagctacataccgctcagaagaattatctattccctgctcaccgttataatctcgggtcagctcatcggaatcgtgtcgcgcgtcaaacttccgctttcatccgcgaagtcagagaaatgacgtagtccgcaatatctgccgcggctttcggattgatatacttcttctgtgccgcgagcattttttccttctcagccgtattttccacaagctctacggtttcgatgacgagcttttcggagttgtcattgtgtagcgacattccgtgcgaggtgaaatagcgtatgttttcggtctcacatcccgggatggagttgatatgagctatcggtatgccgaacactgccgcttccgtgcttgtaagtccgccggcttttgtgaatattgcttccgacgcgctcatgtacttgtcaattttgtcggtaaatcccgtgattacggcggtgttcgagaattgctcctccattttctcacgcagctccttattactgccgcagactacgagtgggatatagcccgttttctccgcaattgctcttgtaacgtcaaacgcgtctcccgcacccatgcttcccgacattacaagaaaatattttttatcatcagcgaggctcagttctttcttggcttcgcttttttctgttttgcggttgaattttccggacaccggtattcctgtcgggatcattttttccctcggcatatttttcgcggcgtagacctcggtgaactcttctccgggagtgaaatagtaatccatctcggtgtcctcccagaacggtatgcaggtgtagtccgttgcgataccgaagcatggtacagtcagtctgtgccttcttttgagatatgtcagcgtttctatcgggtaaagatgaggggagactaccgcgtcatatccgttgtcctttatatacctgtacatttttccggctccgcggtgattggcgtaatatatgacggacttgaatttaggcgtggatatggcgtctccgatgtgatatacgcatccgaacagcttaggaacgcgctggacagctttgacatagatgtatgaggacgcatccttgacaagcggtatctcggtgaatactgctgcgtcaagcaaatcagtgtgaactccacgttcggataaagcttcataaacagcctttgcagcggcattatgtcctcctcccatgcttcgcgaaagaataagcaccttcataaccttactcctttactctgaaaacttctttattattcctaagaaaatctctccgtatttctcggctttgaccttaccgacgcctgataccgtgagaaattcttccatattcttcggcattaccctgcacatatcataaagcgcggcgtccgtgaaaataacgtaagccggaagcgcaagctctctcgcaagtctgagtctttccgcacggagctgttcgagaagtccaccgttctgccggctttcctcggaaattctcttcttctctttgactacggctttttcgggtgtcatgttctccttcatgtagacgtgtccttttccgagaagaacatccctcgatttcggcgtcagcgtcagtattttgtatattgatttttcgtcgatagagatatatccctgcattctgagagagtcgataacgcttcgtatgtattttgcagtgtttcccctcattatgccgtatgtcgagagtgaatccaagccgtgcttttctatctgctcattcatggagccgcgcagtatttccgtgattgtggtactgccgtaggtattgtttgttctcgcgatgcacgacagtatcttctgcgaatcctcggttatgtctttgagttcaaagtcgccgtcgcagtttgagcagttcgagcagttttcctgatgaacctcttcgccaaaataccgcagaagatacgcgcgcaggcatcccatcgttttgcagtagtccgccattttgtcaagccggtacagttcaagcctcctgagattctcgcgctcttcctccgttatgtcctgctgaggctcgcttttgtcgataaggaatttgttcagtacgatatcagagtcgctccagagcagtacgcattcggctttctcaccgtcacgtcccgctcttccggcttcctgataatagctttcgacatccttcggcatattgtagtgtatcacgaacgacacgtttgatttgtcgatacccatgccgaacgcgtttgtcgctaccattattttacacttatcgtaaataaaatcgtcctgggacttatgccgtgctccgtcgtccattcccgcgtgatatgcgagagccggatagccgtgtgagttcagcattgccgcgacgtcttccactccgtttctcgttccgcagtagactattccggttttgtcggagtatctttcgcgaatcagtttaagaagctccgagttttttgaattttttgtcgttcggattacttcaaaacggagattcggtctgtcaaagcttgtcgtcacctcaaaaggggattcaagcgcgaggagattctttatgtcttcccttactctgtcagtagctgtagcggtgaaagctccgacagtcggtcttttcgaaaaaaacgagatgaaattctttatcccgaggtaagccggacgaaaatcctgtccccatcccgacacgcaatgcgcttcatctactgcaacaaggcttatgtcaaggtcggagcaggcggacaaaaagtcatccgacaaaagccgttcgggagcgagataaattatcttataaactcccgcacgcatattcgcaaggaccttcagatactgcccgtatgacagcgaagagttgatatatgccgctctcactcccgactgaacgagagacataacctgatccttcatcagcgaaataaggggagagactactatcgtaattccgtcacacatgagtgcaggtatctgatagcacaccgattttccaccgccggtcggcattacagcaagcacgtctcttccctcagacagcgcgtcgattatctcagcctgtccgtttctgaattcgctgtgtccgaaaacttcaccgagtattttgtatttatccaccatttatctgatatttttaatctttttggcagtaatgtaccatcttttgcaattttcgtccggctttgagaaatcatatccggcgctgatatcgacaatttccatgccacactcaccgagagcgttttttagtgctttcttgccgtatgacctctcactctcgattccgtcctctctgtgccaaactccgtttttctcgcggaatacagtaaggcagaagtcaaccttgtcctgcttcttgttcagtctgtttctccagcagcacataacgccgtcatcctctaaaacatagtcgcggtctgcgtagtcggttttgaatttgtgcggagtattgacgtcaaatacaaacactcccccgtcctcaagataattattgacaagagcaaagcattcaagcagctcctcacgggaaagcaggtgatttattccgtcaaggcaacatatcaccgcgtcaaccgttccgtaaagctcaaagccgcacatatcgctctcaacgaacaaaacatccttcagtcctgcctctctcacacggttttcagctacagacagcatttcctcggaaatatcgagcgctgtcatatcgtatccgcggcgtgcaagctcaagcgtcatgcttcccgtaccgcagccaagctcaaggacggacttaatttccttttctggcgaaaactttttaaagcattcctcgatgtaatctgcccagagagaatagtcgaccgtgtcgttcagcttatcgtaaaccagcgcgagaatggaatatccgctcagtgaaaattcttctgccatatccgcgcctctcagaaattaaacttagagtcgtcttcgggcagtctgattccacgcctgtcgagacgtctgataatctcgcggtagcctccgttgccgtatttgagacagcggtttatgcggcttatggtagcggtgctgagtccggtgttgtcggaaatctcggtatatactttgcaggtatcgagcattttcgcaccgcacatacgcttagccatctcttcaagctcttttatcgtacataaatcctcaaaaaagttgtagcagtcttctatagtttcaagtgagagtatagcctcaaaaaggtaatccttcgcggcgtctcttctttcgtccttcaacataattcctcctgaaaagtttttcttttattataacgcatttttttcgtaaagtaaagtgcatattttttaataataaattttatttgatttttttctcttgttgtgatatcatggtattaataaatatcacaaaataattcggagtaatcatggacaatatcgtactgtattacacaagctccacgggctgtacatcgcgctctctgctcttgaaggctatagaaaagcattacggcatttccgaggacaaactcgagcttgtgcatgaatatggcag

SEQ ID NO: 2894 - DNA, 2898 bp, Unknown
  16S sequences of unknown bacteria
ttacgccggtgctgctgtcgctgggcagggacaggaagccgcacgcgaacgcttttcttctcgtcattccgcacgccagcggcatggagattatcgcgccctccggaatgttctgtatcgctatgccgagcgacagcgaaaaagccccggcgaaggttattccggaattcccggacagagctccggcgagcgcgacgcccaccgccattccctccgggatattgtgaagcgtcacggcggcggcgagcagtctcgttttccggcgcggttcgtcattgtccggtatctccggggacagcctgtcggtgagaatcagaaagagcacgccggctgaaaacccgatgagcgcttccagccatcgtccgtcagacatatcaatcgccggaattatgagcgaccagaccgaggcggcgagcatcaccccggaggcgaaccccgtgagtatcatgctcccgcccggtctgccgctctttttcatgaaaaacacaagcagcgcgccgagcgttgtcccggcgagcggaataaacagaataaggaaagccatcatatcagacatcagacctttcgtaaacctgagtattaccggattcccggcattatcagtatatttcgctgtctatttctctgtccgctgtcttcatttcctgcgatacccttaatgtataaagcttttaggaagggggcgcgggggagacctttttctccgaaaaaggtctcccccgcataattatctgattttttcgaagtcctcggccccgtgcttgcagagcgggcagatgaagtccgcggggagctcttcgccttcgtagacgtagccgcagaccttgcagatccagccggtcttcttttcctcgatgacagatggcttcggttttatgtgttcgtagtaataagcgtaggtgagggacggcgcgtccgagagaatctcggcggcagtcacttcggcggtgaacagcgtgtgggtgccatagtcctcggcggagatgacctttgccgagagaaccgcgttggtgtttccggtgaggtacgtgagaccgttcgctgtgcgggcgacgtcggaacgtccgctcagcttgtcgtgatctctgccgctgacaaagccgaggtcctttatgaggtcgaacggggtcgattcggtgaggacagagacattgaagacgccggtcttctttatcgtttccgcggtcaggtttgagttattgacggcgacggtgacgcgtttcgggttgtcggtgagctgggttacggtgttcacgatgcaggcgttgtccttcgcaccgtcctttgtcgaaatcgcgtagaggccgtaggagagcttgtggaacgctttcggatcgagagccgtttccggagcttccggaatttcgggctttgggaaggagtccgcgatcgcgtcggcgagtgcgtcgaggtcagcttcctgagacggggtgagcgaggatctgattgtcagcttatcgccgatgaaggtcatgcccttgagcggctcaaggattccgcgcatcagatttcccgcggtcggcgcccaggaaccgttctcgatcagggatacgtatctgttcttaagcccgtgagcggcgatgtcgcggagcagatcgtccattctgacgaatattcccgcgttgtaggtcgcggatgcgaacacaaggtggctgtacctgaacgccgcggcgagaatatagtccgcggaagtcaccgaagcgtcataaacggctgtcctgacgccgcgctcacggagctttatcgccagagcctcagccgccgcggcggtgtgaccgtagaccgaggcgtacgtgacgacgacgccgttctcctcgggagtgtaagtcgaccatttcgcgtacttgtcgatgaaatcgccgagcttctcgcgccagacgaagccgtggagcgggcagatcatctttatgtcgagcccggaagcctttttcaggagcgcctgaacctgcgtgccgtatttgccgacaatgttgcagtagtaacgtctcgcctcatcgaggtaatctctcatgaaatcgacctcgtcggcgaagagcgcgccgttggtcgctccgaaggttccgaacgcgtcggcggagaagagtatcccgcggacggtatcaaacgtgaccatgacctccggccagtgaaccataggagccgcgacgaaagtgagcgaatgatgcccggtctcaaggacgccgccctcttttattgtcatgacgcgtccctcataggcgctgccgaagaactgctttatcatggcgtaaaccttgtcgccgcacacgagctttgttcccggataacggagaagaacctcgtcaagggtagcggaatggtcaggctccatatgctgcacgacgacatagtcgagctcccgcccgtccagcgcgtgtgcgagattctcgaagaactgccccgacacagccttgtcgaccgtatccatgaggacggttttgtcgtcatttatcaggtatgagttataggaaaccccggcgggaacgtcgtagacgccctcaaaaagcttgagccggcggtcgttcgccccgacccatgtgatgtcgtttgtgatctttcttgtgcagtgcatttgattatctcctttataagttattttctgattattctgaattcgctgcggtctgtctctatgatgccctccgcgcggagctttgagagctctgagctcatcgcgctgcggtcgacggcgaggtagtccgcgagctcctgacggtcgagcgggatgcggaagctgtcactcccggccttctccgactccgcgatcaggtatgacagcagcttgccgcgcgtagtgcgtcttgtcaggtgagtcagcctctccttcgattccgcggaggaaacggcgagcgtccgcgtcaggttcctgagcacccgcagatgacacccgcacacctcacg

SEQ ID NO: 2895 - DNA, 7134 bp, Unknown
  16S sequences of unknown bacteria
cggtgtggcaggggcttgaaaaggtcatttcggaatatctcgacggctacacccttgaccggattataagcgaatacaaggcccgccgggccgacgactatgttatatagaggtatatatgctgaatgaattttcccgaaccgagctgcttttaggaaaagaggcgctcgaaaagctttccggctgccgcgtggcggttttcggcgtggggggagtcggcggttatgtcgccgaaggccttgcccgaagcggcgtcggcgccctcgaccttattgacgacgacaaggtctgtttaaccaacatcaaccgtcagataatcgccgcccgctcgacggtgggcaaatataaggtcgacgtggcaaaggagcggctgcttgacataaatccgaaaattcgggtgaccgttcacaaaaccttctattgccccgaaacggcggaggaatttgattttaaggactacgattatgtggtcgacgccatcgactcggtgaccggcaaaatcgagttgtgcgttcaggccaaggcggccaacgtgcccataatctgctccatgggggcggggaacaagctcgacccaaccgccttcgaggtggccgacatttccaaaacctcggtatgtcccctagcaagggtcatgcgctatgagcttaaaaagcggggcattaaaaatgtcaaaactgtctattcaaaggagccgcccataactcccaaggataccgacgaaaacagctgtaaaaaccattgtatctgccccccgggtaccaagcgcaaatgcaccgcccgccgcgccgtccccggaagcgtggcctttgtgccgtcggtggtggggctgataatcgcaggcgaggtcataaaggaccttataaaataaaaaaaaccgaaggaaaattgagcggaagagactcttcgattttaaaagacagcattacgcatatactctgttcccttgcgtaacagcataaaagacagcattatgcaaagccccggctcccttgtgtaaagggagctgtcaaccgcaaggttgactgagggattgtccgtttataaacagccgccgatttttcgttcgggggtctttatgctgcaatccctccgtcacggctgcgccgcctccctttacacaaacgaggcttagcgaacacgttctttaacaaaaacggcctttgcccgaaaggacaaaagccgtttttttcatatttgattattcgacgtccgcaagcacgctgcccaccgttccgccgttaacctcgtggaaggtgcgggtaattccgatattggtgtgaagctcctttacctccgagcctccgttgaccacaagcttgattccgccgtttgcataggtcgctccattttcggtggcgtttacaaatatcgaatcgattttggtgttgttgagcacgatctgatttgccgactgctcgttggcaaatatggttgccttggcatacttgttttcatagctgcttgaaatgtcgcagttgttcataacggcgccgtgggtgccgtagaagttgattgcaaggctccattcgcccgaaattttgacgttttcgaggttcgaaacggtgccgccgtggaagtgcattgccctgccgccctttccgtcaaaggtcagatttttgacggtcacgccggtgcaatatgtggtgccgtagccgaaggaaagcagggtggctaaattttccacctgtgcgtcggtcatgtcggccgtgattttgtgcccgtttccgttaaaggtaattccgcttgcgtcaaaacgcaccgtttcgcttaatgtaacgtcgtcggaaagcacgatctcgtcgcccgccttggcatttgcggcggctgccttcagcgcatcgacggtgtcaaccgagaaaacggtctttttgtcatactcggcgttttcgtcatatttattgttatagctgtcgctctcgacggtgtcctgagttgcataaacggtgaccgaaatgccgtcgatggttttgttcatataatcgttgccggcggtctcctgcatatgccccttaatggtgaggggctcggaggtctcgtttgcgccgaggtgatgatcggagccgagatccgcgtcgtttatcgtccagtcaatgacattgttaagctgggcagagccctttatgccggaaatgacgatcttgtatttaagggcaagattgccgtcgtttttgacgtaaattttcggaagctcataggtgcagcccggttcccaaagaattttttcgctgccgtcggccttgacgaaattaagagtctcgccctcaatgctttggccgttttggtcaacaagcccgacattaagatttcccgaaacaattttgttgactccggtgcttgccgtgtcggtgaaccatgcaaaggtggcgcccgcaagcatagccgcacaaagcagcagggcgacagcgctcatgacaagcgctcttttggtgtttttgcttttcataaaatctactctccttttgcaaatcatatgtgattttaattccgatttgcataaatattatagcttgtgagagtatatttgtcaatatagaactacaatgatttataatttgtcacttttcacgtcaattcgacctaaaatacctcaatttcctccattttctcggggaaattttcctcttttgaacaaacggcgtatttatagccgtcaaaaaggtcgtattccttaaaaaatacgcctttcgcgtcggtgtcggcggcggaaagcttcgacagcccccgtcccgtcattttgacgcagctttccttcgccgcccaaattcgggcaaattcgccctccttgtcttcggcggtctcaaggcgggctttttcattttcggtaaaatatttttcggggattttttttgaaaagggcacctgtttttgacagtcgcagccgatttccccatccgacagggcgcacatgacccgctttcccgagtgggaaaggctgagatacagcataccgcttttcagaatgggcttgccccgtttatcaaagcaaacctcctcaaaaatgcccgccctttgcaaggcggccgtcagaagaagtcccccgaaaaggcttgaaatacggccgtcggggctttttttcatgagcacctttttttgccgttcgccgtcggcggcggcaaaggctttttcgaactcttcacccgtaagcgtccttgtctttgcaaaaaaaacctttgtcatgagcgtccctccccgtatattttacaatattttgccttgcgtttcaacaaaaaatcccgcgatacgccgagcgttcaaagaagggtatcggatttttgcaaaaatttttatcttttgcaaaaccgcagcccgcttaaaaacgatatatccgaaataagtaaaacaaacccctcggacaatgccggcgcatatccgaggggttacgattattgtgcaaaaatcagcaattaaaggaaataaatttccacgtttcttcttccgaattgatatgccgaagaacggctgtcgaagaaaaggtcgaccttaacggtggaatcgcttataaatccgccggtgtcggcagccttggccacgccgtagatatagcttccgtcggaggcgcggatgaacatgaccgttccgtaggggatctgacggggattgacggcgatgtagcccagctgtgcgggttcgcccacggcggtggtgttgccgtcctcggggcaataggcggtggcgacggcggttatgcacttggaatagttaagggggcggccgttttcgtccacctgaatggtgcttcccacattaagaggggagacaaggcggccgttgacgtcggcgcttgaggtgattcccgactgagatgtggaaacggctgcggccgcggcgggagcggtttcggctctttcgacgcttgcggcggcgggcttctgctttgttccctttaagatttcgcaggtcacaggctcgctgattgtctgctcgctgcgaagctcgcgggaaatttcgtttccgtcaagatagctgacggcataggtcttgtttacaaggccgtttgcgccctcggtgacggttttctgctcgccctcgtaaagctcgtcgctttcggtgcaaaccgtctcgaaggggatttcttcgctcaccgtctgctgcatgacatagttatatcccacatttaccgaggtgtcctcggtcagaatggtggaaaggtcaaggtcgcaggtatagctgacggtgggcaggcagcccattctttcaagtgctacctcaagcgaggtgcagagaaagtcggcgcttttggtttcgccgtccttggtgacggtcagggtgaggggggttccaaccgacagataaaatccgtcggcattttcataaagctcggtgccgtgtccctcggcaacatttattttgtatgccgagatcatttcgtcggcgtcggtgagcacggtggtaaaaacctgcttaacgccgttgttgaaaacggtcaggggcttttcgtccttgccggcggtgaatgcaaagaccgttcccgacatgaggaaggtcaaaacaagcaggacgataacgggggttctgacaaagcgaagtattccttttgcgttgtctttaacggtaaacataataatattcctttcgaagtgcgcagaggtaatttaaggcgcaaattttgcggccgacggcaaattttttgcccgccgcaacgaacattcaatattatatggaggcggtttaccttcgtcaacaagaggttttcaagttttttttggtgataaacacaagcataaattccaaaatgaaattataaaacggttacaaaagtgttacaaatctattatttggtattttctgtaatgcctttgtaacctcttttgtgcacttttactccgctgtgtgaattataatcacataactaaaatcccgttgttttcttttattttctcatcttttctttgattatcttaatattatgcgtttttgaacaaggaattttttcgcaaaaggttacaaatgatgacaaattgagtcggaatttgctcaaattttcgaaaaagtatcagatttgtaactttattattccgatatttaattaaaattaccttgaaaaaatccgatttttttgaaaaatgggggcaaaaaacatattttcataatattttttcgctcaaaatcggctctcggtgggaaaaaattctccgaaatcggcgaaaaaaatgaccaatgggtatttctccccgccttttccattcgatgaagatttgccctcgctccgacggtggcggcggagcaaaaagggaggcggcataaggctttttaagaggtcggatacgcccgcatttttccgactgaaatcagcccgaattttgcgcaaagggcggcgcattgatgatttaatttaaaattacggcggcatacttttgcccctcgacccaaaggagattacaaaaaatgttgaaactaccatgtatttatgttacaatataataaataaaatcgggcattttttcacggcgcccgactcaaaagaggagaaagcaatgaaaaaaggatttacaaaattcatcggtcttgcggcggcggcgggaatggtcttttcgtcccttttgccctctgcggccgagacctacatttcctccgaccttgttccgaattacgagggggtttattggagcgaagaggccgaaaagggaagggacccgagctttgttcccgaccttaaaaacgcgacctgccttgtggtggcaagcgacggcgacgacggcaatgtcggcacctttgcaaagcccttcaaaacccttgaaaaggcgcgggaaacggcaagagcctcctcggccgacagcgtcacggtttatattcgcggcgatttcacattgaccgaaccatttgtgcttgacgagcgcgacgagggggacgtctatgcctcctatcccgactcgccctccgcgatttcgggggcaaaaagctataatcttgcctcggctcggcgggtgaccgacgaaaaaatcctaagctctctcgagcacagcgaggttgccgaccgcctttacaccgtcaatctctggaacctctgtcccaacatgaccccctccgacattccctcaaaccgttcgccccttacatttaatataaactcctcccgcgagctttcgatgtcggcctatcccgaaaacggatttttgaaaatttccgaaaaaacgggggactattcctttaaggtggaggacgaaaagggcagactttccgccgcagaggccttcggctccgaaataatgggcagcacgccctattggttcggcggctaccccggcaacgactggtcctactacacggcgggggcggacatcgacttttcctccggggttatcgaggacaaaaccaaacagtcccactacggaataaacgtgggacagcgcattttcttctataatctcatttccgaaataaattccccgacagactatgcaatcgacgccgaccgcaacctctatttcaccctcgaggacggcgaaacccccgaaaattcctcccttttcataaacggctataagggcaatctttttgaggtaaagggaaacaacatcacggtaagcggccttaagttttccggcgtctacgacggctcggcggtgagcgtgacggcggagggctgcaccgtcaaaaactgccttttcgaggaaattcagaacggcacggcggtgacggcgaagggaaacaaaaacaaagttctcaactgctttttcaacaggctgggcgcaagctgcgtgaccgtcgagggcggaacgctgtcgcagccctcggaaaattcggttttcaactgtgatttttcgggctggggaagggccaatcgcacctatacccacgccgtcgcggcctacggctcgggcgcgaaaatttcccacaacaatatgttcgacgcccctcatcttgccatatatcttgagggcacaaaccacacggtggagtataacaagctgcagaatatctgcaccgaaacctccgacgccggcgccatatacaccgggcgcagctatttcaaccgcggcaacgtcataagatataactttttcgaaaatatcatacgctgcgagggggcgcaaagcggcttttgcagcgccgtttatcaggacgactgcggctcggtgataacaaatcattaacaaatagaccagatttatggggacattatggaattgc

SEQ ID NO: 2896 - DNA, 24304 bp, Unknown
  16S sequences of unknown bacteria
ctggtgtcattcagtcacaggatgactcgtcctggtgggacttggagagcggcgaagtcgtgcttcgtgcctacgccaccagcaaggaggtcaccgaggtcagcgaccgcattaccaccatcgaggagcagaaaatgctccggctcgtcatcatctcgtccaacgggaacatcttcaaaaacggcaatgtgaaaacgctgctttccgccaaggtgtactcgtgggatgaggacatcaccgacacgctggatgccaaccaatttgtctggacaagggtgtcggaggatacagaggcggacaaggtctggaatgaacagcatttcggcggcgcaaagtccgtggtcatcaccggtgcggatgtcaaaatccgcgccactttttattgtgacctcatcgacaccacgaccaggcagagcctgttataacggaggaattcactatggcaaccgcagaacccacaacagaaaccggcacagcgcccgtttctgatacaacaactttaaaggaggcttctcacatgagcaaagcacaaggccagtttaccatcatcgactacaatgacgcactgacactgacggggtacatcggatcgaacctcgccaagactcagatgtataaccccgacaacggcagttacacccccgactggaaaacgaagaacctcgttctgacacccagtctgtatgtcatcggcaccaccgccgaccaaatcgccaccgccaatgttacctcagtcaagtggtatgtgggcgacagtaacaccgccatcaccgcaggtacgaactacgctctcagtggtgccaagagccacatcctcacggtcaaggccaatgttatggcggagctgcccggcatcgactaccgctgcgtgattacctacaaggacgaaagcaccggcctttccatcacccatccgctgaccatttccttctcccgtgtggtcaatggcagcggcattgttgacctgctcgtcaccacgcctaacggaaatgtgttcaagaacgaggaggtcgccagtctgaccgccaaggccgagctgtggcgtggctctacggtggacaccaccaaggtcagctacaagtgggcggtcatggacggcagtattacctccaccacctccaccggctacgatgcagacttcggcatcggctggcgcaagctctcggataccgccgacaaatacaccggcacggccaccaataccctcacggtctacgccgcagcggtggacagctatgccgtattcaagtgctgcgcccaggacacagactccgcatccgcttcctacaacacgaagtttttcgatgtggcgaccttcatcgacaactccgacccgctgcagatcatcgtcacctccacgggcggcgatgtgttcaagaacggccagggtacgaccgtgctgaccgccgtctgctatcaggcaggctccgaggttgacgcagccggaaacggcagttacacctggacgaagtacaacaaggatggtgtagtcgatacctcttggggaaccaacggcagcaagaccggcaagaccctgtcggtgtccagcgcggatgtggataccaaagccaccttcatggtcgtggtttcgctttgaggaggtgacgggatgatcgcatcggcacagttcacgattatcagtctctgcgatgtggtcacctcggacacgccgccggagaacccctatgaggggcagctctgggtggatacttccgtgaccccgccggaaacgaagatatgggacggaaatgaatgggtggtgcagaacgacattgaaacgatccgcaccaccatttccattctgaccgagaaggacgcacagttccagcagaccatcgacgggctgaacagctatgtggcgaccctcaccgaaacggtggaaacggtgtccaacgaccagggcgtcctggaggaacgggtgctgaactccgaaagccgtgtttcggaattggaacacacggtggatggactgtccgtcaccatgcaggagcagtatatcggtggcatcaactatgtgcaaaactcttccggcctgaacggcatcacggatgattggagctattccggcaccgtaaaaacggatgcctccacggacacccagaacaacaccgtttccgactcctgctttgtgctgggcgcatactcctcgttgtcgcagtacatccgaggggtggttcccggcacttatacgatctcggttcgggcaaagaaaacctcgaccatgtccgggtatttctatgtgacctacaacgggaacaaaaccaggtacctgttcaataagtccacggcgtttgactggacggattattccgtaacgctcacggatgtgaccgaccccacgttgcgtatttactgctactgtcgggatgcgtccatttatctcgccgacatcatgatctccgaaggatcgatcccccgaaagtggacgcctgcacccaacgagatttacaccagcgaggtcaaaatcgacaagcgtggcatcgaggtatccaacagcgcatcatctcagcggacggtcatcacaaacacggagttcgccggttactacaacgatgaggtgattttcaccctgaacaaggacgaaacgcagaccaagaaaaccacggtggacggcgagctgaccgtgggtaaaacgaagtttgtcccgatgccaacggcgtccgatgggctgaatatcgtcattctggattaaggagggaaagctatggcaacttggaaaagcgcagcatacgatgggcgctatcttcaactggacatttcagaaagcgtgaatgtggtcaacaacagctcgacgctttcctggacgctgatctctaccggtggcgcttccacttactacaccattgacacgaccactgtaacgatcaatggtacgaccgtatactcaaaggaccgtacctattgggatgaccgtgttttcccggcaaagaaaggttctgtcagcggcacgatcaccgtagctcatgacagtaacggcagcaaaaccataatggtcggcttttctacccgtgtttatatctacggttcacaggaatacggcggcagcatgacgctgaccaccatcgaccgctctgcgcccacagttacattcagcacctcgaatgtcacggcaaacgggttcaaaatctccgctacatcctctgccacggcggacatctggcagtacagcacaaacggcggttcgagctggacgcagttctcaacgacggcatccaccagtgccagtgtgacgatcacctcgctctcaccgaatacaagctacacggtgagggtcagagcaaggcggcagtacaaccatgtctacggcacttccggcagttccacggtcaagacactgggcggtgctgtggtgaatagtgtcaacacggtgacggcggacaatgccacggtttccattaccatcaatgtgaccgtgtacgaagcctcctacaccaatacgctggtgctcaaaaacggcagcacgaccatcttgactatttccgggctttcctggtcgaggggcactgcgaaccgcacagtcacgttgacatcggcgcagaggacgacgctgctgaatgcaatggcatccatcaagtcgttcaccggcacttttgcagtttcgtcctacagcgggtctacgcagatcggcagtacttcaagcaagactgccacggtactgaccacggcaaccaattctgctccgaccataagcggattcacttatgccgacagctacacgaccacgaaaaacctcacgggcaacgatcagctgttcgtacaggactactcgactctcaaagttacaccgggaacagcgactgcgaagaacggtgccagcatttccaactacaccgcttcctgcaacggtttatccgcatccaatttgaccggcgctgcaattacggtcggaaagatcgccaagtccggcagtgtgacggtcacgctctcggtcacggactcccgcggctacaccgccgaaacttcacggacggtgacggtcattccgtacactaagccgaaaatatcctcggtgacgctccgacgaaccaacgatatcgaagcggaaatgcagctcaaattcagcggttctatttccgctgtgaccgttgacgggacgcagaaaaacagcgtggtttatgtgcggtatcggtacaagaaaaccagtgagagcagttacggcagctacaccagcatctattccggcacgacaaaaagcggaacctctttcagctactccaatttggaactgtgcagtctggatgcaaacagctcctacgacttccacttacagattcaagacaagctctattccttgagcagtctggatctgtattttactgtcccgcagggtacaccgctcattgcgcttcggaaaaagaaggtcggcatcaacacgccggagccacaagccatgctggatgttgccggggatatgcgtgttgatggctcacccctcgcagattttgtcattcagcaagggacaagcggcatctggaattaccgtaaatggaaaagcggtacagcggaatgttggggtcagtattcctttacgaccgccatttcgacggcatggggcgtgctctatgagagcggcgcaattgcgctccctaattttccatttaccttcgcggaaattcctcatgtccatatctccacggagaacagcaattacgccatgtttgtggagcgaggcagttcgagtagctggtctacaacgaccaaccccggaaagatatttgccgtaagaccaaatacggtaccatcggcaacctacaaagtatcaatctatgctatcggaaaagcgtgacgctccggcgtcacttttttcatacccatttttaatctcaaaggaggacaaacaacatgaaagaattctggacgaccattcaggtggtgttcgccggaatcggcggctggctgggatggttcttgggaggatgtgacggcttgctttatgcgcttctggctttcgtagtcatcgactacatcaccggcatcatgtgcgccgtggtggacaagaagctgtccagcgaagtaggattcaagggcattttcaaaaaggtgctcatcttcgccctggtcggcatcgggcatattctcgacacccgcgtcatcggcagcggctcggtgatgcgtactgccgtcattttcttctacctatcgaacgagggcgtgtccctgttggaaaacgccgcatacctgggactgcccattccgcagaagctgaaatccgtgctggagcagcttcatgaacgcagtgaaaaggaggatgaataacatggcttacacgaacagccccctggtgtcctacaccaaactcagtccgaaccactccgggcagcgcacccacagcattgaccgcatcacaccgcactgcgtggtgggtcagtgcagtgtggaaacgctgggcaacatctttttgccgacctcacggcaggcaagcagcaactacggcatcggcgtggacggtcgggtcgggatgtatgtggaagagaaaaaccgctcctggtgttcctcttccgcagccaacgaccagagagccgtcaccattgagtgtgccagcgacaacaccgagccttacgctttcaaggatgtggtgcacaagagactcatcgagctttgcaccgatatctgcaggcgcaacggcaaaaccaagctgctctggctcggcgataagaccaagacgctgaactacaccccgaaatctgacgagatggtgctgaccgtccacagatggtttgcgaacaagagctgtcccggcaactggatgtatgcccgtatgggcgatctggcatccaaggtcacggcagctctcggcagtgaggtgaagcctgccgacccagtcaagcccaccgggcctatcaaggtcggtgacctcgtgaccatcacgggcagcacctactataacggcaaagccattcccggctgggtgaagaagctccgctggtatgtggtagaggtcagcggcgaccgcacggtcatcaacaaggacgagttcggtaagtacgccatcatgtcgccggtcaagacctctgcgctcgccgtggcaggcacgaaaccctccgaggattaccgcatccacaccgtggtgcatggtgacaccctctgggcaatcgccaagaagtatctcggcaacggcagccgctataaggaaatcgtcagcctgaatgggctgaaaagcaatgtcatctacagcggtatgaagctgaagatcccgaataagtaacctttgcatacgccctctgcggattcatttccgtggagggcgttatttttttgcggaccagacaggcgttttccctccagtcggtactgaggcaaaccctcggactggaggaaaactctatgacagattggcagagagaacaaatacgaatattgcgcttacagggcgtcagttatgtgaaaatcggcgagcaactcggaatttcggataatacggtgcgctccttttgccgccgcagcgggctgggtgacagtgcaaagaatgccgttgcctgcaagcagtgtgggaagttgataaaaatcatccctaagcagaagccgaaaaagttctgctcagacgcctgccgcactgcatggtggaagtcacacccggagtgcgtcaaccgaaaagctgtttatgcgtacacctgtgcctgctgcggacgtcattttactgcctatggaaataatcatagaaggtactgctctcacgcctgctatattgcagatcgcttcggaagggagcgtggctgtgatgaatgacgcctacagagagcggctggagcagtattttgcctccatgctccaggcaaagcaaatgctgtcgatggggattttaaccccgaaggattacgccacgattgatacaattatggccgaaaaatatgggatatcttcgtgtagtttataccgcgggattgacttgatatacggtgagttcagaggtaatatgtcacactacaaggaggtgacacaatgtcaggaagaataaccgccgtatcaaaaccgccgaagctggagcgtaaaaagcgagtcgcagcctacgcccgtgtttccagtggcaaggacgccatgcttcactcgctgtccgcacaggtcagccattacagcgaccttatccagagaaatagcgactggctctatgcaggcgtctatgccgatgaagccaagaccggcacaaaggattccagagcggattttcaaaggcttattgccgactgccatgccggaaaaatcgatatggtgatcaccaagtccatctcccgctttgcacgaaacacggtcacgctgctgcagaccgtccgtgacttcaaagcctgggaggtggacattttctttgaagaacagaatatccacaccatgaacgccgacggtgaactgatgctgaccattctggcgtcctatgcgcaggaagaaagccgctccgcaagtgaaaaccagaagtggcgcattaagcggaactttgaggaaggaatgccgtggaacggagccatgctgggatatcgtctaaaggacggacggtacgagatcgttccaaaggaagccgcacttgtccgccgcatttataacgagtaccttgccggtgacggctatcaggctgttgccaaacggctgactgaggaaggtgttccgtcccgcttcggtgggaaatggaaccagtctgtggtttccaagatactgagtaactacacctatacgggcaatctgcttttgcagaaaaccttccgtgagaaccatatcacgaagaaaaccgtcatcaaccacggtgaattgccgaaataccacgcagagaacacccacgaagccattattgacatgaagacctttcatgcggttcagaccgagaaggcacggcgggcggctcagttcaataagaagccagcaccgagaaccacatacccattcacaagccttctggtatgcgacaactgcggaaagaactaccgccgcaagaccaccaaaacgggcatcgtttgggtatgcggaacctttaatacactcggcaaatccgcctgtgcttccaagcagataccggaaacaacgcttcaacaggttacagccgaagttttgggtgtaaaggcttttacacgggaacagctgcacagccggatacagagtattcgggtatgcaacggaaacattctaattttctgcttcaaagatggctcggaggtcacacgcacatggaaagaccgctcccgtagtgaaagctggacggacgagatgaaggaagctgcacgccaaaaagccttagagaggagcaagcacaatgcctaaagtaaccatgatacccgcaaccatcaatccgctgacacacctgccgaaggtggccgcgcagaagcggcgtgttgctggatatgcccgtgtttctaccgacagcgacgagcagttcaccagctacgaagcccaggtggattactacaccaaattcatacagtccaagccggaatgggacttcgtaaaagtatatacggatgagggtatttccggctgtaataccaaaaagcgagacggctttaacagtatggtttcggatgctcttgccggaaaaatcgacctcattgtcacaaagtcggtcagccgatttgccaggaacaccgtggacagcctggtcaccatccgcaagctgaaggaaaacggcgtggaatgttactttgaaaaggagggcattttcacatttgacggcaagggtgagctgctcatcaccatcatgtcgagccttgcccaagaagaaagccgcagcatttcggaaaacatcacctggggacagcgtaagagcttcgctgacggaaaggtgcatcttgcctataaacgcttccttggctacgaaaagggcgaggacggcagacctaccattgtggaaagtgaagcgaaaattgttcagctgatttaccgccttttccttgatggcaagtcacaggcgagcatttgcagatatttggaggacttgggtattccgtcacctggcggcaaggataaatggagtaagaccacggtcaccagcattctgcaaaatgaaaaatacaaaggcgatgcgctactccagaaatccttcacggtcgattttctggaaaagaggatgaagcccaacgagggtgaggtgccgcaatactatgtggaaggcagccatcccgccattgtcgatcctgacgaatgggatcatgtgcagacagagtttgccagaagaaaggcactgggcagagcctacagcggaaagagtgttctttcagccaagctggtctgcgaggactgcggtggcttcttcggctcaaaggtctggcattccaccgaccgctaccgccgtaccatctggcaatgcaatggcaagttcaaggctgaagaacgctgccatactcccacggtaaacatggaaaccgtgcagcggcttttcgctcaagcctacaaccggatgatggagaaccgggagcagatcatcaaggactgcgaaaccatgcgccgtgcgctgacagactttgcggaattggacgcagaaattgaacggcagcttgaggaaacgcaggtcgtagcagaactggtcaaggcggcagtcaaggaaaacgcttccacggcgcagtctcaggaggcttatctgagaaagtatgaagccctcaccgagcgttacgaaaaagccgctgcggaactggagcggttacagaacctgcgtactacgcaaagtcagcaagacaaggcaatggcactttacatccgcaccctcaaaaaacagccggtggtgctgcgtgagtggagcgacaccatctggacggtgatggtcgagaaggcaatcgtccacaggaacggtgcgattaccttcgttttcgagaacggcacagaggtcaaggtcggagaataagatacaagggcgcaaggtcgttcgtattttgggcgaacaggttttgcggcctttcttttgcgctcttgaggaataattaaaatgtgcacaccctttttgccgaaaatgcacacccccgactaaaatctgcacacccctcgaccttttgttaaaaagtgttatgggagaaaacgcaaaaggctccgcagcgaccgtttccggaacgccacgaagccttatatcgttaaaaagtatcgaaaagccttgcaaatcaaggactttgaaaaaagaaactggacaccaatcaagatacgcattgtatcaaaattggtgtccagttatggtcgagatgacaggattcgaacctgcggcctctgcgtcccgaacgcagcgctctaccaaactgagccacatctcgttttccgacaaactacattatattatccgaaaatgaatttgtcaagtataaaatgccgttcggttttcttttctttttgcggcgatacgcaaaacataaagaagcagcagaaacacccaagccgccatttcggcataggcgatgatcatgtttccgaaaagtccggctcccgcatatgaaagaatgatacgcagcacaaggtgggaaattcccgccgcacccgaaaagaccaaatcacccacaccctcgcagtatccgcgaagcgcggtggcaaggccgaaaacgggataaaagcaggcaattctgacaaaaaaatcggtgcctattttcacggctttctccccagctccgaaaagcgcgataatttttccgccggttggaatgacaaaggcggtgagaagcaccgaaacaccgagagcaagaacggttcccgccttaagacaaagacgggtctgctctttttctcctgctccgagatgccgcgacgccaccgccgaaatgcccgaaccgaggttgacaatgggaagcataacaagagtgtcgattcgataggcggtggttatggcgacgacggtgtcggtcccgaatccgttcatgaagttttggagtatgagacttccgacagaggtcacgcaggactgaatcatgggcggaagtccgtaggaaaatcccgcctttatcagttttgatgaaaacacctcttttgcaaaggataaacgaagttcgggatgctttacacggctgtaaagcacggtaaatacagtcatgagaacctgagaaatcacagttgcggcagcggctcccttcactccgaatttaagcaccgcaacaaatacaatgtcaagaccgacatttataaccgacgaaaccaccaccgacaggaaagggcttttgctgtcccccgccccgcgaagcaccgccgaatagacattgtaaacgccgagaaagggaaaaccgaaaaatataatccgaatataggagacagcaaggtcgaaggagtcgggagttgtgttgagcagacgcatgattccgcccgaaaaaaatgcgcaaacaaccgacacgacagagaaaaaaacggcaaaaatcacggcaaaacccgaaagcaggtttctgtttttttcggttttaccctctccgaaatttctcgccgcaagcaccgaaagaccgagcgcaaagccggtcatgagcgttataaaaaaattgaccacggccgtggtggagccgattgcggcaagagccgtctctccctcgacatttccgacaataaaggcgtcggcccagttataaagctgctgaagcattccgctgagcacaaggggaatgcaaaaaacgaccaatgatttcatcattgccgaaagctgatttttccgttccatttttccctccgaaaacaaaaacccgaccgaaaaacggccgggtgacaaaagcggcaaaaagctctaaaatttcactccgaagattttgtgatgtcattataatatactccgcaccgtttgtcaacattacccgccaaaacgggttttgccacaaccgccacgaacaaaaactttatcattcccgaaaacatcgattgattttatgccgcggcttgtccgaagggttgaagtaagagtgaagatataagaaataaaaagtaaaatcccgcccactaacgtgaacgggatttttggctgggatggctggatttgaaccagcgggtgacggagtcaaagtccgttgccttaaccgcttggctacatcccattataaaaataaggcgaacaacaaacagaaacctatttatcattcgcctttgtgtggggtgggtagtcggtctcgaaccgacggcctccagagccacaatctggcgctctagccaactgagctatatccaccacatccgacccgcttattataacagaaaaatttaataatgcaacccctaaatcgaatttttttaaacttttttcattttattttttatatattcaacctgccgctcaaccgatgcgcccgaagcacagccctttgactttcttctgactactgccgcctcgagatttacggcgtcgaaaatcccttcgtcgaaaagttcggaaaactttttatattccgaaagttcgagattttcaagcgttgtgttcttttcggtgcaataggccactatctcgccggttatgcggtaggcctctctgaagggcagtcccttggtgcaaagataatcggcacagtcggtggcgttgataaagccctttgcggccgctgctctcatgttttcgggaatggcggtgagggtatcaagcatgggaataaagacggtcagacactttttggccgttatgaccgaatcgaaaatcgcctccttatcctcctgcatatccttgttataggcaagcggaattcccttgagaagtgtcagcagcgcagtcaagtcgccgtaggctcttccggttttgcccctgataagctcggcaatgtcgggatttttcttttgcggcataatgcttgaacctgtggaaaaagcgtcggaaaggcggacaaagcggaattcccacgaacaccacatgattatttcctcgcaaaaacgggaaaggtgcatcattataatggcgatgtcgcttgcaagctcgacgcagaaatctctgtcggaaacaccgtcgatgctgttcatgcatgcttcgtcaaagccgagcagctcggccgtgcggtcgcggtttatgggaaaagccgttcccgatagggcgcagcttccaagcggactgacgttaagtctcttacggcagtcggcaagacgctccttatccctcacaaacatcattccgtaggcgcaaagatgatgtccgaaggtgatgggctgagcacgctgaagatgagtgtagccgggcatgacggtgtccttatattcctcggcctttttggctataaccccgaaaaggtcgcaaagcagcgaggaaatcgtgtcaagctgctcgcgaagataaagacgcacgtcgaccgccacctgatcgttgcggcttcgcgccgtgtgcagccgctttcccgcgtcgccgatacgctttgtaagctcaaattccacaaagctgtgaatatcctcggccgaagggtcgatttcaagactcccctcctctatttccgaaaggatttttttgagcgtgacgacaattttattcatgtcctcggccgaaataatgccctgctcgcaaagcattgtcgcatgggcaaccgagccctcgatgtcctgtttatacatcgctccgtcaaaggaaatcgacgaattgaaatcgtcggcattttcattaagagcggcgtgcagtccgttttcccaaagtttcacgaaaattctccttaaggcaggcacctttttcggcgcccgcagttttttaccgaaagaagccctcggaagattaccgccgagggcttttgaatattaaaatcagttgtccttcttctgaagcatggccttaaccttgatgggcagaccgaagaggttgataaatccgtcggcgtccttctgattgtaaacatcgtcggcgtcgaaggtggcatattcctcgctgtaaagagaatagggcgaggtcacgcctgcatttatcatgttgcctttataaagcttgagctttacgtcgccggtaacgtgctcctgagtcttgtccacaaaggcagacagcgcctcgcgcagaggagtgaaccactttccgtaatatacgagctcggcaaatttggccgcaacgagctctttataatgcatggtgtctctgtcgacgcaaagggtctcgagcaccgaatgagccttgtaaagaatggctccgccgggagtctcgtaaacgcctctcgacttcatacccacaagtctgttttccacaatgtcggcaaggccgatgccgttttcgccgcccagcttattaagggtttcgacgatttcaacggcgggcatttttttgccgtcaacggcaacgggaacacccttttcaaaagaaatagtcacataggtgggcttgtcgggagcctgctcgggagaaacgccgagctcaaggaagccttccttgttatactgaggctcgttggcgggatcctcaagatcaagaccctcatgggaaaggtgccaaaggtttttatcctttgaataattggtctcgcggttgattttcagcgggatgtcgtgagcctcggcatagtcgatttcctcgtctctcgacttgatgtcccaaattctccagggagcgatgatctccatttcgggagcaagagcctttatggtcagctcgaaacgaacctggtcgttacccttgccggtgcagccgtggcaaattgcgtcggcgccctcggccttggctatttcgcaaattctcttggcaatggaaggtctcgcaaaagcggttccgagaagatattcgccttcatagacggcgccggccttaagagtgggccagatataatcctcaacaaattcctgcttaagatcctcgatatagagcttggaagcaccggttttcagagccttttcctcaagaccgtcaagctcggttccctgccccacgtcgcccgaaacggcgatgacctcgcagttgttatagttctccttcagccaaggaatgatgatagaagtgtcaagtcctcccgaataggcaagaacgacttttttgatgtcttttttatccattttaaaatcctcccgaaagatttattttttaatttacttgaattatatcacttaaattgcgtttgtcaagtggtttttaatattttttcaaaaataatgtataaatattcagaatcatacattacagatacttatttccgtcgccgaggaaatcgcggctgtcggcggcgaattcccaaaggtcctcgcccgatataatggagtttacctctcccccgataaagaaaatatacatacacacataaagccagagcattatgagcacgaccgaagtcatactgccgtatacatgggcgcttcggccgaaatggtcggtataaaaggcatagaaccaggaatagcacatccacccgagggaggacatcacggctcccggcagctggctcagcaccgaggtctttctgcggggtacaacaagatatacaagagcaaaaaacacggccattaaaagaaattttcccaccgttctgacgaccctgtatattatttcaaggaaaacattgtcgggaagcccctgctttataaactcggccgtgcgaccgcccaccaccgaaatcagcagagtgacaagaatgtaaagtaaaaaaccgagggtgtataaaaccgaggtcaaacggatttgaaagaaattacgcttgtcgtcgattttataaataaaattaagccccctcataatcgaaacaataccctttgacgccgcccaaagcagagcaacggccgatattgaaataaccgtcgcggagttgtttgcgaatatttcggaaataatgcttcgtatatattcggtcacaacggcggggaaaatgtcggacaaattatatattatatcggggctcaaaaaaggaacacgttcgagaacggacagcacgagcaccaaaaacggaaatgccgatattatgacaaaaaaggccgtctgtgccgaaaaagccgccacggcgtcatgagttatctttcgcccgaaaagcgaaaacgccttgtaaatcgcctttatatacttcacaccgctccccctttcgcgtcattatacatataatatcacaacccccaaaaaaacacaaaggtttattaaaaaataaattttttaaaatttttgattttcctattgattttttgcctcgttttatgtataatagcaaagtcgactgaaaagacacggagaaatgtccgagctggtcgaaggagcacgattggaaatcgtgtatacggctacaaccgtatctggggttcgaatccccatttctccgccaaaaaaccaccgcaattcgtgagagttgcggtggtttttccgttctttcaaaaaacaataacattacatacaggagctttaaaatgccgaaatacagaaaaatcgaagcagcggacgacaggaaaatcgctaaaatcattcgggcgaatttggaaaagcataatttggacattccgggaacggcttatttcgacccgcagctcgactgcctgagcgcatactataacgccgagccggagaaaagagcttattttatcgccttagacgaaaacgacaaaataataggcggcgtcggcattgcggaatttgacgggctttgcgattgcgccgaaatacaaaaattatatttggatgattcctccaaggggaaaggttacggcaaagagcttatgaaaatcgccgaaaacgaggcaaggaaatcgggctataaacagctttatcttgaaacccacagcaacctaacggcagcgatatatttatatgaaaaatcggggtttaaacaaattgacaggccgaaagagaccgtccacggcaaaatggaccgtttttatctgaaaaaactgtaacctgccctccgagcgcggaatatcaggcctttcgagccgatgtgcacattgcatataaatattcatttatgtgttgatttttgcatttatatgtgatgcaatgaatttgtaaagtaatcctttgggctgccgacagtcccattccgcacaaaagcggtttttctcacgtcggtgctcatgggagaaaagttcattgcaaaggagtaaatgtaaaatgaaaatcaaagccgccgtagtgcatgaaaagaacgggccttttattcttgaggacgtagaccttgtcgagccctctgccgacgagctgcttgtaaaggtcgtcgcaagcggaatatgccacaccgacgaattcgggcgttcccagggcattcccattcccctcccccttgttttgggccacgaaggtgcgggaatcgtcgaaaaagtcggagagaatgtcaagggctttgaggtcggcgaccacgttggattttcttatgccttctgcgaccattgtcacagctgtatgtcgggacatcccaactactgcgaccattttaacgacatcaatttcggcggagtcgccggagacggaaaaaccaagctctttcaaaacggcaagcccgtttccatgttcttcggtcagtcctcctttgccacacattccataatcaatcaaaaaagtgccgtcaaggtggacaaggacgtggatttggcatacgtcgcgcccatgggctgcggaattcaaacaggtgccggtgcggttctcaacactatccgccccgaaatgaattcttcgattgtcattttcggctgcggctcggttggcatgagcgccattatggccgccaaagtcgccaactgtgaaaaaatcatcgccgtgggcggaaatcccaagagccttgagcttgcaaaggagcttggcgcgacccacaccataaacagaaaggaaaccgacgacattcccgccgccgttgccgccataacggggcacggaggagccgattatgccattgacacctccggatacggccccatgattcaaaccgccattcactccacacgtttccacggaaaaatcctccctcttgctccgagcggagttatcgagcattttgacatcggaacagacgtgctcatgaatatgcgctccattataggcgtttgcgagggcgactcccttccgcaagcattcattcccgagcttgtccgcctttacaaggagggtaaattcccgatcgacaaaatcataaccacatatccctttgaggacattaacggcgcatttgaaaaatcccacggaagcgacgtcataaaggccgttctccgcatggaataaaatataaaccataagcaagaccgaatgaattttcggtcttgcttttttacggcgttttacccgatttttaaattctttttacatcacaaatcgggcagcgctattgattattgcgcggaaggagtctataataaacagacaagggctttaaccccaaaagagataacaaagcacagaaagaagaattttaaatgtggttcgtgtttgcgctgctgtcggcggtttttgccgctttgacgtcaatactcgcaaaaatcggaattgacggagtgaattcaaatctcgccacggcaatccgaacggttgtcgtggtggtgatgtcgtggggtatggtttttttgacaaatgcccaaagcggtctttcctccataaacagaaaaagctggatttttctcatcctgtcggggcttgccaccggcgcttcgtggctttgttattacaaggcacttcaggtgggcgacgcctccaaggtcgttcccgtggacaagctgagcgtcataattaccattgtgcttgcctttgtgtttttacacgaggatttcacggcaaagtccatcgtgggctgcctgcttatcggcacagggacgcttcttatggtgctttaaacatatattacatgcaaaaagacccgagaaaaactcgggtcttttttaacacattacgccttaaattattcggcggtctcctctgcgggagcttcggcctcttcgggctcggtgagagccttgattgaaaggctgattctctttctctcggtatcgatctgggtgatcttggcctcgacctcctgacccacggtcagaacgtcctgaggcttgccgatacggtcgtgagagatttgggaaatgtggataagtccgtcaatgccctcgatgatgttggcaaaagcaccgtaagcggtcatgctgacgatcttaacggtaacaacatcgccctcgtgatagtcgcgaaggaaaatgctccagggattgtcctcagcctttttatagccgagggatactctgcgcttttcgggatcgaaggatttaacgtatacttcaataacgtcgcctaccgacacaacctccgaaggattcttaatgcgtctccaagaaagctcggaaatatgtaccattccgtccactccgccgaggtcgacgaatgcaccgtaggaggtgagagatttaacctttccggtgtataccttaccctcttcgatgttgttccagaactcggcttcctgctcttttctctcgtcgcgaagaacggagcgaatcgagccgacggcacggtggcgctgacggttaacttcgagaatgcggaatttaacggtctgatgaagcagatcgtcgagagactctcctctggatgcggttgcctgagaagcggggataaagacgcgaatgcctttgctcattacgagcacaccgcccttaactacctcgaccaccttaccgctgagtacctcatcggttccggccgactcacagaagttctcccaaattgcggaagcgtcataacgctttttggacagcattacggtaccttcctggtcgtttgtacgcatgacgataagatcaagaacatctccgaccttgacctcgtccttggcctttacgtcgggatctgcggaatactcgtcgatgggcacatagccggcatgctttcttccgatgtcaacctgaatttcggtgggggtcacggcaagaacatagcccttgacgtgctgatcggtggacatgtggctgagcgaatactcgagagcttccatatctgacatttcgtcaaaagatttctccggggcagcgacaggcgtcgatgcagagctttcctgagccacctcactttcgggattggtagcaggggttgcctgcgtttccatggtttctgctgttgtcatagcagttcctccttgttatcgacgttgtcgatgatttttgacgtcttttcaagaacgtcttttatgatcacagccggagttgacgccccggcggtaattccgattttatgcacgccctcaaaaaggctttcttcaagctcggcggcggtttcgcaaagagccgtcctgcaattttttttgcatatggctgcaagctttgcggtgtttgagctttgccttccgcctatgactatcataaggtcgcactcctttgaaagagcctcggcctcgttctgcctttttgatgtagcatcacatattgtatcaaatatttgagcgtttgtacataccctttttatatttttttcgcatttttcccacaattttgagtcgaaagttgtctgagaaacggccgtgagacctatattttggaaattattgttgcgtttgagtatttcatcaagcttttcttcgctgtcaaaaacaaaaaccggagtttttgcaaagcccattatgccctcaacctcggggtgatttttgtcaccggcaatgaggatcacatttcccttttccgacgcgtttctcacgattttgtgtatcttttccacaaagggacaggtggcgtcggcaaatttgagtccgcgggcctttatctcaccgtaaaccctttcggcaatgccgtgcgagcgaatgacgaccgttgcgccgccgtcgcactcgtcaaggcttttcacggcctttacaccctttttttcgagagcctcaacggcctggggattatgtattatgggaccgagggtggacaccttttcaccctcccccgaaaggcgttccacaagctccattgcacggctcactccgaagcaaaagccggcggtttttgcaacctttaattccaaatcgaaaacctcgttttgtttaagaatatttttcaatgctttcggcaatgggctccataagctttgccgccacggcgcgaagagcgcgtctgtcgccctcctcaaccttcaaatcgtcaaagttgacgggatcgcaaaccacgattttggttttttgaaagaccttcattttctgacccggggtgacgattgccaccggctgcgccggcacgcgaagctcgctcatgagaaaggaaatgcccgatttcggtcgcccgagacttcccgttttcgaacgggttccctcgggaaaaatacaaaaggtttttccctcttcaaggatttcggcggctctcttgagacttgccgccccctcccctcttttgaccgggaaggcacccattttctttaaaaaccatgtaaaaaacggatttttgaaaagctcctctttggccataaaattgagcgcttttccgtttcttcttgcaaggaaaatcaaatttatggggtcgaggaaagaaatgtggttggcataaattattatattgttgtccttcagcattttatcctcgttgattatttcaaagggataaaatatcttcataaaaagccacacaaagggataaacaattttcaaaagaagactcaaaaccgattctttcctttcctatatgtcaagccgatcttttataagaccgagaacggcgtttatttcctgttttagggtcattttgtcggtgtcaaccgtcacggcgtcgtcggccgccttaagcggcgcaatttcgcggtgggaatcgttatagtccctttctttgagttcgcgcagaacatcgccgaaagcggcatctatgcccctgtgcttaagctcacagaaacggcgcttggcccgcgcctcgggagaggcagtaagaaaaatcttgacatcggcgtcgggcaaaaccaccgttccgatgtcgcggccgtccattataacgctgtgttttttggcaatatcgcgctgagtgtcgaaaaggaatttacgaacctcgggaatcgccgacacgtttgacgcggccatggaggccttgggcgtgcgaatttcgccgcttacgttttttccgttgacaaagacctgctgctcacccttttcaaagcgcagctccaccgaaagattttcaagaagagccgaaaccccttccctgtcgtcgggctcaacgcccgagtcaagggcataaacgcccaccgcgcggtaaagagcgccggtgtcgacgtatattattttaagttcctttgccaccgcctttgcaacggtgctttttcccgcacctccgggaccgtcgattgcaatgttaaacataaatcacaactccctcggttttaagaataccataaaaagacagctatcgcaagcgctttgttcacaaaatcggtgcgctcagctcccgaacccctcggccgccgcatgggccgtggaaaatgctatctgaagattaaagccgccggtgtaggcgtcaacgtcaagcacctcgccggcaaaaaaaaggcctttgcaaagcttcgactccatggttttcgggtcgacctctttgacatttacgccgccggaggtgacaatagcctcgtcgacggggcggaattttttcaccgtaaccgtcagatttttaagcagctcggcaagtttttttctctcctgagccgttatctgattgacctttttgtctcccgaaattcccgacagcgaaacgacgacgggaatgagctttctcggcaaaagttcggacagagaattttgaaaatcacggtttatgtttttctcaaaatcccgctcgagacgtttttcaagcttttgaagatcaagcgccggtttaaggtcaatgtgaagcttatatctgtccctttcgaaaggacgcatatgcgctgacccgcttaaaacaaggggacccgacagaccgaaatgggtgaaaagcagctctcccatttcgcgaaaaacggttttggactttgccgaatcctcaaccgaaagtgtcacgtttttaagcgaaagtcccattgcctttttgcaaaagccttcctcggtttcaacggggataagcgacgctttgggctcttccaccgtgtgacccgcagaccttgcgaatttatagccgtcgcccgtggagccggtcagaggataggaaacgcctcctgtggccacgagaacattttcggcaaaaaactcgccgtcggcggttttgactccgataaccctttttccgtcaaacaaaagagcggttgcctcggcgtttattgtttttgcgccctttgaaaaacggcaaagcgcatcgacaatgtcggaagccttgtccgacacgggaaaaacccgattgccccgttcggttttaaggggcacgccaagcgtttcgaaaagccgcatggtgtcggacgaatcaaagccgtaaaaggcgctgtataaaaatctgccgttttttgtgaccgaggagataagcgtatcggcgccgcagttgttggtcacgttgcaccgacccttgcctgttatgagaacctttcggccggggcgggaatttttttcgattatgagaaccttaagccctcttttgagggcaaatcccgcggcgcaaagccccgccgctccgccgccgatgataattacgtcgtatttcatattattttaaaagcttggccacccttttatgcataccgttcatatacaccgttatcacctgcgtcaaagcaaggtcatagacaaaaaacatgacctctccccccgcaagaagaatgagcggcgtgtattttccgaagtcgcccataccctccatgggaattccgaaaagtttaattatgacgaaataggcaaagaccacacaggcggtgaaggtggcgaatttcacgatatattcaatcaccttggacggtattttttcataataggacttaagtatgggataaaatccgaaaaaggaaacaaacatcatggccgattccttttcgcaaagcaacaccgtgagaattgcggcggccacaaagcttccgaaggcccatttcgaatcggtttcgattttaacggcgcaaaaaacggcgcctgcaagggcgggaagagcaaaggtcagataaggaaaatatgccgccagcattatcaccaccgaaagggcggtcataacgccgcaaagggcgatttttttactttgtttcatcttccacctcgtcagcagcagggaataaggtcgccgcccatacactcacagcagcaatcggcgcaaataagcgaggagcacacgtcgcaggagctgcatccgcttccgctgcccgatgtgcggtaggcacggccggagcgctggcggtttatattgtcaaatgccgcagagtattcgggattttgagggtccatgcgggcggcggtggcaaaattggtgtatgcgtcgtcaaaccagccgcgtctgtggagcaccgagccgttgagaaaataccactcggcggttcttttgtcaacgggaacgccgtcgagcagggtctgagcgaacttttttggcggtgatctgaagggaattcttgatcacctcgactatttgcaggatttgggtgtaaacggactgtacctgtgcccgattttcaccg

SEQ ID NO: 2897 - DNA, 9896 bp, Unknown
  16S sequences of unknown bacteria
cgcagcgcgcgcggctgctcgccggcgcgctgctgatcgcggcgggcgtgctggtctggcccatggtcgccctggcgctcctgggcgagggcgcgccgccggccgcccaggcggtggggatggccttggcggccgcgggcgcgttcctctgcgcgcaggccgggagcctggcccgcgccgaacacaaacttcgcgacgcatggaaacggagggattccgaatgagacacccgatccgaattttgcaggccgcgctgctcctcgcgctgtgcgcgctctgcctgagcgcctgcgcagccggcaaaaaggcgcaggaactccgcgcatgggccggtggagacagctcgtccgcgcaggtctgccgcgcagaggacgcaggtttgaccgacctgaacccggcggactggacgcccgccccgatcccggagggcgcggcggtcctgggcacgctggagctccggcaggaggagacgcgccgcctcctggacgcgggcgaacccgccatgcagacggtctgcaccctcacgctctacgaagggaatcgggcggcgctgcaatgggaggcgctctccctctccttcgagctgcccgcggcggatgcgcagcgcctcgccgcgctgttgccggaagcgaacccatagcgcgcccgttttccccaaaattgttgccaaacggttgccaggccgcgcgccgttttccccgaaattcccgcgaaaatccgcgaaatctgtcggctcccctccgcaaggacgctttcgcccctgcgcgccggatcgcatggatccggcgcgcaggggcgaaaattgttgccaattcgttgccaatttctgccgcgctcacgtcccctcctgctcctgcgcgcggcggcggcacagggcgaggaagtcctccgcggcgcgggtgaggaacttgttgcggtggtggacgatgtggctgcgccgcacgagcggctcgtcgcacaggtcgcgcgtgcagaccgtgccgcgctcgatgtccggctgcacgagcatgtgtggcagcagggagatgcccaggcccttgcccacggcctgcaccagggcctgggtgctggcgctctcccaggcgggctgcacggtcaggccgtgcacggcgaagacgtggtccagatacgcccggcccgcgctgccctcctcccgcaggaggaggtcgtaggcgggaaggtcgcggatggagacgcgcgcctgccggagcagcggatggcccggcggcacgagcagcaccatccggtcccggaggaagggctgcgccgtcaggtccgggtcctcgatgttcccctcgatgagcgccaggtccagccggttgtccaggagctgccgctgcagcgccccgccgttttggatcgtcacctgcgtgcgcagcgcggggtggtcggcgcggaagcgcaggatcaggtccggcagcacgtgcgtgcccagcgcaatgctgctgccgatgcgcaaaacgcccagcgcgtcccagttgcgcaggctggtctccatgtgctcgaagaggtccaccaggtgcagcgcctgcgcgtagagctgcttgcccgcctccgtcaccagcaggcgccggttgatccggtcgaagaggcgcacgccgtagtagtgctccagctcctggatggcgcgcgtcaccgccggctgcgtcatgtgcagccgctccgaggcccgcgtgatgctcccgttgcggtagacctccaggaagatcttcaggtgccggaccgtcatgcgcgctctcccctatccatatcaaaaaatgcatgggctttataaaataatagcatttgcattatggaaatacaaggggtatgctgtaagggaagaggaggaatgtcccttgacacaggagattgcgcagaccccaaagcggaagctgctctggcagctgttttcgagcacgttctacatcagcatgttcacctttggcggcggattcgtcatcatcaccttcatgaagcggaagttcgtggacaccctgcactggattgacgaaaaggagatgctggacctggcggcgctggcgcagtcctcgccgggggccatcgcggtcaacgcggcgatcctggtcggctggcgcgtgtgcggggcgctgggcatggcggtggcggtcgtgggcacgatcctcccgccgatgatcatcctctccgtcatctcgctgttctacgcggcctttgccacgaacccctatgtggcgctcgtgctgcggggcatgcaggcgggcgttgcggcggtgatcctggacgtggtctgcagcctgggcgcgggcgtcatcaaggagcgcagcgcgctgagcatcgttctgatgattgcggcgttcctggcgacctttgtgctggacgtcaacgtcgtctacatcatcctggccgcggcgctggtgggcgtcggcaagatccttgtcctgcgcagagcgaggaaggagggggcaaaatgatgacgcttctggagctgttctggagctttctgcaggttggcctcttcagcatcggcggcggctatgcggccatgcccctgatccaggcgcaggtggtggagcagcacccctggctgacgatgagcgagttcacggacctgatcaccatcgcggagatgacgcccgggcccatcgccatcaactcggccacgttcgtggggatccgcatcgcgggccttggcggggcggtcgtggcgacgttcggctgcatcctgccctcgctcctcatcgtctccatcctggccaagatctactacaagtacaagggcgcaaaggggctggacacggtgctgtcctgcctgcggccggcggttgtggcgctgatcgccggcgcgggcctgagcatcctcggcacggtgctctttggcgaatcggcggtggcgctgcagaacgtggacctggtgggcgcgggcctgttcgttgcggcgttcttcgccctgcgcaagctcaagtggaaccccatcctggtcatgagcctgtgcggcgtcgcggggctgggcatcaacctgctgctgcacggcctgccggcctaaggggcgcaaagaaaggccgggcgcggtctggaagcttccagaccgcgcccggcctttttgccgctcactcccaggtgacgaggccggcctgctcgaggtattcctcctgcaggtccatgtagtcgtccaccagggcgaggatctgcccggcggtctcctcgccgccgccgaagagcttgagcaggttctcggagatgtactcaaaggcctcgtcgtcgtcatagaagctgtcgcccgcgacgccgtcgacgaggacgccggcctcctccatgtacttcaggtccagctcctgggccttgcgcaggagggattccacctcccgcggggagaacgccttgtgcgcgctggggtccaccttcttggagatgtagcgcagcgcggcttcccggtcatatccctgcatggttcacgcctcctccatgagtcgttccatctcgtccagcgcctcctcgaagctgcgcaggcactcctcgacgggctcggggctctccatgtccacgccggccaggcgcagcgtctccagcgggggcttggagctgccgctggccaggaacccgaggtactggtcgcgcttgtgcgcgtcgcccgagagcacgcggcgcgagaaggccaccgccgcggaatacccggtcgcatactggtagacgtagaacgcgcggtagaagtgcgggatgcgcatccactcgatggcgatgtcgtcgtccacgaccgcgcccttgtagtagacctcgttgagccggcggtagacggccgtcagcgcctcggcggtcagggcctcgccgcgcatggccatggcgtggacctcgcgctcgaactccgcaaagagcgtctgccggtagaccgtgccgcggatctgctcgagctggtagttgcacagggccatgcgctggtcgcggcgggtgaacttctccttgaggctgctcaggaggatggcctcgttcgtcgtggaggcgatctccgccaggaacagcgggtactcgctgttgaggaaggcctggttcttgtcggaatagaacgtgtgcatggagtggccgagctcgtgcgcgatggtgaagaggctgtccagcgtcggctcgtagttgagcagcacgtaggggtgcacgccgtagacgccccaggaataggcgccggaggtcttgcccgcgttctcatagacgtcgatccagccgtcggtgaaggcgcggcgcaggtcctggatgtaggtcccgcccaggggcgccaggccctccagcacgagcttgcaggcctcctcgtacggcaggccgagctgcacgtccggcacgatgggcgcatagatgtcgtagaagcgcagctccgggagctgcagcgccttcttgcgcagggcaaggtaccggtgcatggcgggcaggtggcggtgcacggcctcgatcagcgcgtcgtagacgccctccgggatctcgttctcaaagagcgactcctcccggctggaggcatagccccgcgctttggcaaagaagatgtccttcttgacggaggcggaatacgtcgcggcgatggcgttggtcaggccgcggtaggccgcgtagtaggtctcataggcctccttgcgcacggcgcggtccgggctctgcaggagcgggatgaagcggccgtgcgtcagctccaccttctcgccgtcctcgcccgtgacaaagccgaacttcatgtccgcgtcggtgagcatggaatagatggtgtccggcgcggaagccatctccccggcctgcgccaggagcgtctcctccgccttgccgagcgtgtgcgcctccaggcggagctggccctccagcaggcggcggaagcgctccagctccggctgcgcgcgcaggacggcctcgaccttctcgcggccgagcgccaggacctccgggccaaagtaggccgttgccgcgcccagctccaccgccagggactgcgcgcggtccgccaggccctggtaggtcgtgttgccgttgtcctcgtcccggcgcatgcgcgcataggcgtacaggcgggtcagcaggagctccgcctcctccagggcgcacagggcctcggggagctgctgctccagctttccggcaaaggcggcgacgcgcgcggcggcgggcttcgccttctggaagtcctcctcccacgcttggtccgtggggtagatgtcctccagtttccacaggaagcgcgcatccatctgcgcgcgggttttctgctctttgggcatttgttttcacctcatttgtgaatccagtgtcggggctgcggcccactgggccggcggaggccgcccagcacgccgcggaccatcgccatggggtggcagtccgcctcgtcctccgggagcatccgcagcaggaagacggagaccacaaggcgcagcacgaccgagagctggaagatgaattgatactgattgatctcaaaaccgaagacggataggtgcagctgctccgagaggccgaggaacacgttgtccacaagccatccgcccaccgaataggccagggccacgcccaccatctgcgtcacgcagaagtacaccgcgtagtacatggagcggttcttctccggcgcctgatagaggtagatgttctgcatggccaggtccgccgccggcagcagcatgccggccaggaactgcgccacggccaccatccagatcgcctgcgaattcgtaaagagccacagcgccggaacgaacgtgcccagcagcgtgaagacgcggatcacggccttgttgccgtagcggtccatgagctttccccagtacccggcgaacaggagcgtggccaggttgcacacgatgccggagaggatgttgatctccgtatagctcatgcccatgggcccgagcatgtgcacgttgtagaaggggccgcagatgttgaccgcaaacgcccacgccgtccacagcgcgatgaccttcatgtaggagcggttcgtcagcacgccgcggaacatcgaggggaagctctcccgcttctccccctccgggcgcggggccatcggcgggaaggtgacccagaagaagcagatgatgtcccccgcgccgaagatgcccgccagcacgaagacgatcgtgtagcccgtgagcgaaccgtccgcggtgaaggcgtccagcagcagggagatgaggaggcccgcgaggatgccggtgaccatcatcatccgctggcgcgccgcgaagtagcgcccgcggatgcgcatgggcacgatgtccggcagcagggagttgaaggaggagtcgatgaacccgcccatgcaggagagcagcagcacgagcaccaggatcacccagatccgcagcacctcctgccccgcgggcacaaagtagggcaccagcgccacgggaatccacgagagccgcgagatcaggccgaagacgagcatcagctcgcgccgcttgcgcgtccgctccaggatgtaggaggtgaccagctgcatgaacttggccacatagggcatcgccagcagcacggagtagacaaagtccgaggcgccgagcgccttgatgtagccggtcagcgcggtgccgccggtgatggtgaagctgacgttgccgatgacgacgcccaggatcacaaggcgcaggttcttgcgcgtttccttggcgagtcccgtcgtgtcatagaggctaaaccgcgagagaaactgggaaatcttgcctttcatgggctcttccccctgactcgtatgaaatttttctgttgtgttctgtgtgggtcagttcctcaggctgtggatgggcgcgggaatccgcccgccgcgggcgatgaagtcgcggctggactcccggtgcacggggatgatgggcgcctcgcccagcaggccgccgaagaccacgctgtcgcccacggtcttgcccggggcggggatgatgcgcacggccgtggtcttctggttgatcatgccgatggccgcctcgtccgcgatgatggcggagatggtctccgcgggcgtgtcgccggggatggcgatcatgtccaggcccacggagcacacgcaggtcatggcctcgagcttatccagcgtcagggtgccgcggttggcggcctggatcatgccgatgtcctccgacacggggatgaacgcgcccgagagcccgcccacgtgcgaggaggccatgacgccgcccttcttcaccgcgtcgttgagcagcgccagggccgcggtggtgccgtgggtgccggtgacctccaggcccatctcctccaggatgtgcgcgaccgagtcgcccatggtgggcgtcggcgcgagcgagaggtccacgatgccaaagggcacgcccaggcggcggctcgcctcctgtgcgacgagctggcccactcgcgtgatcttgaaggccgtgcgcttgatggtctccgccaccacgtcgaagggctcgccgcggcactcctccagcgcggccttgaccacgcccgggccggatacgccgacgttgatggccgcgtcgccctcgcccacgccgtggaacgcgccggccatgaagggattgtcctccacggcgttggcaaagaccacaagctttgcgcaggcaaagccgtcctggtcggcggtgcgggcggcggcctccttaatgacctcgcccatcaggcgcacggcgtccatgttaatgccggccttggtggtgcccacgttcaccgaggagcagaccacgtcggtcgtggccagcgtctccgggatggcgcggatgagcgcctcgtccgcgcgggtcatggccttgtgcacaagggccgagaacccaccgaggaagttgaccccgacggcctttgccgcgcggtccagcgcgcgccccaggcgcacggggtccgcccccgcgcacagcagcgccgcgggcgtgaccgagatgcgcttgttcacgatggggatgccgaattcccgctcgatctgctcgcccgtgggcacgaggtgctccgcctggcgcacgatgcggtcgtagacgcggtcgtagagcccctccaccggcccgggcacgcactcgagcaggctgatgcccatggtgatggtgcgcacgtccagcttgttctggtcgatcatgcgcagggtctgcaggatttcacttgcgttgagcatggcgtttctccctcctacagtccgcgcctagatgcggtgcatcgcgtcgaagatgtcgctgcgctgcacgcggatttccaggttcatttccccggccagggtcagcagcgcgtcgcgcacgacgttgtactcgctgtcctgcccgatctccacgagcatgatcatggtgaacatgtccgagaggatggtctgggtgatgtccaggatgttgacgccgtgctggtagagcagattcgagaccgaggcgatgatgcccgtgcggtccttgccaaggacggtgatgacagctttcataagtctcctcctgaagggcccgcttcggggcccggtttgtcgttgagaccgcacgccggcgcatagccctggcgcttccggtccgcgtaataggccgaggtgagtagagccatgccgaacggctgcaaaaacgccgcggcaacgctcgtgaacaccggcgggaagaagagcatcagcgcaacgtacaggtccgccgcaagggcggcaacccccaccacgagcgcaatgccaaaatagcacaggtacagcagcgcaaaccggccgtcccgcaggaagcgcttcgccgcctcgtacagggcgaggaagtgccacttgtcctcgttgatgcccacgagcacggcaaggctcaggcacgccccgatccccagcgtcagcgccagctgcacggcgtagacgccgatcagcacgatccccgccccgcccggcagcgccgccagcagggagagcgccaggttcacgacaagactcaccgcatacgccgccgccatcccgcacagggagagcacgatcagccgcccggccctgcggccggccgcggagagcgcgcgccgcgccgggatgcgcaccccgtgccacatgcgcgactgcgcctcggccaccgcgccctgcccgatgggcatgagcacgacgctggccaggagctcgagcgggatcagcaccagcagcagccccagcatccccaggagcatcgacagcacgccctccggcgtgatcgcgctcaggtattccccggcgcgggccagggcctcctccatcgcctgggtgttcaggcccgccgacagcagcgcctgcaccagctcccgcacggccagcagcgcgggctggaacagcaaaaccaccgcaaaataggcgaccgccgaaaccagcgcagccggcagcgcgaagcacagcagggatggcgcgatcgacgccgaaaaggacgcggcgtaaattctccacccgcgcgcaaacagcgccgcaaaggtctcgcgcggtctttcgctctgcatattccattccctcccgaaccccctggcgctcgccgccagagggcgctcttgcttccccctagtatagcatatcccccggcgtttgtccccccagcaaactgggaaaggaaaaaatttcgctcccacccctattgacaagtaatattatacgtcatataatatgcgcgtaaggccaatattgctttaggaaggaggtcgagtcatcgtgttgctgcccgtcaacgctgccatgatggatgcctgcgtgcttgcggcgctggacaaggaggacacctacggctaccgcatcacgcagcagctctcgcagggcctgggcgtatcggagtcctcgctctaccccgtgctccggcggctgcaaaaggatgggtgcctgacgacctatgacgtggccatctccggccgaaaccggcgatattaccggatcacgccgcgggggcggcaggtgcttgccacctaccaggaggagtgggtggagtacaagcgacgcattgatgaaatccttgtccaaatgctcatgtacggtaaggaagcaagcaaccgaaaacaagagatagaccgcc

SEQ ID NO: 2898 - DNA, 3740 bp, Unknown
  16S sequences of unknown bacteria
ccacagctcctgtgctgccttggtcatcgccttgttcgctgccttcagctcatcggctgttacatccggatcgttgacgacatcctgtgcagctttgactgcgtctttcagcgcctgcaccttgcccggacgaacgttgtccacgttggtcaggatgttctccttgatgaagtcgatcgtcgcctgaacatcttctctcaaggcatctgtgctttcatcggtgttcagcgcctgcatcgcttcgctcagatcgagcagcgcggtgacgacctcggtcgtggtcggcgcttccttggccagtacggcctgtgcattgatgatcgcttcattcagcgccgcatcatcagaaccaagcgcgatggccttgtcgaccatgttgcgcagtgcctgtacggctgcttcgctggcgctgtcttcttccctcacttcgaccagctctacgtcgtcgatccacatctggtgctgatcctggtcgctctcattgctggaggtcatgaagaagacgttcatggccgtcggcgtgcgctgctcgccgttgatcagcacttcctgcggtacggtgaatgtgtagtcataggtaaaccattcgccgctggctgctttctgccgctgttcatcgtcgagatcatcctggatgtagcgatatccgccccactgctcattggcctgatcggtgatctcgcggttgaagaaggtcactgcggtctggaacgggccaagatccatgccctgtcccatctcgccgcgccagtatttcatgcgggcgcgcagatgataagtcttacctggttcgatctctgcgctgaagttgatcgaggtcacgcggttgtttccgctcagctttctcgtatccagatggatgacctgaccgtttccgccttctgtatcggtattcaggctcgcgtactgttccggctggagtatcgctgccataggccatgagcttagcttccgtattgaatccagggttgcccgcataataagggttcatcagggcaaagaactggttgaccggcatgaatccggatgcgttctcatcgttgatcaaaaacaggttgtccgtgtattcgcggacttcaaatacgatctgcagcgtgttgtccgcatcttccgcggtgtagatcagacggtagacgcccgtctgctgcgcggtgatcagatcgcccatcgccacggcttcctgcgtgccgtccggacgctgcagcgtgacttccaccggatactttccatcgctcactgcgctgggcaccgtgaagacctcgccctgcgtgatcacgttgtaagccgggtgatagctgctgatggtgaccggaggcttttcctgacgcagcgacaggtcgctgatatataggacgtcatcctgcacgttgttctgcggaaggatgcccagggaagctgcttcagcgtctgcgacgtcgaagcgcacggtgatctctgtccagccttcttcatccggcggcgtgatcgtccatgccggattgctcggcacatccatcagcgatccatcggaaatgcggttggccgatccgctgagggcgaccgtaccgccgttgatctctcttccggatgcaaacttcagcttggcgcgcagcacatatgttccatcctccgggatgagggccggccatccgcagcgcggcagcagcggtccccactgtgggttgttctcatagaatcctccggcgatcgccgcagcgctgtcataggcgaagaccatcgtgcccagctgcgtctcgctttccgcgatggagaacacgcctgatttcagcgcgttgcgcagctgaccgacgctctctgcgcccatatatgtgttggcgatgcccggcatgccggtgccatagttggtccatgtccagccattgacgacaaagtcatccgcggcaagatccgtaccgatggtctgcggcgtcttcaggaacagattgccatcttcctgcggctgatagatctggttgacgcctgcgatatcccgatacatcatggacggcttgctgatccagcccagcgtggatggcagctcgccataaacatcacgcgtcagccagatctccttgaattctgcgatcatctcttcgaactcctgcgcgctggcgatggccttctccacttcatcctctttctgagaaagcggtgtagtgatctctccgccagtgaacagccgcagacgcatcgccgcataatccgccgcgatcttggtcatctgcgccgtgttccggaattccttgtagaggatatcccggtcatcggcctggatgtctgtctgctcgagctgagcgaggaagcgctgtgccgcatccgcgacctgtccgcactgttccagcgccatatcgcgcactgactccgtgatcacattgtccttgccgttttcctggaaatccatgaagtcccacaggttgtgcgtggtgtctgtccatgactctatcatgcagttggcgatccagttgccattccagccatatggcaggtaggtgttgctgaagtcagccagctcgctgaacgcctggctgagcgtattggtggaatcctgatacaggaacaggttcaggtattcatcatagctgttctgttccttctggttggtctcctggcaccaggacagaccgccgccgtaaacgatggccggataagtggtgatgatgttctgataatgtccggcatcgccccagttcgtcatcgcgaagccgagcgcttcgtgcttctttccggcagccgcggcattttccgcgttcttgttcatcacaaaggtattgccggtgatggtcgaccaggaagcgtcgccggcgcagacatagtatgggatcccggcctcctgcaggcgggcggaactggtttcaaaatcatagtcatacagatagccccagttcatggcgatggcgcccggcatccgctgtgccgcttcttcatacagatcatagtgaatgatcatgtcgccccagtacatcatcgtcttctgctgttcttccgcaagctgcgcgatgatctccatcgaatccatgtacagcttttcctgtgtcggctcttcgcccggatgcagttctctccaggacgcggccgctctgccgttcgccagatcgagcgtcgtctcatcgccgccgacctgcaggatatcagactggaatccttccgcataaaggtcatgatatagattggagatgaatgtctgcgtatccgggtcgaacaggttcagggtcgtcgatcccttggcatcgcccagttcagagaaatcattgtgtgcgatccactgtgcgctgtggccgaagctgttctgcgcagggatgaggtcgatccctctttccgcggcatattcagacagttcccgcgcctgcgccggagtcagcggatctccgccggaccatacctgcggatagctttcataggcgtaggagaatccttcgagatacaggaacatctgattgtatttcaagttctccagcagatcaatgacacgtttcaccgtatcgactgaaggaaggcggtttctggagatatccatatcaaacgcgcggtattggaaatccggatggtcattttcgatcgtgagatatggaagctcttgcttggtctgccacatgatctgatacagtgtcgcagccgcatagcgtgcgcctgcttcatcgcggtaagtgatgtggacgcctgatgcgtcgatgatcagcgaatagccttgctcatccagcgcttcgttgtgattcagctcgatctgcgcagacgcgctgtcctcgttgttccgcgtaacgccg

SEQ ID NO: 2899 - DNA, 4191 bp, Unknown
  16S sequences of unknown bacteria
tccgatccgggtgccttttttgttttgcgttgctggccttctgcggaggccaggcggggcatatccataacctttgggcgagaaccgctctccgcaggctggctgcccggcagatggggcattttctccgtcccggctgcgtgtgaccgggtggggcacatccacagcctttgtgcgcgaattgctccccgcaggggcgcatgggagagggctgtccggttccggggcgtttccggcaaagattgaccgctgttcccgaggaagactgtccccgttttttcgcttcagaagccgcaaaatccatggaaaaatttccgtggaaccccgcactgataggacagaatcagccggaaccgagccggcaatccggaagataaaggagagataatcatgaagaatcggaagatctgggcgtcggtgctggcactgtgccttgtgctggcggggtgtactgccgggacaggcggggagtccgctggcgagcaggatggacagtccgcatcagcggcagagagccagaccgggagtgaagcggaagtcccaggcgaaccggaaaccccggcgctccccgagctgcggcagacgccgaggagctgagcgggtatctggagctggcaatgcagcgggcagagcaacctccggcggtggaggcggcgttcctggacagcgaagccgatccggagatgaccgtgcggaacctctactatgcgctgctgtccgagcaccccgagtgcaagtgtgcctatgatctggcgatggagcggaccggggacggagtgtatcagatcaccttttcctatatgccctaccgcaccggcgactatcccgcggactttgccggggaggaggcaggcagcttcggggagctcatcgccctggcacaggagcatcttgaccaggccgagatcccggtgcgcatcaccgaccccagcctgacggtggacgatctgggccgggcactgcagcaggtgggaggcgggtatctgctctgtcagctcagccgggacggcaccgccatcactgttacgccccagaacggcctgactcatcaggcggcgctggaccgtctggcagagatcgagacgctggcacagcagattgtggaggagtgcgtcaccgactccatgaccctcccggaacaggcggaagccctctatacccggctcaccgaccgggtggcctatgatttccgctactatactgatctggcgtccatgccctatgaatccaccaccgcctatggggcgctcaaggacgacctggcgatctgcggcgggtatgcccaggcattgcaggcgctgtatgagcaggtggggattccctgcctgactgtaagcggacagtggaacggggagaaccacatgtggaacctggtctggctggacggggaatggcggtactgtgacgccaccagtgaccgggggcggtcggaattcgggttcggctgctaccgggtgaccgctgagaatctctggggacacacctgggatcaggattgggttgcccggctcaccagcggcctggaagtgtgactaaaaatggcatgatttgtggtttttgtgtgaatattagcactcttctattgacagtgctaacgcatggagctataatagaagcgtaccaaagaggagggccggaaagagaagaaggcccgccggttggcaaacagtgattcaatcgaatggaggaatgatgtatgctgcctgtactttttggtgaaaacctgtttgatgatttctttgacgattcctttgagcgggagctgcgcgcaatgaaccgcaatccgctgtatggcaagcatggccgcaatctgatgaagaccgatgtccgggaaaacggcgacaactatgaacttgccattgacctgcccggctttgacaaggacgagatccaggtggatctcaaggacggcaccctgaccgtgagcgcgtccaagggtctggataaggacgagcaggacaaggacggacggtatatccgtcgggaacggtactatggttcgtccagccggagcttctatgtaggcgacctgcgccccgaggagatcaagtgcaagtatgagtcgggtgtcctgagcatcactgtgcccaagaaggctcagcaggagctgcccgcatccacccgcatcgccattgaataaatcctaaaatcaatcaaagccatggagcataaagccccatggcttttttgttgggcggcggagacttcaccggggcgccccgggttatagtccgcaggcgggcacgggccgggattccccgcacagcccggaaaggtgggcggagcgggggttctttccaacccaggaaggtccagcaggatctgcccgcatccacccgcatcgccgccaaataaatccccaaaccaatcaaagccatggagcatgaaagccccatggcttttttgttgggtgggggaggtttcgccggaacaccccggcatgacttgcaggcgggtacgggccgggatttcccgcacagcccggaaaggtgggcggagcggggattctttccagcccaggaaggctcagcaggagctgcctgcatccacccgcatcgccaccccataaatccccaaaccaatcaaagccatggagcataaagccccatggcttttttgttgggtgggggagacttcaccggggcgccccgggttatagtccgcaggcgggacacaggccgggatttcccgcacagcctggaaaggggccggggtggggcttcccgggttgttccggcacagacccgggcggcatacagcctggggcggattcccattgggggatcatttggtatttccgatcgatccgataaaaaatccgtattttacaaatcagtgtcccaaccgctataatggaaggcagacagttcatggaaaggaagcggatcgcattggcagaacgaaagggtgttctgacaaaactctttttctccaccctctatctgagcgccttcacctttggcgggggatatgtgattgtcaccctgctcaagcgcaaatttgtggatgaataccactggatcgaggaggacgaaatgctcgatctggtcgccatcgcccagtcggctcccggtgccattgccgtcaacggtgccattgtggtgggctataagctcgccggactcctgggcgttgtcactgccatcactgccaccatcattccgccctttgtcattatctcgctgatctccgcctgttatgccgccttccgggataacctcatcatcagcctgatgctcgagggcatgcaggccggggtgggtgctgtcatcgcctcggtggtgtatgagatggcctatgtcttttaccatggcagggacaccgcttcaatgatcctgatggctgccgcctttgtagccggatgcgtgttcggggtcaatgtggtgatcgttgtcctggctgccggggccatcggtgttgtccgtaccctcgccgtccgccggaaggaggctgtaaaatgatctatcttcagcttttcctgagcttcctgcagatcgggcttttcagcttcggcggcggatatgctgccatgcccctgatccaggatcaggtggtcacccggtatggctggctctccatggcagagttcaccgaccttatcaccatctcccagatgacccccggccccatcgccgtcaactccgccaccttcgtgggcatccgcattgccggaatctccggggcgctggtggctaccttcggctgtattctgccctcctgtatcctggtcactgccattgcccggctctacctcaagtaccgcaatatgtcggtgctccagggagtgctcggttcgctgcgcccggcggtggtcgccatgattgcctcagcgggcatctccattctccagaccgccttctggggcggcgccgctgtgaccttctcgggcatcagctggctgatggtcgccctctttgtagtggccttcctgctgctccagacccatcgcatcggccccatccaggtgatgcttctggcaggcctggcccgggtgggagcgtcgctcctgctgggaatatagaaaaatctgccctctgtccgcccggacaggggcttttttatttcccggggatacaatggcgggcagaactgtgatagaatagcagtagaaaatatcccatacagcgccgccttccgggcggcagacgaggagaggaagtgcaaagcgatgaagatcattgaacgggagga

SEQ ID NO: 2900 - DNA, 32759 bp, Unknown
  16S sequences of unknown bacteria
ctctattcgtcggcagcgtcagatgtgtataagagacagaacatatcccgctccggaatattgccaacctcctgaatcagccggaagatcggcagtacatccaccgcatcccggtcgataacagcctggaatccctctggaatcgcccgcggaatgttttcatagaatccgcctccggtgatgtgggaaatggatttgacctttacttgttccagcagccgaaggatcggttttacataaatccgcgtaggggtcaacagcgcctcacccagcggtttgcccagacggtcggcataagcgcccaggtcgctgtgttccacatcaaacaccttgcgcaccaggctaaacccgttggaatggacgccggaagacgccagtccgatgatcacgtctccttctgcaatggtattcatgtccaggattttggatttgtccaccgcgccaaccgagaatcccgccaggtcatattcgtcttccggatagaagccgggcatttcagcggtctcgccgcccaccagggcgcagcccgcctgtacgcagccttccgctacgccggaaacaatctgcgctactttttccggataattttttcccaccgccacatagtccaaaaagaccagcggcttggccccggcacagataatatcattgacgcacatggccacacagtcaatgcctaccgtgtcatgcttattcaaaagaaaagccagtttcagcttggttcccacaccgtcggtaccggaaaccagcaccggtttttccatgccggtcagatccagttcaaacaacccgccgaatccgccgatgccggaaaggctgcctgcggtttgagtacgggccacatgggctttcatcaattccaccgccttgtatccggcagttacatccacgcctgcggccttatagctgtcgctaaagctcttttccataaaatcaatacgctccttctgtttgcgccgcagaaaaagcggcggtattataatccattacaggcaaagcggcaaacaagtacaaacccgccattgcagcaggctgtttcgccttctgcccaagccgcaggggcggccttttctcatgcttttttgatcttctgttcaaacttggatttgtccatttccttcggcgtgactgccggatattccccggtaaaacagccgcagcaaaagtcgcagcgggcgccgtcggcaatatgacggacactctctacactcagatatcccagcgaatctgcgccaatcacccggcagatctcctgttcactcatctggcaggcaatcaggttttccttggagtcgatgtcggtgccgtaatagcaggggctgataaacggcggggctgatacccgtacatgaacctcggtagctcctgcgtcccgcaaaagggtcacgatccgggcgctggtggtgccgcggacaatggaatcgtctaccattattacccgcttgcctttaaccaccgacgccagcgcattgagcttgatgcgcaccgagttttcccgctgtccctgctccggctggataaacgtccgggcgatatagcggttttttacaaaccccataccatatggaatccccgattcctgggcgtatcccagcgctgcatccaacccggaatccggtacaccgatgaccacatccgcttccaccggatgctctttggccaaaaagcgacccgcctggcagcgtgcctcatgaacggatttcccctcgattaccgagtcagaccgggcaaaataaacaaattcaaatacgcaagtgtgggcctttcctttacaatgggtgcgaatactgcgcaccccgttttcatccactactacgatttctcccgcttctacatcccggacaaataccgctccgatgctgtccagcgcgcaggtttcggaagcaaaaacaatctggccctccggcagacggcccatgcacagcggccgaaagccggtagcatcccgggcagcgatgagtttttgcggtgacataatcaccaggctgtacgcgccctccagctgaaacatagcctgctccaccgccttttcaatggacggtgcgttcagtctttcccgggtaatgatataggagatgacttccgaatcgttggttgtgtggaagatggcgccggacaattccagctgacgccgcaattccgccgcgttggtcaaattgccgttgtgggccagagccatctgccccttcacatggcgtactaccagcggctgcgcatttgcccgactgaccgcgccagtggtagaatatcgggtatgccccactgcaatctgtccccgtcccagggccgtcaaatgctccttggtaaacacgtcccgcaccaggcccagatccttatggacactgatcaccccgctgtcgttgaccgcaatgccgcagctctcctgtccccggtgctgcaaagcgaatagcgcatagtaggcgtttgccgccacatcactcctgctttctttgtcatagatgccaaaaacgccgcattcctcatgaatttcgttttgcatacttctttctcccgaactgtgagcagggccggtattgcccagccctgccagtctgtatcctctgtttggattactcgcccaacaggcgcttcatgatttcatgatatgcgccctccacattacccagatctctgcggaaacggtctttgtccagcttttcaccggtattgctgtcccagaaacggcaggtatccggagaaatctcgtccgccaggatgatggtgccgtcgggggtttttccgaactcaatcttgtagtcgatcagttcaatgttcagatccttcaggtaatcacttaacagcttgttgattttaaaggaatactccgcaatcagatccaattcttctttggttgcaatacccatggcatagatatgatagtcgttgaccagcggatcacccagcgcatcgtctttatagcagtattccagtacggtatgtttcaatttagtgccttcttccagacccagccgtttggacagggatccggcggcgatgttgcggatgattacctccagcggaatgatggtcactttttttaccacagtttcccggtcggagatttcctctaccagatgggtgggaatcccgttttcctccagcattttcatcaaatggttagacacccgattgttgatgatacctttgccttcgatagtaccttttttcaggccgttaaaggcggtggcgtcgtctttatagtccacaatatacaggttggggtcgtcggttttgaatacttttttggcctttccttcatacaactgttccagctttttcataagtaatctcctccatattgcaataatcgcctttcggcattttcatcatccgtttgatccgcttttttaaagcgccgccgcttccgcctgcagctttttgtctttttccagcacctgccgcgccatttcctgtttctgggcttccagcttgtccgccagcgccggctctgaaaccgccaggatctgcgcagccaaaagcgccgcattgtccgccccgtcaatggcaactgtagcaaccggcaccccttttggcatctgtacggtggccagcaacgcatccattccatccaataccgatgctttcatcggcacgccaatcaccggcaaagttgtgtgccctgccaaaactccagccaaatgggccgcttttccggcggcggcaatgatcacgccaaagccgttttgccgggccgaagaggcaaatgctcccgcttccgccggcgtcctgtgggcggaaagcacatgtgcttccactgggattcccatatccttgagtgacttgactgcgtttttcatcaccggaaaatcgctgtcactacccatgataaccgcaacttttttcattttgacccatcctttctaaaaaaagaaagcagcccgtggaccggccacaggctgcacttattttgtttgagaggatgcactgctcccgctgcaaagacccagatggctacacttacccctgaaaatccggaaaaacgccaaaacacatccagaattttcctgtttatttcctgccagcagtgccgccccgcctgtcgccatcgcttgcatcctccttgcccttttgatcggaccgcttccaaacggacgctgtccccagccagcagaggctctgtttccatagtatacgaaaatcatcaaaaagtaaagtccatccaaaaaaatcgtcgaagaatgcaactttccaagccggtaatccagctggtttgtatactctgtccccgcccggcaaacacttcttatgcaagtatctgcgccagtgtgtctgctacccgatcgatctcctttttccccacccagtaatgggttacaaagcggtattttccatcctcgaggccgttgatcaaaatccctttttcccgcatagccgccggaaacgcctgatggtcaaatccaggcttgtcgatggtaaaaaagatcatactgatctgcaccgcatccatatccactgtcacactgggcagcgcctccagcttttgagcaaaatatctggcgttttcgtgatcctctttcactcgtttggacatcttttcaatggcgatgatcccggccgcagccaaaatgccgcactggcgcattccgccgcctaaaatcttccggtttttcctggcccgtgcgataaaatccgcgtcgccgcataccatggatccgaccggcgcacacagccccttggacaggcagaacattacgctgtccccatattgggcaattgctcttgcctcaacgcccagcgccgccgccgcgttgaaaatcctggcgccgtccagatgaaccggcagcccgtgccggtgcgccgcctcataaacctctttcatcttttccagcggcattaccctgccgttggaaagagcgttttccatctctaccaggccggtccggggcatatggatatcgtccggccttaccgcccgctccaccgcttcggccgtcagccgatcgtcatcgctttttaccgtccgcaggcaaacccccgaaagtaccgccgtcgcccccacttcatgaatcacgatgtgggcgttttcgctgcagattacctcgtccccccggcgggtgtgagtcatgatagcaacctgatttcccattgtaccggaggggacaaacatcgctgcttccttgcccagtgtttttgccgccagttcctccaaacgccgtacagtggggtcgtcgccatatacatcgtctcccaccggtgcggcggccatggccttccgcatttcgtcagtaggatgcgtaacggtatcgcttctcaaatcgataaaatccatccggattcctcccttttctgtttttccctaatttcatccccggcgctgccgcacttttttggcatccctttttatctgttttcgccggaggttgcgcctctgatttttattctaccgccttcggctcgcttgtcaatcagctccttgtaataatttgttggaaaagtccgaattttcccaaaaaagattccagacaacggcagaaaatgctataatgaccgtacaaaacacttttatttgcggatttgtttgcccgccggccaagtttcggcttgccttgcggattccgaatccggaatatcatcaggagaacaaaacatgtcaacacagcgaaaaaatgacctacttcggcagggaagtattttggccgttgccggaattttggtacggctgatcggtattttgtaccggatccccatgtccaatctgctgggcgatgtgggcaacggcatttattctgtcgcctacggtatttacggcgtcaccctgacactggcttccagcagtctgccgctggcagtctccaagctgattgcccagcgctccattcaaaaacagcatcaaaacgcttaccgcctgtttcgcatcgcgctgatctttgctttgatcgtcggtgcggccgcagcactttttctctttttcggcgcagattttttagaaaagctctacgcacgggaagggctggcaaaaccgcttcatattatagctcccaccgttctggtcatgtcggggctggggattctccgcggctttttccagggaaaaaacaccatgattcccactgcgatttcccaactactggagcaaatcgtaaatgccgtcgtcagtatcgcagcgatttcctggatgatgaaaacctacgcccagtcgcagcagcaggcggcctacggcgcagcaggcggtgtgatgggaacgttggcaggtgcgttgactgcccttgcttttctgatttttattttcttcctctgtcgcccccatcttcaccggcagttgcaaagcgacccttacggtgttaccgaatccccgcaggatatcatgaaagcgctgatggttaccgtcatcccggttatcctgagccagacagtttatcagatcgggtttaccttggacgacctgatgtttggcaatttaatggccgcaaaaggggttgacaacactacaataagttctttccaaggtgtttttaactctcagtataacattttaatcaatgctccagtcgcagtggccactgccatggcctcgtccaccattcccagcattgctgcctctaccgcctccggcaatcaaaaggagattcacagaaaagtgcgcggggttgtcaaattcaatatggcagtcgccattccagccgctgtgggtttggctgtgttggcccgtccgattttaacgctgctgtttccttctctgacaacctatcgggatcttgccgccaacctgctggtctacggctcctccgcagtggtgttcttcgccctttccaccatcaccagcgctgtgctgcaaagcgtaaaccagatgcgaacgccggtgattcatggtgccctttccatggtgctgcatgtaatgcttctgtacctgctgcttcgtttcaccgaccttggcatttatgggctgatcatcggtaatgtaaccttcccgatggtgatttgcgcgttaaactggcgctcggtgggcgctgctctttcctatcgacaggaagtggggaaaacctttctcatccccctgattgcttcgctcgttatgggcctgctggcccgcggcacctactctatccttttctccctgaccgatcgcaatacgctcagtactgccgtcgccatcctgatcgccgtattatcctacggtttttgtttgctgcggttccactgtttttcccgtcaggaactgtacgatctcccctttggcagtcggatcgtccgcttggctgggcggctgcatctgctgccttgaccatatctaaaaatgtgtcccaccaaaaagggacgggttatgccgtctctttttggtgggattttcagcaataaaaatttttctgtttctatcacagggaattataaaccgtaacaattcgattccaagtaatccgtccgataatgccgtccaccattaatccaaacagccgttgaaaagtacgtaccgcattggcggtggcatttccgtaaattccgtcggccactaacgtcggaatgcccgtataaatccgcccaatagcgttgagataattttgcatgatcctcacattttccccgcgggatcctacccgcagcaattctcccggataagccggcggcccgctggccccggcattgatatctccctccagattgctgtaaacgctttgcaactgccgccaggtcatcggcccgacaatgccgtccgccgtcaaattaaaggtgttttgaaaagcctttaccgcattttcggtagccgccccaaaaatgccgtccacagcggaaatgaccggaatgctttcataaaaacgccctgcggcccgaagccatacctgcagctgctccaccgattcccctgtggaaccaatccttaacggatatcccggatactccccggctaccggcgcaagcatgctcccttcggaagaaagctctgctaacttggtcaccgccacatagatgtaggaaattttgtaccaggttgcttttcccacaataccatctggggtcaggttaaaaatccgctgaaatgtccgaaccgcactttgcgttgcactgccaaattggccgtccaccgtcatctgggggatagcgggatagttgcgccggatccggttgagctgttgctgcatcacccgcacagcgctgccaacggatcccagccgcagcggacttcctggataggattgcggcgtgccggaaatctccggcgcttgtactagtgagatgtcatatccatagtaatactgtaaaatccccaaaggcgtgtagccttgattggccagtgttaccgtcccccattgctttagccccggacaggttacctgcctgccatcacaatactctgcgtagaatggctctgtaaaattacttttttgaatgtaagtatcaaaaatttcgtctacaattttgctgatgttggtaaaaatatcccgattgtttacaaacgcctgatcgtatgaggtagagctggtaatatcaaaattatatccccggctctgataccattcggtgaaaatacggttgagtgtcagtgaaatctggcagtagatattggctctcagcgcattttccggccaggtcggataaatttcgctggatgcgacatttttgatgtagttgcgaaagctcacggttacattggctgccgaggcgctaggcctacccagatgaacggtcacatactggggtatgaccactctcgcgagaattcgcgcggttgaatattccgtcagatttggctgcggcggacctgcaaggttatgcaccgggatttgtgaaatccgtacctgtggctgtctctcctgggtcggcaccatttccacctgctgaagcgcttccactccggcaaaaatttgtacgcccagcactagctgagactggtacccgctcatctgcacgatgatatcgtaagtgctgtaagggatgactccctcgtatggattttgagacaattccgcatcgggggcgttaagcgttaccgcctccgtctgaccggattcgtcggctgtcaatcgggcaatcgggggcctccccgtctgccattcgttttcattataaatctccaccagcgcaccaggtaaaggcagcgcctcccgcgcgatataaacttcaacgcgcaatgttcctgtgctcaaaaaagattcctcccgtcttttggaatgaagatgcaaggcttcttttcatagtatgcgcgccgtgtcgccaccgtcaccgccacagaaaaaggggcgcttcgaaagcgccccttttttcaaatcgctttttaatcccggatgacttctttccatttgccggtacgataccgcaaaaagaacagaatacaacgtacgcactgatcggcacacatggccagacaggccgcctccaggccaaagttcagtacccggattccgatgaccgtgcctaaaatccgcacaccccacatagataccgtaatgatgataaaggtccatttggtgtcacccgcaccgcgcagtgcaccagccagtacctgtgccagcatctgcggaacctgaatgaacgcgtcgtattgcaggcagatggttcccaacgcaatcactgccaaatccggggtaaacatccgtaaaatcggtcctgcgaaaacatagagcagtacgctcataaatagcatgacaacgctcgcaatttttgccgttattttcacatatttttctgccaaatccggtcgcttggctcccagtgactgacctaccagcgtagtggctgcggtagaaaacgcaaaaccgggcataaaacacatagattccgctgtcagatacagcgagtttgcggcaaccgccacggtgcccaatgttgcgacggtactggtggtaataataccagcagaagacatggcaattctttcaaaagccgcaggcaggctgatgcggaaaaccgtttttaaaatcgcccaatccggcatatattctcccttgatgctcagctgcatgggtccctttttcaaaaaaagtaccgccagcataatcagcgcgccaatggtagccgatccggaagtagctgccgccgcgcccgctacgccccagccagcgccgatcatagtgaattccattccgaacagcgatatcgtcctggtcgggtaaatgagcagaaagttgccgatgacattgacgatattcacaccaatattgacaaacatcggcgttttggtatctccatatccccgcatgatagaagtaatgatcattgacatggtacggaaaatcaacgatgctgcaatgattcggttataaacagcagcatccggcagaatctccgcctgggcccccatccaaaggggaattttttccgccagcagcaacaaaagacacattagaggcaaccccagggccacaaccaccaaaagtgcctgacgcatcaaatctttcgcccgctgcagatcctccgctccgatggatcgggagatcatcgctgtaaagcctacgccaatggccatgattgtgccgtttaccaacatattcggcgagttgctgatactgaccgccgcggtggcgttagctcccatggagccaaccatggctgtgtcgacatagctgaccagcgataccaaaatctgttcgataaacaccggccaggcaagcataacaatggtgaagcttggcctgcggctttcatccaccacgcttactttttgtgtgctcaaaccaatccctctttcaacagaaactcataatgtcctatgacatattacaactttattcagtttaacacagagaatccggtttgaacatagcattatttcataaatattttttttctaactgtatattatgaataaaaaaatggagaaaaacgttttcgtttttgggattgtaaaattttcctttttctctttttgctgttttctctccaaaacagcaaacgccttgtcaaaattcccaaaccggattataatgagaaaaacaggaaagttaggtgtaatatcatgtcctcaaaagaaaaggctctttccattctgtcttatttcggaccgttttttctactagctgtactgctcgctcctgagtcccattttgcaaaatatcacgccaatcaagggctggttctttttctcacggaagtggtggtcagcacggtcatcatggtcggtcggtacatcccgttgatcggatggaccttccagctattgaatatcgtgatcgtcgttctgttctttctggggttgagccacgctatccgggaagtggaggaaccgcttcctttcattggagaaatccagattttgaagtagccttgcggcaaaaaattacttcttttcgctgtaaaaaagagcctttttctgtataaaaaggctcttttttcttctatttttcactcaaaaaacatcgctttttgaaacatttttctcccgtatcttaccttttatcccccgcctgtctacccttcctgtccattttttaccgcccgacgggtcatccaaaacatataaacacccatgccgcaaatcaaaacatatcctatgacactgtaatggtccggcagctggtggaacaggaaaaagcccagaaccgcggaaaaaataacctgtgtataatcataaacagaaatatcccttgccggcgcataggtatatgccgccgtaatggcaaactgcccgccggctccggctatccccgccaaaagcagaaaaagaagctgctgccaagtcattggctgatagaaaaacaacagatatggcagcgttactaggcaggaaaaagcggagaaaaacagtacgatcagcgggcctttttctccattttcgcctttcatgcccaatttgcgaaccatggtataggcgacgcctgcccccaatccccccaccaaaccgatcagcgacggaatcaaatccatattggaaaacgtaggcttaataataaataagctcccaataaaagaaccgagtacagctactatctggtagatcttcagattctcttttaacagcagaaaggaaaacaaaattgcaaaaaagggggacattttatttaacatcgttgcatctgaaagcaccaaatgatctaccgcgtaaaaattgcaaatcacgccgatggtccctgctgcggcacggatgaacagcagccagaaattttctttcttccatcgcaccggcgttccggattttttcagcactgcataggcacacaccagcgcgacaatattgcggaaaaatgctttctgcatagcgggcagctcaccggatgcccgaacgcttgcattcatgatggcaaaacagaatgccgccgccaggatacacaaaattcccttatatcgtttactcattttttctctctccgcatttaccagaatcaaaaaatcgaacatattcactctatgctttttcacatcaaatgtcaacgccttttttgcatagcacagcggtctttgtttgcaaacctttctgattcggattccgaaatcttttactctttgatttgtgcaggatgaaactacggacagcaaagaaaaaacggatgcaggtttctgcatccgtttgggtatttatttcattataccagctcgataatcgccatttcagcagcgtcaccgcggcgaggtccgattttgatgatgcgggtgtaaccgccgtttctctctttatatttgggagaaatttcatcgaatacttttttcgccacggtctctttcgtaatgaaagaatatacctgacgtttcgcatggaggctgtcgttcttgccgatcgtaatgatcttctcggccatggaacgaacttctttcgctcttgtcacagtggtctcgatcttgccgttttccagcagataggtaaccatggctctgagcatcgcttttctatggtcggtcgttctgccgagctttcttgcacctggcatggaaattcactcctttacctggaatagtaagaattattcatcatcgtgggtgaggttgaagcccagtgactggagcttggagataacctcttccaaagattttttgccgaggttgcggaccttcatcatttcctcctcggacttgctgatcaaatcttccaccgtgttgatgcctgcacgcttgaggcagttgaaagagcgtacagacaggtcaagttcttcaatggtcatctcaaggatcttttcttttccgttatcgtccttctccaccataatttcggtgtgataggcctcgtcggaaagatcaacaaacaagttgagatgttcgttgaggaccttggcgcctaaagaaacggcttcctttgcagaaattgtaccgtccgtccaaacttccagcgtcagcttatcatagtcggtaatctgctcgacacgggtattttccacggtgtagtttactttcagcacaggggtgtagatactgtccaccgggattactcccaggacagacgggccggttgccgattgtatctgcttgttccgctctgccgggacatatccacggccgcggtccagggtcaattccatatacagtttggcgcctgcgcccaaagtggcaatatgcatgccggggtttaaaatctcaacctccgagtcggtggtgatggaatcggcggtcacttcacactcgcccgccgcatcgattacaacggttttggggccgtcacagaaaagctttgcggtcaggtttttaatgttgaggacgatttccgtcacatcttccttcacaccggggacagtcgaaaattcatgctggacgccgtcaattttgatcgacgtaacagcaacgccagggagcgaggagagaagcacgcgccgcaggctgttgcccaacgtggtgccgaagccgcgctcgagaggttcaacgacgaatttgccgtatgtgccgtccggcttgatttcagccgtctcaattcttggcttttcaatttcaatcaaagtaaaccctccttataggacaaacatcgggtttgtcatgttgatcgcgttcccttgccgattatctaaaacacgcaattccaaaaccaaacgttcctggctgccaaaagattgcttttggcagcgcgcggacccgctcttatttggagtacaactctacgatcagatgctcctcaacctcgaggtcgatatcctcacggttaggcagacgaacaatagacgctaccatctggtcgttattcttgtcgatccacataggaaccggacgagcgccgttgatctctacgatcgatttcagtttttcgctgtttttgaagccatcagcaacagcaatcacatcgcccgctttgcaaagataagagggaatatttactctcttgccgtttacggtgaagtgacggtgcaggaccaactgtcttgcttcttttctggaatttgcaaagccggctctgtaaacgatattgtccaggcggctttctaagaaacgcagcaggttttcaccggccataccgggtcttctctctgccatttcatagtagtggtagaactggttctcagatacgccgtagaagcgtttggtcttctgttttgcgcgcagctggatgccatattcggaaacttttttgcggccctggccatgctggccgggaacagcgcctttacgggttacgattgcacatttatcggaatagcatctctcacccttcaggaacagcttttggccttctcttctgcacaggcggcaggaagcaccagtatatcttgccatatggttatacctccttgatggttagacgcgtcttctcttaggcgggcggcatccgttgtgggggatcggagtcacgtccttgatcatgctgacctccaggccggcagcctgcagcgcacggatcgcagcttcacgaccggaaccggggccttttacatatacttcaacggttttcagtccatgttccatcgcagctttggcagcggtttccgcagccgtctgtgcggcaaatggagtcgattttctggagcctctgaagcccagaccaccggcgcttgcccagctgagcgcattaccctgtacatcggtaatggtcacgatggtattgttgaaagtggactggatatgagccgcaccgcgttcgatattcttcttctcacggcgtctgcgggtggctttttttgttacggcttttgccatctcagttatccctccctgattacttcttcttgttggcgattgtcttcttcggtcccttgcgggtacgcgcgttggtcttggtgcgctgtcctcttacgggcaggccttttctgtgacgcagaccgcggtagcatccgatttcggtcaatcttttgatgtcgagagcgacagagcggcgcaggtcgccttctacctgcaaatgcttgtcaatgtactcacgcagcttggacacatcgtcctcggacatatcttttactctgatatcaggattcacgccggtcgctttcaaaatgtcagaagcggttttacggccgatgccatagatataggtcagtccgatctcaatgcgtttctctctgggcaagtcaacaccagctatacgagccatacttttgttgcacctccattatatcgattgccacatccgtccagcggccgcttaagcggctggacagtgtggttttcgcgccattagccctggcgctgcttgtgcttgggattggagcaaatcaccataatgcggcctttacgcttgatgattttgcacttttcgcaaatgggcttaacggaaggtctgactttcattttcaaatacctccttgtacctttccgaaacggaacctatttcgaacgccatgtaatgcgtcctttggtcaggtcatacggggacatttcaaccgtgaccttatcacccggcaggatgcggatgaaattcattcttaatttgccggaaatatgtgctaaaatgacatgcttattcggcagttccacctgaaattgagcgttgggcaaagcttcgaggactgtaccttcaatttcaatgacgtcttccttagacaagtaaatacctccctttggtacgcgcagggcttatgcgtttccttctgtctgccccgaggggtaattaaaggaatgcagcagccgcttcaattgattgttcgtcgcaaaattttccacctgaacctgcgtattggttgtacgcagatgcttggggtttttccgcttcggcctttccagcggtcgcactttgccgtctgcaatccagacaaagccatcttctatctttacaaccagatagaaccgctgggcatcccgcccggaaatcgattttacgacacagccttttacgatctccatgtccggcccccttaaggcgtcgtcaggatcaccggcccctgctcggtgatcgcaatggtatgctcaaaatgggccgacagactgccgcttctggttacgaccgtccagtcgttatccagaacgcgcacgccctccccagcctggttgaccatcggttcgatggcgatggtcatgccgggaaccagccggacgccatgtccggcccggccaaaattggggatctccggatcttcatgcaggttatggcccacgccatgtcccacatattggcggacaacggcaaaaccgttttgctccaccaatgcctgaaccgctgcgccgatatcgccaacccgatggccggcctgcgccgcctcaatacccagatacaggcttttttgcgttacgtccagaagcttcttggcctcttcgccgatctgccccaccggaaaggtaaacgcattgtctccgtgaaatcctccgatacaggcgcccacatcaacgctgacgatgtccccttcccgcaggacccgctccgaagagggaatcccatggatcacttcgtcgttcaccgaaatacaggccgtcccggggaagccgccgtatcccaagaaggatggcttagccccctgactgacgataaaatgatggagaatccgatccagctccagcgtggtcatccccgcccggatattttcgccggccaccacaagtgcctgtgcggagatctggcaggcttttttcatcctctccagctccgatttgttttttagctgaatcatacttacgcctccagcgctttgagcacaagcgcgctggtatcggccacttcctcctggccttcaattaccgtaagctttccggcctttttataataatcgcacagaggctcagtggactcgtgataaactttcaggcgttcctttaccgtttccggctggtcatccttacgaatcaccaatttgccgccgcatttgtcgcacacttcccctttggaggaaggcttgaaatcaacgtggtagctggcgccgcagctttcacagacccgccggccggacaaacgcttttgaatcgcctcgtccggaacttcaatatccagaactttatgaatcacaacgcccatggcgtcgagcgcctcggcttgcggaaccgttctggggaagccgtccaggataaaaccgtttttgcagtcctcctgtgccagccgctctttgataattgcgattacaacctcatccggaaccagagcgccgctatccatataggatttggctttttgccccagctcggtgccgtttttcaatgcctcacggataatgttgccggtgctgatagccgggatctgcaatttgtcgcagatgacctcagcctgggtacctttgcccgcgcccggtgcgcctaacaggatcaaattcatattcgtccctccattattccaggaagcctttgtaatgacgcatcatcatttcggactccagctgacgtaccgtatccagcgcaacgccgacaacgatcaggatggaggtaccgcccagcgaaatgttcatgccggtgatggcagtgagcagaatcggcaaggtggcaaccaggcccaaaaacagagcgccgaccagagtgatcttggaaatcaccttggtgataaactcggtggtgggtctgccgggacgaatgcccggaatcgcgccattgttcttttgcagattattggccatttccacagggttatactgaatcgccacatagaagtaattaaacatgatgatcagcaaaatgtagatcatggcataccagccggtattgtaattgaaaatactcaaaaacttatacagcaagccctcggtgttcagcggcacaaacgccttgatggtaccggggatcgccagaatagagctggcaaagatgatcggcagaacgccggacatattgaccttgatcggcataaaagtggactggccgccatacagtttccggccgaccactcgcttggcgtactgtaccgggattcgtctctctgcggaggtcatgacaacgatgaatacgatcatggccaaaaacaggatcagaaccagcggaacatagaagtagtacttagtggactgcgcgcccatctggaagtactgccacattttcagcaccgcagagccgccgcgggacaggataccggcaaacagaatcatggaaatgccgttgccaatgcccttggcatcaatctgatcgcctaaaaagacaatcagcgcggaacctgccgtaaaagtcatgatgatgaccactgctgagaaaaatccagcaaagcccttggtgtagaccaaggcgccctgattttttaacaggaaccagtaagccagcgcctggacaaagcccaagccgataccggtgtaccgggtaatccggttcagtcgttttctgccgtcctcgccctctttgctcatccgttccagtgcagggattgcaaccgtcaaaagctgaatcacgatggagccggtgatgtaagggctgatagacatggcgaaaatcgtggcgttcgaaaacgcgccgccggtcagaacgtcgatatagcccagcaggttgccgtcacccgcgttggacatccaagcctgcataacgcttgcgtccagaaacggaacggggatggcgctgccgatacggaagatcagcaggatcaatgcggtgaacagaatcttctttctcaggtccgcaattttccatgcgtttctaatggtgtcgaacattcttatttcacctcggctttcccgcctgcctcctcaattttctgcttggcagacgcggagaaagcggcagcattcacggtcaacttcttggtcagctcgccgttaccaagaatttttacgccgtcaagtgtttttttcagaagaccagcggcaagaattgcgttggtatctacaaccgcgccgtcctcaaagcaatttaagtcggatacattgatcgtagcatacttggtggcaaaaatattgttgaatcctcttttcgggactcgtcttgccaacggcatctggccgccctcaaagccgggtcttacaccgccgccggaacgggcattctggcctttatggcctttgcccgccgttttaccgttgccggatccgtgacctctacctttgcggaagacgtctttgttggaaccaggcgccggagaaagctcgtgcaatttcatgatactcgcacctccttgttttacgcttcggttacctcaacgaggtgagaaatcttggcaatcttgccgcgggtggcctcgttatcaggctgcgttgtctcgttaccgatttttttgagtcccagagagtacgcagtggcgatctggtccttttttctgccattcaggcttttaaccaatttgattttcatagccatgctacctccttaacccaagatctgctcaacggatctgccgcggatcgcagcgacctcgtcaacgcttttcaaagacgccagaccagcgatggtggcgcttacaacattgcagggattgttggaacgcaggcacttggtacggatatcgctgatgcctgcaacttccattaccgcacgaacagggccgccggcgataacaccagtaccgcggggagccggtttcatcagcacgcggcctgcgccgaacgcaccgattacttcgtgaggaatggtcgttcctttcaaggaaacgtggatcagatttttcttggcgtcctcaattcctttgcggatcgcgtccggaacctcggaggacttacccaatccaaagccgatggtgccgttgccgtcgccgacaacaaccagcgcggcaaatttgaagatacgaccgcctttaaccgttttggatacgcggttaatggcaacgaccttctcttgcaggtccaaagtagaaccatcaattcgagccatgtattctcctcctcctttagaatttcagaccgccttcacgggcgccttctgccaactctttgacgcgtccgtgatagatataaccgcttctgtcgaagacgatttcggagattcctttctcctgtgctttccgggcgatggccatgccgacctttttcgccgcttctttgtttccgccaaagccttcgaaccctttttccatcgaagatgcgctggccagcgttacgccggctacatcgtcgatcagctgggcatagatgtgctttgtggagcggaaaacattcaggcggggacgagccgcagttccgctgattttcttgcggactctggcgtgtcttttcagcctggcagtatttttatccggctttttcaccatttgtgactcactcctttaactacttcttgcctttaccagccttaccctctttgcgaatgattacctcattcacatacttaatgcccttgcctttataaggctccggcgggcgtttctcgcggatttcggctgcaaactgaccgaccttctgcttgtcgggtccgttaacgataattttattgggggcgggaacatcaatggtgattccatcaatttcaggaacgatcacctgatgagagaagcccagcaccataaccagatttttaccctgcttagaagcacggtaacctacaccgtttacctccagctctttgctgaagccgttggcgcaaccttcaaccatgttggaaatcaaagtacgggtcaaaccgtgcaagcttctgtgcgctttgtcatcggtggggcgttttacttcgatcacgccgccttccagtgtgattgccatatccttgttaaaggtttgggtcaaagttcctttcggtcctttaaccgtcacggtagagccgtcgattttaacgtcaataccggcgggaaccgcgatgggttttctaccaattcgagacatttcagtgcacctccttgcttaccaaatataggccagtacttcgccgccaacatgctctttgcgagcctgtttgtcggtcatcacgcccttagaagtggacacgattgcaatgcccaagcctttcatgaccttcggcatattctcagtgtcagcatagatacgcaggccgggtttggaaacacggctcaacccactgatgacctgagatttattgggaccgtattttaaagtgatatgaatgataccctgcttgccgtcttcaacaatctggaacgatttgatgaagccttcgtccaacagaatctgggcaatcgcctttttcatgttggaagcgggtacatcaacggtatcatgttttgcggaattcgcatttctgatacgagtcagcatatcagcgattgcatcggtgatgtgcatgtaatcaacctcctttgctcgtgcttaccagctagcctttttaacgcccgggatctggcctttgtaagccaactctctgaaacagatacggcagatgccgaatttgcgaagataggcgtggggtctgccacagatcttgcatctgttatatgctcgagtggagaatttgggtgcctgctgctgtttattgatcatggactttttagccacctacaaaacctccttcttacttggcaaacggagcgcccatcagagccagcagctcacgagcctcttcgtctgtattggcggttgtgacaaagcagatgtccataccgcgcactttatcaatcttatcatagtcgatttcggggaacaacagctgctcgcgcagacccatgttgtagtttcctctaccatcgaagccgttggggttgattcctctgaagtcacgaacgcggggcagagcgatgttgaagagtctgtccaaaaactcatacatggtctcgccgcgcagggttactttcgcaccgatggtcatgccttcacgaagtttaaagttcgcaacggatttttttgctttacagggaacagctttctgaccggtgattttgcccaggtcagagataatagcgtcgattaccttgggattatcgcgtgcttcaccgcagcctacgttgacaacgatcttctcaagtttcggaatctgcatgacgcttttatagctgaactttttcatcagagccggagctacgtcttttacgtagtaatctctcatcctggccatgttttttcctccttcttagaaagtttcaccgcagtgcttgcacatacgcattttagagtcgccatccattttgtgggccaggcgggtgcctttgccgcacttggggcataccaacattactttgcaggcgtacagcggggcttctgctttcacaataccgccgggctcacccattctgcgaggcttaacatgtttggttaccatgttgcagccttcgataatgactttgcgctcggtggggcttacttccagcaccttgccctttttgttcttgtccttaccggacaggatgatgactgtatcgccttttttgacgtgaaccttattcactttacagcgcacctccaattacagaacctctggggcgaggcttaaaattttgagatagtctttctcacgaagctctctcgcaaccggcccaaaaatacgcgtaccccttgggtttttatcttctctaataataactgccgcattctcgtcgaaacggatataggtgccgtcgtcgcggcgaatgcctttggcagaacgaacgattactgctttcacgacgtcgccttttttcactacgccaccgggagcagcttttttaactgaagccactaccacatcgccgatgttggcgtatcttctgcgggagccgcccagcacacggatgcacatcaattctttcgcaccggtgttgtctgctaccttcatcaaggtctgcatctgaatcacagaatgttcctcctttcgattattgacattggtgtaggattattccgctttctcgatgatctggacaacgcgccatttcttatctttggaaatcggtcgggtttccatgatcatgactctatcaccaattccgcattcgttcttctcgtcgtgagctttgaactttacggatcttttgataatctttttataaagggggtgttttacattgtcctggatcgatacgacaaccgttttatccattttgtcgctgacaactttgccgaccctcgtttttctgaggttcctttccacagcttaaatcctcccttcgtttactgcacgtttttcatttccaactgacgcagcaccgttttgatgcgcgcgatgtcttttttgacctctttcatccgcatgggattctccagttggttgatggcgtgctggaagcgcaggttgaaaagctcggctttgagtgcggtcagcttttcgttcaactcggcattgctcaactcacgaatctccgaagccttcattactcttcaccctcctctgcttccttttcttttacaacaaatttcgttttgatcggcagtttgtggcttgccagacggaacgcctcgcgcgccagctcctcggaaacgccgccgatctcaaacattactctgccgggttttacaacggcaacccagtactcgggagaacctttaccggaacccattcgggtttcagccggtttctgagtgattggtttatccgggaagattttgatccatacctgaccgccacgtttgatgtaacgggtcatggcaatacgggccgcctcaatctgacgggaggagatccaagcgggctctgtcgcctggaggccataatcgccgtaagttacggtgttgcctctcatggctttaccagtcagacgtcctctgtggactctgcggtattttactcttttcggcagaagcattagtttttgcctccttccttacgaggctgctttttgctatcggccagaacgtcgccggtgtagatccacacctttacgccgatctttccgtaggtggtattcgcctctgcaaagccgtaatcaatgtcggcgcgcagggtctgcagcggaatggtgccctcgtgataatgttcgctacgcgcgatctccgccccgcccagacggccggaaacgttgaccttaatgcccttggctcccagcttcatcgcacggccgatagcctgcttcatcgcacggcggaaggacacgcggcgctccagctgagtggcgatgctctcggcaaccagctgcgcgtttttgtccacttgttttacttcaacgatattgatgagaaccgcaaccggagtctcttttccttcgttgatcattttttcacactgctggcgcagtttttcaatatccgcaccgccgcggccgattaccatgccagggcgcgcacaatggatatgaattctgactttggcagcgtcgcgctcgatctcgatgcggggaacgccggcgccatacagggttttctttaagaatttgcgaagtttgtagtcctcgacgaggatatcgccgaaagcatcatccttagcaaaccagcgggaatcccaatctttgataacgcccacgcgaagaccgtggggatttactttctgtcccatagtttacctccttctttcagcttattccttttccttcaggaccatggtgacgtgagaagttcttttcagcacacggaatgcgcggccctgcgctctgggtctgatccgtttgagtgtgggaccggggcagacataacactctgcaacatacaggttgtttttatccatgttgaagttgttctcggcgttggcgacggccgaattcaggagcttctccaacggctcgcaagcagccttcggggtgtgcttgagtattgcgcgagccagctgtgcgtctttgccgcggatcagatccaggacaatctgcacttttctcggtgcaatacgggcgtatttcaaataagcccttgcttccatgttaatcctcctttcggcctactttccgttattcgatttcttggaaccggcgtggcctttatacgttctggtgggggcaaactcgccgagtttgtgtccgaccatgtcttccgttacataaaccggaacgtgtttgcgtccgtcatgcacggcaaatgtgtgacccacgaaatccgggaagatggtggatgcgcggctccaggttttaagaacctttttctcgcctgttttgttcatttcctcaacgcgtttgagaagcaccggcaaaacgtaaggtccttttttcagacttctgctcatgactttttgcctcctttacttcgcgttgcgacgtttcacgatgaacttatcggaacgattgtgatgttttctggtcttgtagcccagtgcgggtttgccccacggggttacagggcccggacggcctacgggagacttgccttcaccaccgccgtgcggatggtcgttggggttcatgacagaaccgcggacagtaggtctccaacccatgtggcgtttgcggccggctttaccgtaggatacgttctcatggtcgatgttgccgacctggccgatggtggccatgcagttcgccggaacgttgcgcagctcgccggagggcagacggatcagcgcataagcgccttcttttgccatcagctgagcctggatgccggcggcgcgggccagctgagcaccttttccgggatacagctccacgttgtggatgaaagtaccgaccgggatgttggccaacggcagcgcattgcctgcgatgatgtccgccgcgggaccggaaacgacggtatcgccgactttcaggccgttgggggcgatgatataacgtttttcgccgtcttcatactgcaccagcgcaatatgagcggaacggttggggtcgtactccagggtcaggacctgagcgggaaccccagctttttctctcttgaagtcgataacacggtattttcttctattgccgccaccgcgatgacgaacagtgattctaccgtagctgttgcggccggagttggtcttcagagactcgacaaggctcttctccggagcaaccttagacaactgagagtaatcggtaacggtcatctgacgacgagccgctgttgtcggtttatagcttttgatagccattcggtttcactctccttgttcaatgagctttgcgggatgatcttttgctatcccagaagcttacatcatgctctcaaagaattcgattcccttggagccatctttcagcgttacgatagcttttttccaatccggctgatagccgccatgcatgccctggcgacggaactggccggggacgttcatggtgtttacctttttgacctttacgccgaacagttcttccaccgctttggcgatctcgatcttattggcatcgttcgcaaccttgaaggtatactttttgttcgcaataccggacatggaagcctcggtaataatcgggcgaaggataatgtcctgtgcctttttcattatgcgtacacctcctcgagtttttcaacggcgctcttgacgatgatgaatttatcatggttcaagatgtcgtacacattgatggtgttgaccagcgcggtctgaacgcccgggatattgctggcgctctggatcagtttttcatcaacggaaggcataacgatcatggcttttttgtcagcgcccaaagctttgagcatattgacaatcgtcttggtcttgtactcttccacgctgatgttgtccagaacgatcatatcgccgtctttcactttggaagacagggcggacagcatggccagtttcttcacctttttgttcagagaatatctgtagtcacggggtttcgggcccaaagcaacgccgccgtgtctccactggggagctctgatggagccctgtctcgcgtggccggtgcctttctgtctccagggtttgcggccgccgcctctgacttcggttctggtcagggtggactgggtgccctggcgctggttggccaggtaattgaccaccgcagcatgcattaccacgctgttgggttcgattccgaatacggcatcggaaagggcgatatcgccgaccactttgccggacatatcatatacgtttacatttggcatcgtgcttcctccttcccttatgcctttttaacgctgtcggtcagataaacgattccgcctttggggccgggaatcgcgcccttcagcgcaatcaggttgttttctgcgtctaccttaactacagtcaggttctgaacggtaacccgctcaacgcccatgtggccaggcagctttttgcccttcatgactctggaagggtcggaacacgcgcccatggagcctgcatgtctggcaacaggaccggaaccgtgtgtctctttcagtctggaaaaatggtagcgcttgatggtaccggcgtagcctttacccttggaagttccgcaagcgtctactctgtcccctacctcgaaggtgtccgctttgatgatctcgccaacgtttacgccagagcagtcgtcaagtctgaactctctgagtacgcgtttgcaggcgacatccgcttttgcaaagtgaccctgcaggggtttggaaacctttttctgcgcaatgtcgccaaagcccacctgaatggactcgtaaccgtcgttttcgacagtctttttctggacgacaacgcaggggccggcttccacgacggtaacgggaacaaatttgcccgcttcgtcaaaaatctgggtcatgccgatttttttgcctacgatgcatttttgcattcttttctcctcctttggttattggttgacggagcatcccgccaacttgacctggcagcgcatgaaactgagaaattaaagtttaatttcgatttctacgccagccgggagctcaagaccctgcagcgcttcaacagttttgttggaagggcgcagaatgtcaatgagtcttttgtgggttctcatctcaaactgctcacggctgtctttgtacttgtgcaccgcgcgcagaatggttacaacttctttttcggtgggcagcgggatgggaccggaaacccgggcgccagtacgctttacggtttcaacaatcttctccgcagcggtatccaccagctgatggtcataacctttgagtctgattctgattttttctttgactgccactaccatcgcctccttgagataacttttttcgggtgggacgacgacattagttgaacactgttccgtgtgtttcgcgctttaacatttaaaaaccggccaaatcagcacttgtcaaaaagtacagtttgtccgggacttgacagggtaaatgtcaaaaagcgacagggagaatgtgctttttctacaaaagcgcatccagcatgtcaacggtattcttgtcgcccggtttgaaatcggacatactcggcagaaattacccgcctgcggcggcaacctcctgcttcatcgcatatcttagtgcagtcacgctcaattataataacatagcccccggataaaagcaagctttttttcttcaaaatcttgcgatcttggcggaaattctcccacaattctgttgtccattcatccgggtgtttcccggcgggatttttggcgtgagagcttgcttcttcgggggcttttacggtaacagaagcgttttttccctctttccgggaaagcgtccgctcccatataaatttttgcggtttgagctcgtaggtactcggatcggtttttgccgccggtgcgcagagccggcggcaaaaatggcatttatctgctttcttctccctttgttggaaagagccgttctctttcctcctcggtcatagccgaataatttttcccgtcgggcagccgctgcagcgcgacgctgcggatatccagcacataccaatcgtattgctgcggcatcggctcatccacaccagtcgcattgacccgtgccagcgcctcctgaaacgcctgagattcatagccgatgagcatgcggtaattggacagaaaccaggagaaaaaaggcttttctgaagaaaagatcttttgtgtttcgcagtcagggctttccgggtagaacacctggtaaaggtcattgcccacctgataataaaaaacatattcgccgggcagaaaagccgaaatatttccctgaatttcggcggggacttcgtatatggcggcctttttgtattccacgccgcccgcctccgttaaaaccagctgcgcagtcgggaaataaaccgtcctgccatatccggatccgcttgcacaggttagagactggcaccagttgacataccgttcccggctaaagtattcctcccggctcatcgtcatgccatgcccggcaaaatcgggcgtatccgtcccaagcgcttccgaggattccacgctctgcgcctgcccgtccgtctgcgctccgggatctgacgcagcttcctccgctgcgcggcaaccgccaaggaaaagacaggcaacgcaaaggccaaggcaaacacagcgctttccagtcagccttagcaattgaagcgcatttcttttcatacaagggtactcctttctttttaaatggaaagagtgcacactttctttaatcaaagtataatttttatacattatattgtcaatatctgtaattcccaaatgcctgcaaaaactttggcgggtttgccaagtagtatttgatccttattcccgtattcataaaaaggtgccggaagagcccgtatggagcttttccggcacctttttttacagtacagctttcggctgcgctttattttttcataatggctttcatccgctgggcattgtccagaatacgcttgcgcagccggatgtttttgggagtgacttccaccagctcatcgtcgccgataaactccagcgcatcctccaggctcatgcggcgaggcggcgttaagcgcagcgcgtcgtcactgccggaagaacgggtgttggtcagatgctttttcttacacacattgactgcaatatccccagctttcggcgactggccgacgatcatcccctcgtagacctgcacgcctgcaccgatgaacaaagaaccccgctcctgagcgttatacaacccgtaaaccactgcttcaccggtttcaaaggcgatcagggaaccggtcacgcggcggggaatgtcgcctttatacggctgatatccgtcaaacaccgaagtcatgattccctcgccgcgggtagccgtcataaaatcgctgcggtagccaaacagaccgcgggacggaatggaaaactccacccgcatccggttaccctggggcgccatatggatcagttcacccttgcggcgtcccatctcttccattaccgagccgaccgattcctccggcacatccaccaccagatgctccatcggttcgtgcagcttgccgccgatctccttaaacagcactctgggagtgctgacctggaactcatacccctcccggcgcatggtctcgatcaggatggacagatgcatttcgccgcggccagaaaccttaaacgcctcggtggtatcggtatcttctacccgtaaagaaacgtctttcaataactctttgtataaacgatctcttaaatgacgagaagtaacaaattttccttcttttccggcaaacggactatcattcacagagaaagtcatctccaccgtcggctctgaaatccggacaaacggaagcggctccggacagttcacatccgttaaggtatggccgatggtgatattctccaatcctgaaatactgatgatatcccccactttggcttcttccaccggcacccgcttgagcccgtcaaactggaacatggtggcgattttaccgcgggtggttttatccttttggtaataatcggtgattgccacctcctgacccactttcatggaaccgcgatcaatgcggccaatgcaaatacggcccacatactcattgtagtccaaagaggaaactagcatctgcagtggggcggcctcgtccccttccggcgcggggatatactccagaatggtttcaaacagcggctgcaaatctttgccgggttgatagggggaaaggctggccgtgccgtcacggccggagcagtagaccacagggctgtccagctgctcttccgaagcatccagatccaaaagcagttccagcacttcgtcggcaatctcatcagtccgggcgtccggccggtcgattttgttcactaccacaatcacccgatgacccaagtccagcgccttttgcagaacaaaacgagtctggggcatagggccttcgaaagaatccaccaaaagcagaacgccgtctaccattttgagcacacgctccacctctccgccaaaatcggcatgtccaggggtatcaataatattgatttttacatctttataataagctgcagtatttttcgccaaaatcgtaatgccccgttctcgctccaggtcgttgttgtccatcacacggtcggcaacctcctgattttcgcgaaacaccccgccctgttttagcatttcatccaccaatgtggttttcccgtgatcaacgtgggcgataatcgcaatatttctcaaatcatttctaatcaaaccggattcctcttttctctttcaaaaagatttctgcgagcctttcgctcctcccgccgggtacgcattttctgtaaatctggcggccgcattttgcagtgacagtttattatagaccttttttgctatcttttccataaaaaaagcaaaaaatctttgttttttcccttttgcccaaagacttttggggcattctggctctttttgtacgagaatggcctttcgaagagaaaaaatacgacagaatacagatctctgcctggaatgccactttcctcaaggtcagaatattcagaaaaattctttcaaaggtactatcatcagctcctatatttcctgttttaccgaaaaagggcgcttcccgacaagagggcgcccttaagatacattttaccgaataaaattcgtggaagtacgcggatatttttccggcagcggcacagcggcgcgactatattccagcgttttgagcatccatgccatatttcggccaatgttttccataatctggatgccctccatatcttgctgcgcttcaccggggcgcataccatgaatggcattccaatagaaagacggaacaatcagcgcattggccagattaaaataattgttcatctggtgaaaagcatccacaccaccggaacggcgcaatgccacaacacctgctaccggtttataggcacacaattgcccgccgccgcaataaaagaaacgatccagaaagcttttcattgtgcctgcaattccagagtagtacacaggagacccgatgaccaacccatcgcattccgccatgagacgaacacattcatttaccgggtcttctgtgaatacgcacaaccctcccgacgtacgccggcacccgccgcaggccatgcacccgcgaatcgcttgattccccacctgaatcgaaaccgtctcaatttgctgtgccgccaactctttttcaatcgctgacagcgctgctgcagtatttccatttttgcgcgggctcccgttaatcaacaaaactttcaccggttttcctcccatccattattcataaaagcgcaggcatgcgataacctttcccaatatcgaacaggaatccacaatgatcggatccatcgtatcattctccggctggaggcggtaatggccgttctctttaaaaaaacgtttcacggttgcctcgtcttcaatcagggctactacgatttcaccgttataggccgcggtttcccgtctggcaacaattacatctccgtcaagtatgcccgcattgaccatactttcacccttcacacgcagcgcgaacagatcactcccgtcgccatacttggtctgaaatggaatatattcctcaacatcttccactgccagaatggg

SEQ ID NO: 2901 - DNA, 32759 bp, Unknown
  16S sequences of unknown bacteria
ggtacacctcccaccctcgaaaacgctgaaatatcttttccatgtgcggaagacatatgaaacacccattgaaatccgaacccttaaggtttgaacatcaatgggtgttttgattttttctcaattttatgcgggtttcggggggctggctgaatgcaaatgggacatcaaaacagaaaaagcgtaaaacgacaatcgaaaaataaaaccctgcgattcctgtgataatttgaatgagttgccaaagccgtttgttttttgcataatcaagctctttgttttgcggcgtcttgtataacttgaaaaacacgcaggtttgaatgcagacaccaaacgcaagaatatctctattgtgtagtcttcgcaacaaaagagacctcttttgcctgctaagacgagagaagggttcttattgacaaaggccggtaagatagatacaatgagtttaagaagagagactaaatgtacaaaatgctcatcttgttttttgcttttcctaaaaatcaaactgaaaggggatgactcaagtggggtgtattttattcccttttgaactaatttttgaggaaataattgagggctggttttatttaatgcaatggattgttcctgaaagggtgttaagaaaaggcttccgtacggcattaaaaataattgtgggcatatttacaattattttatttttgtttatgtttttagggatatttgctttattatctgatgatgaatacacaaattacatgggcaaattcatggtgtttattcctcttggaattagtgttgcacaaattattttgggaataattgttcgctgtattacgaagaaaaaatgatgtatgccaaaccaccgaaaataaatttttgtccaaacgaaattctctatttaaagctgcacggttacctttaaaggtgaaagggtgatgtctgcccgtaccaagcagcgagaccgtcccctcctctcagggatatgctgaatccctgagaggaggggccttttgctgtgcatattttttcggggacggatgaagcggataagaacaggtttgccgccggccgtcccctcctcaaaaaatctggttctacccggacaagtcccctcatatctattagacgaggtgaggacaggcatatggacagctttgaaagggcagccggctatctgcctgccgatttaagagaacttctgcgaaagatcccgccggccctgcggcttgagattcaggagatccgcctgcgggcggacgcgccgctgatcctgtcggccccgtcgggggaatgggccgtgtccggaaccgggcaggtgacggaaaaagccgagacagccggccgcatttgtacaaaacaggaattggaggaaacctttgaagccctgtgtgagtattcggtccacagccaccagcaggagctgcggcagggatatatcagcaccaggagcggctgccgcgccggtgtggccggtacgacggtggtggaaggcggacaggtcgtttcgatgcgaagcatcacctccttgtgcatccgggtggcgcgccctcatcccggctgtgccgcgagcctggccagggccctgaccgacagccgggggcgggtgcacagcgcgctcctttgcggcgaaccgtcgagcggaaaaagcagcctgctccgggacttggcacggcagctttcacagggattgaccgggaggcgttaccgggtctcggtcatcgatgaacgcggggaactctcgggagtcccagaggcacccggacaggcctccctgcgaaactgcgacgtgctgctgtattgcccgaaaccagccgggatcggacaggccgtgcgctgcctggcgcccgatgtcctgctgttcgacgagctgggaggagaggatgaggtggatgccgtgacggccggactgtttgccggtgtagcggccatcgcgtcagcgcactgccgggacagggactccctgcttcggcgccaggcgatccggcgggcgctggagaacggggccttcgactatgtggtgatgctcgccggccgggggcggccgggcgaggtggcggggatttttgaaacggaggcgtggctgcatgaaaacagcgggcttgctcctcatcgtggcggcgggactgctcctcggtttgatggcggcgggaggactccggcggcgggtgtcgacgctcggccaactgtcccggtttatggtcagattggcggatcagatccgctatactgcggcgccggtggaagagctgctgacagcggctgaaagctccggggaattcgacggcctttcgatgctcggccatgtttgttcccggcttcggaaaggggaacgggtgctcgccgcctgggagggggccgtggaggaggatggaaaggacgccgggctgaccaaagccgacagggagctgctccgcggcttcggcagccagctcggccgaaccgacgtcgagggacagatcgccaattgccggcaatatggggatcttctcgaacagaggctgaccgaggcaagggaagccgcggcggccaaggggcgtctgtatatgacgctgggcttcgccggaggcatggctttggcccttctgctgttgtgacaggggcgggcggataggctcacaaggaaaggatggtttgtcgtcatggacgtggatctgatcttcaaaatcgcggcgatcgggatcatcgttgcggtactcaaccaggtgctcatccgttccggccgggaggaacaggccatgctgaccactctggcgggcttgatcgtcgtgctgacgatggtggtcaccgagatcagcgacctgttccgtatggtcaagtcggtctttgggttgtgatgatatggatatgggtggtatcgcggcaattgtggtactggcagcctttttagccgtcattctccggcagcagcggcccgagcaggcgatggcggtagccctcattgccggcatcgggatcctggccctggtcctcatgcggataacgccggtgatcagcaccctccaggaactgctgggggccgcggatatgccgggcgaatatggcctgatcctgttcaaagccctggggatctgcctgattacccagttggcatccgatgcctgccgggacgcgggcgaggccgccctggcatccaaggcggatctggcgggcaaggtgacccttctggtgctggcgctgccgctgttccagaaaattggggagctggcggtatcgctgattaacgggcagggggcgggcggatgaagaaaacgatcagaatcctcctgtttttcctccttcttgccgtggcatgcagcttcgcggccggggcggaaaccgtcgaggacctctataacgagcagctcgaagcgagcggtggggaggaactgctgcgcgaccttccggatgaaacccgccggctgctggacaagctggggattacgggactggaaatggatacgttttccaatctgaagcctcagtcggtctggaaccagatgctctctctcttttcctcccaggcgggttcccccgtccgggcctgtggcgtggtgctggggatcatcctgctgtgcgcctggatggacggactcaaacataccgtccgggaaccgggctcgtcggaggtgttcggcgtcatctgcgccctcgccgcctgtggcaccgtcatcgttccgatcgtttcctgcatccgcagcgtatccgaggcggcggagagcgcgtcgatcttcatgacgagctatgtgcccgtttacgcgggggtgctgctgacgtccggacaggcggccacggcggtatcctatcaatcggtggtgctgttcgccgccgaactcatctccttattggcgtcgggggtggtggtgccgctgatgaccatctccctggccctcggactgaccggctcggtgacgccggggatgaagctggacgcggcggggaacctgatgagcaaggcggccgcctggctgctggggctttgctgcaccctatttgtagggctgctgtccctccagagcctggcgggcgccgccgcggacaccctcggggggcgggcggtgaaattcaccctgtcgagttttgtgccggtggtgggcaactcgctgggggaggcgttttcgactatccggagctgcctgcatctgctcaagtccaccctcggcggcttcgggatcctggcaacggcactgatcgtgctgccgccgctgctcgaatgtgtcgcgtggacattggggctcagcctgtgcgtcatggcgtccgagatgttcggcctgaccacactgaccacgctgctcaaagccgcgcagtcggtggtgaaaaccctgatcggcgtcctcgccgcctgcgcgatgttcctgatcgtctccaccgccatcgtcaccatgtccatgccggccggatgagggccggagaaaaaagggggaagccatatggacgggatcaagggctgggcggcggcgctgtgtgtggcggcgatcggctgcgccctgatgcagatgctggcgcccaaggacggcctgggaaaaatcttcaaactgatgctcggcgcgtttttcctctgctgcatggcgatgccgttgctggaactgggatccatcaccagcttgcatgtcgacagcctgcccggagacgtcaccaacgagctgctgcaggagaaggtggacgcccagctccgccggcaggtggaggccacggtccggcagatggcggaaaaggcgctcgaaaaccggggagccaaagcggagaaaatcaccgtaaccatggatacttccgaagacggcggcatatatatacagcaggtcaccatctatctggacaaacaaaacaagccgaaggccctggcggcccgggaggtgttggagcagcagctgggcgtcagtgtcgtgctggacgcgacgggatgaaaggatgagaaccgctatggatgagaagctggcggccaaaaccgcgccgcccaagaagaaatggacggaatttttcaagggaaaaaccgggcagcgcttgatcatcgccgcggggatcctcgggatcgccctgatcctgttgtcggaattttggcccaaggagaccaagaccacgtcggcaaaggcatcggcggaggaattcgtgacaaaaacggaggaaaagctgaatcaaatcgtgggcagcatccagggggcggggcagtgccaggtcatggtcacgctggaaaacggcgtcgagtacgtctatgccagccagcaaaaggtcaataccgaccggaccgaggatacggcttcggattccaacaaaatctctcagcgggacggaacagagcagaacatcatcatcgtggacacggacaatggccggcaggggctgctggtcaccgaaatccagcccacggtgaagggggtggtggtggtctgtgaagggggagaccttcctcaggtccagcagcggatcattgaggcggtgaccaccgccctgaacatatcttccaaacgggtgtgcgtgaccaaatcctcttaaattttacgggcgaaaggaatggatgggatgagtgggatcttcggtaaaaaacaggtgttgctggcgaccttgatcgtggcgctggggctggcggtgtatctgaattattattttgccaacaaagcgccgacggtcccgaccgggaccggcacctcgtcgagcgataaaaacctcggcgacgcccagtacgtcgggaacccctcgaccgtgtcgggcggcgataccagcacgacggaggacccctccgactatttcgtgcaggcgcggctcaaccgggagaatgcccggcaggagcagctcgatatcgtcaaagatatgatgaacgacgtcaaggcgaccgacgaaatcaaaaagcaggcggccgacaaggtggaagccgttacaaaagccatcgaacaggagagcaagatcgagagcctgataaaggcaaaagggtttacagactgcgtcgtctatatcgaggacaaaaactgccagatcgtggtgcgcagcgaagggcttcagatgcaggatacagtccaaatcaccgagatcgtcacctcacagtcggatataacggcccagaatatcaacattgttccggtaaaatgagaaaaaagagttgccctggacggactttgtggtataataggcaggtaatcacataacgcccgttatgtggtgaatccggatcttttgccgtggcgcgggtttccttccctgcagatcgctgtggatcccacgaagcctataccatcattcaaggaggtcatcgtcatggatgataagggatacaaaccgtccgagggcagctgcatcatatcggaagacgtgattgccaccattgccagcaccgccgcgctggaggtgcagggggtggccagcatggcccagcggcccaccgatatccggggcctgatcagctccgccgccgccaaatcggtcaaggtcctcaacaatgaaaacgagaccagtatcgatgtctatgtcaatctccgcctgggcgtccggatccaggatgtggcgggggaggtccagcacggcgtcaaagttgcggtgcagtcgatgaccggcaagcccgtgaccaaggtcaacgtgcatgtggccggcatcgttttcgacgaggaaaaggccgaagcctgagcgggcggcggcgtcacgatgggatcgcggaccctccgcaggcatgtggagggtctttgccataccggagagtgtcgcctcctgtcgtctttagagaaaaatcggatgtttgagaaaggcgtgacgtgtatgacacggcgggaagcccgggaattggcgtttatcctgttgtttgaaatgtcttttaccggtgagccggtcggcaccattttggaaaatgccgctgaatcccgggatgtggagggcgacgcgttcgccctgtccctggcggaaggggcggcggcccatcttgaagaggaggatacgctcatctcggccttttcacgcaagtggaacaaggaccgcctctcccgtgtggccctgtccatcatgcggctggcgatatacgagatggagcatgaggagaatatcccggtcagcgtctcgatcaacgaggcggtcgaactcgccaagaaatacggcggggaggacgatgccccctttgtcaacggcgtcttgggcggcgtggcccgcagaggcgaagccgtgtccgaaacagaagagccgaaaccataacggggagtggcggtcgccatgggattgtatctggggctggataccagcaattataccacctccgctgcggcgttcgacgccggggcgggggtgatttggcaagtaaagcggccgcttcccgtcaaagaaggcgagctcggcctgcggcagagcgacgctgtatttttccatacccgacagcttcccgaggtgctcgaacggctgcgggaggatctcggcggccggcctttgctgctcgacggggtggcggcctctgaccgtccccgtcaggcggagggttcgtatatgccctgctttttggccggatccggtatggccagagggctttcggctgtgacgggggcgccgttcgtctctttttcccatcagcagggccatgtggccgcggcgctgtatggagcggataagactgcgtggcttgaccgccgcttcctggcgtttcatgtatcgggcggcacaaccgatgccctgctcgtcgagccggacggtgataccgtgctgcgctgtgagacggtcgcaacatccctcgatttgaaagccggacagctcatcgaccgggtggggcggatgctgggcctgccgttcccggccgggccggccctcgagcggctggccctcggcggcagtggggtctatcggccccggccctcgctggaggatggcagctgccatctgtccggggtggaaaatcagtgccgtgattgtatagcccggggggatcccccggaagaggtcgcccgcttctgcctgtgcagcgtgctcgcggctctggatgggatgacaacggcgctgctgcgccggttcggcgatctgccgctcctttacgcgggaggggttatgtcgaatacccttctccgccgcggattggaagcgcggtatggcggggctttcgcgccgccgtcctattccgctgataacgccgctggaatcgcgtttctcgccgccatccgctcagaaagaaggatataggatacaatccgctctaccgggaagccatcctgggcggcagcccctttatgtatgggtgttggttcaaaagatgccgtacccgccgactttcctaaaaagaactccggaccgcccctgaagggctctctatacggacgggcactggggccggtcaccggccattgtggcgtcccacaatggccctaaaaaatcaaaattacccgggggcccccaggggggctccctctggcgcttcttttccccctttctttgtgtaaagaaagggggtacgcaggccaggcccatttttgcggggcgtgttggagtttgtccgcacatataaaacgttctcctaacgaaaagggatatccaatgcgcggccacccacttttgcccttggcggcaaaagtgggcaaaaacgcccccgggggagaacccccggccctccagattgctggccgattttctttttatgaaaatcggcgtaaacgccggcacctgaacctacgccatacagagagggggcccgaggtccccgggtgtttggggttatcattttatagacgtataaccaccgcccccggtgttctgcggctggagaaaagggcggaggctctttcgggtgggccatatagttttttatcgtgccccttcgatatgcagaaaccgcggcagcgcgtagaaccagtgggataccggccggttgtcggcatcctcgctgtgagtggccaccagcacgttgtcgggatcggggtgtgtccccaccgacacaatcagggcggtgtgcccaaagctgacgcccttgtcgaaggagagctgcatgacgtcgccgatctgcagctgcgacagctcggccggccaaccgtatggcccggctttggtgttggtggtgataaaccggtaaaacggctgcaccccggtccaggccggcgcccggttgttcaggaacgcgtaaaaccagccgaacgtcggcgtgtagttcatcggggctccgcccgcgtggagacactgggagacgaagttggtgcaatcgccccccatttcagaaaaatcgccataagccgggtttcgcccgtaggcccacttgtgggcataggcgaccgctttttcccggtcatatccatacatctgtccatccctgtcctttctggaattggattcatctgcggccgaaaggcctgtcaacccattttatgcggacacaggatgtttggtttgccctttccggggccatactaccggaaaagggggaagggatcgatgcggctttggcacgaggatttgctgccccttctgccccgggcgcagctgctcgggcagcatcgggaatgctgcgcgctccgggggctctcctggggaaaaaagcatgcggtggtggattatgtattcgtccatccgcccgaatatctgatcctgtatcatctgcgggtgatgatggaaatggcccgccgaggctatcgtgccgagccgtgctgggcctctccggggtatcgtgggcggcggtgcgaggcccgggaaatcgatacggcgttaatggcattgctggccggccgcaggccggtctatccggagcacggccctctctatctggaggagtgcctggaaaatttgaggcaaaaaggggtttatctctcgaatgatcccaagaaaggaagcggtaagcatgcagacgacgcagagaaaccgggaggacatcccggaagagtataaatggaggatggaggacatctatcccgatccggcggcatgggaacaggatctcgccgccctgctgccgatgggggaagagatcgcggcgtacgccggccggctgggcgaggaagaggcattggtgtcctgcctccttctcgatgagaagctctctatgcggttggaaaaggtatacggctacgcccatatgctgcaggatctcgacaatgcgtcgcccgcagcccagtcgatgcaggagcgggcgctggccctgctgttccgtctccaggagatgacggcgtttttgctgcccgagctgacggcgctcgatcccgtccggctccgggaggtggctgaacggcgtccggaactgcgggatttccgccatatgatcgacaatgtcatccggtccagggcccatgtcctctccgccagggaggaacagctcctcgccatggcggcgcccgcgctcgaatcgatggacaacgctttttccatgctcgacagcgtggatctcgaccgcggcgaggtggaggacgaggacggaaaccgggtgaagctgaccgacggcctgttcgcccggatgcgggagagccgggaccggcgggtgcgggcggacgctttcgccgccctgcacggcgcttttcagaagatggggaacaccatcgcggccctctacgccggacaggtgaaggcggatgttttcgccgcacgggcaagggggtatgcggacagcctcgatgcggccctgttcgccgacgccctgccccgttccatctacgccggattgatcgggaccgtacgggacgctctgccggtgtatttccgttatcttgagttgcgccgccgcctgctcggggtggatcggctgcatatctacgactgctacgtaccggtggtggagatgccggagacggcatacacctatgaacaggcgcgggatgtggtcctcgacaccctcacgccgctcggcggcgggtatatccgggatttggaggatctgctttccggcggcaaggtggatgtctatgaaaccccgggtaaaaccaccggcgcctatgcgacggacgtgtacggtgtgcacccctatatgctgctgaattttgccggacagctcggggacgtcttcaccctcgcgcatgaggcggggcactgcctgcacacacagtattccaatacccagccctatgtcaataaggactacccgattttcctcgccgaaatcgcctcgaccgtcaacgagaacatcctgatgcgggggctgatctcccgctgcgacgcctccacggaagaggggcggcgggaaaaagcctttctcatcaaccgttaccttgaggagttccgggggacggtattccgccagaccatgttcgcggaattcgagctggaaacccatcgcctggccgaagcgggggagccgctgaccgccgagaccctctgcggggtctaccaccgcctgttggagacctatttcggtccggatgtggccatcgacgggtatatggactgggaatgggcgcggatcccgcatttttaccgggcgttttatgtcttcaaatacgccaccgggttttccgcggccgcggccatcagccgccggatactggacgggggggatgttgccccttatctggattttctccacgcgggaggcagcgattacccggccgaaaccctcaaacgcgcgggggtggatatgcgcacacccgccccggtggaggaagccctgcgggaattcgcggatctggtgggggaaatggaacaactgctcgcgtgagaagttcctccccttggcaatacggcggttcataataggggcagcacccaaaaaccggccattcggagactccctccggacggccggtttttgctaggccggcccgctgtcctgacaaggggaaaaggctgttccggctgcctgctagggacacgggctcccgttcggctgttttgcggccggcggattttacaggggctccatacagtcttcaaaacgcagctgttcgcaggcggtaacgggcgcggccgccaggcgcggccggagcagatcgggccgttcgagcatccgcccgcccgcgtattgccccctgcaggtgatgaaatacaggcattttttcatcgagattcccagacggaccagggcatcccggtcaaggctccccagccgcctggcctggaggatccgccgggcgtacacgtcgccgatccccggcacccgcacgagcgattcatacggcgcgcggttgacctcgacggggaaaaattgcggattgcgcagcgcccaatcggttttgggatcgaggtccagggacaggctggcgtgttcgggcggcaggatttcgtcgggggtaaagccgtagagctgcagcagacggtcggcctgatatagacggccaacccgccagaccggagtggaaaccagggggaggtcatagccggcggcgggatgacggtagcggaacgccgtgtaatacacccgcccgagccggtatttgcggtacagcgcgctggacagggtcaagatagtccggtcgtcctcgtcggtgctgccggccatgagctgagtggtctgagaggtggcgaaggcgggcttgaacgggcttttttcctccctgttcgcccgaatcaagcggctgatcgccgccatgggggaaaggatgttgtcccgggtcttctgcttggcgattttggcatagccctcgcttttggccacctcgatattgacgctcagccggtccgcgtagcggccggccttttcaataaggagagggtcggttccgggcatcaccttcgcatggatatagcccgggtaacgcagctcctcccgcatgatacgcagggtttcgacgatcagttcctctgtgtaatcggcgtttttatagatggcggacgtcaaaaagacgccgcggcggttcctgtccgcctctcccaccgcgatgcgggccatctcccgcggctggacacagtagcgggttttttctccattgctggcccggcagccgcagtaagcgcagttgaaggagcattgattggacaaaaataccttgggcaccttgggcggcggcgccttggcgcggatgtccccgcttaagaatccgggagggcaggccgccaccgggtcggaactggacgccgcgtcgtagcgcgcgtcctcccgcatgacgcgcaggagctcaggacgttcgggcggcttatgaaaacggagctctgccattcttttatcctccccataccaagtttatctagagtataccccaaaaaaagcgtattgtcaaacatatgttctattttttataaaagtttcctttgccggccggagcaagagaggagggcggggaaaatttcgtttttccgcggactcacacaaccctccccaccctcataggatggaacatgagacccggataggacgaagacataatggagggtatggatatgcgcaacatagacactttcgcggtgatagggggggatctgcgctccgcctatctggccgggctactggccgcggacggatacaaggtgatcacatctggctttgacagcaccgatctgccgccctgcgtcacgggctgcaccaatccggcccaggcggtgacgctcgctgactgcgtgatcctgccgctgccggtgacgacggacggtacgacggtcaacgccccgttttcccggatgcggatccctctcgaccaggtgctcaacggcatggcacaggatcaattcctggtggggggaaaaatctctgacgtggtgcgaaaagaagccgaatgccgcggtttggttatttcggattatcttctgcgggaagagctggcggtcatgaacgcggttccgacggcggagggggcgatccagctggcaatggaagagctgccggtgacgattgacggcgccaaatgcctgatcaccggatacggccgggtagggcgcaccctgtccaaacggctggtatctctcggcgcgcaggtgaccgtggcggcccgcaagtttgcggatctcgcctgggccaagtcgacgggctgcgaaacgctggagctcgaaaatctggcggacgccggggatttcgacgtcattttcaataccgtgccggtcatgctgttcggccgggatatcctcaagggcatggaaaaggaaaccctgctgatcgacctggcctcccggccgggaggcgtggacttcaacgcggcggcggagatgcagatcaagaccatctgggcactgtccctgccggggcgcgtggcgcccaagacggccggggcgatcatcaagaagacgattctcaatatgattaaggagggttcctgatgacgcagctttccgtcggatttgcgatgtccggctcgttttgcaccttcgaccgggtgctcatgcaggtcaaagaactcgtggggatgggaatggaggtcacccccatcctgtccttcaacgcctccaccctggatacccgttttggaaaagcggaggatttccgccgccgcctcatcgagctgaccggccgggatcccatgacgacgctgacggatgtggaaccgatcggccccaagggcctgttcgatgtcttggtggtcgccccctgtaccggcaccacgctcggccgcctggccaacgggctgagtgattcaccggtgtccctggccgtcaaatcccatttgcggcgcagccggccggtcgtgctggcggtctccaccaacgacgcgctgggcgcctccatgcggaacatcgcgctgttaaagaacacgaaaaacatctattttgttcccatgagccaggacgacgcggtgaacaagccgaattcgctcgtggcggatttcacccggattccggacaccatcgccgctgccatgagcggcatgcagctgcagcctctctttgtatgacgcggcagccaaaatacaggttagaaagcactcaaatctccgggggcctcgagcccccttagtataatcgtcggttcaatagaggacgttcccgccggctttcctaaagagaaagccggcctcgcccctgaaagctcctctataccggcgggatctggggccggtcacccgccattgtggtgtcccacaatggccctaaaaatccaaatatcggggttcgggggaactccccccgacggttctttccgcgttctgccggcccttttgcgtcaacaaaggggatggccctcaggccagacttttgctgcggtatgtccgcgcaaccggcaggcagccaaacccggtagagcttttatgcgcggccacctcctttctccgcgcggagaaaggaggcaaagagacgccgggggcttcgcctccaaacccccaagtaatcggccggttttcttttgatgaaaaccggcagggacataggcttttgaaccaacgctacaaggagggggcccgtggcccccagagatttgggtggtttttaacctataaaccccggccgacggcagatcggccggggttttctatgggttcaggcagccgcgttccgctttgaagtggcagtgccttccggcttatcaaattttctcattcggcggcatttggcggaaaaacgagccgtatgggccgataaaacccggttttcccggattttgcacgcacccttttttcctgtcctgtatacactggttaataccgggtgcaaatcgtgaggaaagggcgtgagcgcggtgcgcagacgcatgggaagacgccgggcgttcggcagggggctcccaccggtgcggcgtccgtacgaagggggacggggccggctgccagccaggctgcgggtgttggcggttttgtgcctgctggccgggctgctgatcatgatagagcgcaatctccgccccttgatccaggcctatggcgagacggcagcgaaatgggtggccatgcgggcggtcaacgacggggtggaaaaggcgctttcggcctccaatatcacatacgatcagcttgtgacggtccaaaaggacgatcaggggacgatcacctccattgaggcagatgtggtgcagatcaaccgcctcaaggcggcggccaccggcgccgtaatggacgaactggagaactataagaaacagacggtggagatcccgttcgggaacctgatcggcggggatttcttcaccggccgcggcccctatatccctatcaaaatcagcatgagcggcaccgccctttcggtcatgaacagccgcttcacgagcgccggcatcaaccagacctcccaccagatcgagctggaggtcacggtccggatctacgcggcgatcccggggttccgttcctccatcgaaaccaccacgaattacctggtggccgaaacggtgctggtcggcgaggttccggattccttcacccaggtggacggcgatcaggcggacatcgtgcgaaaaatctttgattacgcggatgtgaaatagtggaaaaacgccacaatatttggtatactaactctatcagcgaaagaggagagggtccgggatggattttgaggaggccaaacagcgggtgacggcgctgcgggaacagatcgagtaccacagccggcggtattacgacctggatgacccggaaatcgaggacagcgagttcgacgccctgaccagggagctgcggacgctggaaacggattatccccagctggtcacggccgattcctacacccagcgggtgcatggcgaggtgtcggcgctgttcacccccgtggcccacgaggtgccgctcgccagcctgcaggatgtgttcgatatcgaggagctgcgggaattcgatctgcgggtccgggagacggtcgaggatccgcagtatgtggtggagccgaaaatcgacggcctgtccgtcgccctcgagtatgtggacggcgtgtttaagagaggcgccacccggggagatggggtgacgggggaggatgtgtcggccaacctgcgcaccatccggtccatcccggcccgcctgaccgccccgctcccccgcgtcatcgtccggggagaggtgtatatgccccgggagagtttcgccgccctggtggagcggcaggagctcgaaggggaaaaaccgtttaaaaacccgcggaacgcggcggcgggatccctgcgccagaaggatccccgggtcacgcggggccgggggctggatctctttatcttcaacctccagctcatcgagggggaggaggtaagcggtcacgccgcctccctcgagcggatgcgggagctggggttcccggtgattcctttttataagaaaaccggctccatcgacgaggtgatcgccgaggtggaacggatcggcggcctgcgccgcgccctgtccttcgacatcgacggggcggtggtcaaggtggacgattttgcccagcgggagcggctgggcagcacctccaagttccccaaatgggcggcggcgttcaaatatccgccggaggaaaaggagaccgtgctactcggcgtggagatcaacgtcggccggaccggggtgctcaccccgaccggcctgttcgagccggtggaactggcgggaacgaccgtcagtcgggccaccctgcacaacgaggaatttatccgggaaaaacagctcgcggtcggggatcgggtggtgctgcgcaaagcgggggacatcatccccgaggtggtgcgggtggccgcccacggcggggaggccgcctttgagatgccgtcggcctgcccgtcctgcggggccccagtatcgagggaggaggacgaggcggccctgcgctgtctgaatcccgactgtccggcccagcgtttgcgccacctgatccacttcgcctcgagagacgccatggatatcgaggggctcggcccggccgtgctcgagcagctcatggacgccggcctgatcacccatgtatacgatctttaccatctcgaccccgacgcggtggcggcgctcgaccggatgggggacaagtcggcggagaacctcctggcggcactcgaaaagtccaaggaagccgggttggaccgggtgctcttctccctgggcatccgccatatcggccagaaagcggcaaagctgctggcgggccgtttcggaaccatgaacgcggtgatggaggcctctctcgacgatatcaacgccatcgacggcttcggggagatcatggcggagagcgtggtccgctttttcgagctggagccatcccggaaaatggtggaggagctggcgcgggcgggggtgcggatggtggacaacagcgagcgggcggacgaccgctttgccggcatgacctttgtcctcaccggcaccctgcccaccctgaagcgggatgaggccgccgctctcatcgagcgatacggcggaaaaaccgcgggcagcgtatcgaagaaaacgtcggtggtcctggccggggaggacgcaggcagcaagcttgccaaggcccagcagctcggggtacgggtcatcagccaggcggagtttgaagagatgctcaaataaaagccggtgtttttctgcaaaatcgggattcgtctgcgcatactatgggggaactcgattttgcaaggaggaaacgccatgttcaagcacgaaaagcaatatctcaaccccgtccgggtggaccggccgaatcccaactacgccgcgctgctgcaggaacagctgggcggcccgcagggggaactgaaagccgccctgcaatacctgtcccaaagtatgcggatcaaggataaggagatcaaggacctgttcctggacgtggcggcggaggagctctgccatctagagatgatcagcgccaccgtcaatatgctcaacggcgacgatctcgacgccatgaacgccacggtggggaacgtggaagcccatgtcctgaccggcctgacccccatgctcgccaacgccagcggctatctctggaccgccgcctatgtcaacgaaaccggcgatgccgcggcggatatcctgtcggatatcgcggccgaacagcgggccaaggtggtttacgaatacctgtaccaccagatcgacgacaagggggtccgggagaccatcgacttcctgctcaaccgggaggaggcccacaacaccatgttccgggaggctttcaaccgcattcaggacaccggctcccagaaagactggggtaccacccacaacgcccggatctatttcgacctgtccgggcccggcggccagagcttcgatccggccaaggcgcagccggcctcttttaatatttaattttttgcccccgcagacggcgcatatgcctctgtgggggctctgcttttcagccggtttgctatatcggatcggcagtttcgttgctatagcttatgtaaatagacaaaaacggagagtcaccttcaaatcagtgccccccgctaaattcgtattggctaagatttcctttggtttttgattactatctcgtttttcttctggtttttcttccttttattatactatacggtcgaatagcttgccataaagactgttggtgcaatcgacagagttagcccccggcagctcttatagtaacccggtttgggatttgtatgaatacaggcccttaatgaaatatgatgtctttgttgctctcgacaaactcccgtaagcaatcacaaagagacggtgaaaagttataataggcagtatcggtctcgacccagtcgtccttttccccttcagacaatgctttttgataattatcggcaatggctttataaccgactactaatatcgcacttatcaattcctgcggaacagtatctggacagcaatcgaaatatccgctgtgcccgccgctgttcacttccgtatcgtaccaaaaacatagcacagctattttttgaatttccgataatgtttctacatctcgaaagcatatgtctcgcagaaatcgattccatctcaaatctttttcagtcatattccatacttctttatcttttttcttctttttaaagaacagtcccaccgcatattctcctaaccgtaccttaatttgccgattttattatatcatacggttgaatagctttcaataaagactgtcgatgaaatcgacagcgttgcccggcggtcttttactttttcagtatctttgggtccgctataaggcgatgccttgtagcggcaggtgcttcggcaagccggcggacgtttctccatcaatttcttgaacagggagggcggttttcaccccttgacaaacggcagcccggcgcttataatgaaacctaacaacccaatagaccagtgaaagacgctgaagggaataagacaggggtccccgtcaaaagagagccggcggaaggtgcgagccggcggcggtgcctgtgtgtatagctcatcccggagtcgtccgtccgagccgtgaggggtagggcggaccgcgtggccgcgttaacggccggcgctttccgcaccttggtgcggcgaagcggcagaggggcgtttcggcgcccgaagctgggtggtaccgcgtgcgattcgtcgcccgtccctgtcaatacagggacgggcgtttttttattacaaaggaggatggccgagatgaaaccccaatttcaaaaatacagacccttcacgcctgtccggctgcccgaccggcagtggccggaccgggtgatcgaaaaagcgccgatatggtgcagcgttgacctgcgggacggcaatcaggcgctggtggatccgatgaatatggaggaaaagctcgaattctttaaggctctctgcgatatgggctttaaggagatcgaggtggggtttccctccgcctccgaaacggagtatgctatctgccgcgagctgatcgaaggcggccatatcccggacgacgtgaccatccaggtcctcgtccaggcccgggagcatctgatccgccgcacctttgaggcgatccggggtgccaaaaacgtcatcgtccatttctacaattccacctccactttgcagcgcaaggtggtgttccataaggagatggacggcatcatcggcattgccgtggagggcgcccggctcatccgggagctgaccgaaagctatgagggagatacccgtatccggtatgagtattccccggagagcttttcgggtaccgagatggacaatgccgtggccatctgcgccgcggtgatggaggcgctgggttctacgaaggagaacccggtcatcctcaacctgcccaacaccgtcgagatgtgcaccgccaacacctacgccgaccaggtggaatatttcatccgtcatctgccgaaccgcgaggccgcggtcatcagcatccatccccacaacgaccggggcaccggtgtggcggcgtccgagctggcgctgctggcgggagccgaacgggtggaagggaccctcttcggcaacggggagcggaccggtaatctggacatcgtcaccatggggctcaatatgtatacccagggggtggatcccggcctcgatttcagccgcctgcccgcgttcaaggagatgtatgagcggtgcaccaagatgcgggtgccggaacggcagccctacgccggggagctggtcttcaccgccttctcgggctcccatcaggacgcgatcaacaaggggatgcagtatatgcgggattcgggtaccgaatactgggagatcccttacctgcccatcgatcccgccgacgtcggacggcagtacgagccgatcatccggatcaattcccagtcggggaagggcggcgcggcctttgtcatgcagacggttttcggttacaacctgcccaaggccatgcatcccgaattcggggcgctggtcaaggcggaatgcgaccgggccggccgggagctctcctccgacgagctgttcggcgtgttccgccggcattatctggaagtgccgcagacatacgccctggccgggcatactctgttcgaggaatcgggtagcacgaacggcgtgcatttcaaaggcaccctgagcgtggacggtgtctgccgggacctggagggaaccggaaacggtccgctcgacgccttcttcaacgccttgcgcagcgtgggcatcaccggctacactttccaatcctatcatgagcacgcgatttccaccggatcggattccaaggccatcgcctacatcgagctcaagacatccgacggtaaaccggttttcggtgtcggcatcgagagcaacatcaacctcgcctccatccagggcgtcctctgtgccatgaacagagcttcggcggaggccgggggaaacggctgagaggcttatggtctatatccaagataaaggagacggttattatgaacacctataaactcaccctgctgaaaggggacggcatcggcccggagatcgtgcgggaggcggttaaggtactggatgccgcggcagcccggtatgggtttgccttgtcctataccgatgccctgatgggcggctgcgccatcgacgcggcgggaacgccgttgccggaggaaactgtcgctgcctgcaaacagagcgacgccgtcctgctgggggcggtcggcggctacaaatgggatactttgccgggaaaccagcggcctgaggcgggattgcttgggatccggtccgccctggggcttttcgccaatctgcgccccgctaagatttacggacctctcaaggatgcctgcccgctgcgcccctccatcgtcggggacgacatggatctgctggtggtccgggagctgaccggcggtatctatttcggccggcggggcagggacagcgtggacggtgccgaatccgcctacgataccgagcggtattccgttcccgaggtggagcggatcgcccgggtggcgtttgacacggcccgccggcgccggggcttggtccacagcgtcgataaggccaatgtcctggagtcctcccggctgtggagggaaaccgtcatccgggtggcggaggagtatccggatgtagagctccgccatctgtatgtggacaacgcggcgatgcagctggtccgggatccccggcaattcgacgtcatcgtcacctcgaatatgtttggagatatcctgtcggacgaggcctcccagattgcgggatcgatcgggatgctgccctccgcctcgctgggagaggggacaaggggcctgtacgagcccattcatggttccgcgcccgacatcgccgggcaggacgtggccaatcctttggccaccatcctctcggcggcgatgctgctgcgctattctctcgccgagacggcggcggcggacgcgatcgaaaaggcggtggagacggttcttagcaaaggcctgcgcaccccggatatcgccgcggagggctgtcaaaaaatcggcaccgccgcgatgggggacgccgtggccgccgctctggcctgattgtccgcggccaatacgtatacgcaaaagcggcggggacgccggatcacggcggtttgctatcgctcaccttgttccctctgtccccgccaggttcacccctactcttggcaaagggcggaaccacaccgtgtttccgccctttgtcgcatataaggagtgttttcgaggcacctgtcctcgaaaacacggatcctgaactcaccgtggccgtttgggccatcgaatgcgctttttctactttttcgacagtccgagagcggcggggattactccccgccgcttttgaatggaacccgatatgccatgttcatgcccggaagacgagcccctgaaggagcataccgaaagcgaggccggcgccgccgctgcaaacgccgaagaggatccggcggatcctccgggtccgtctggacaggcgaaggccgctgtatgcgtccgatgaggccaggatcttgtgcgcctcttcatgcaggcggacttccggctgttccatgcactcggcccggacaaccagcagcgcccgctcgaaatagggattccccgtatcggtgacctcgatcatctgccggttcacacctttgatcatcctaaatgcgccccctttttgtcgtcttcagtatgggcggcgcggttgttttttattcatttgcacggcatggggaaaggtgatacaactctttgtaaaaactgagttaagagagaaaatgttgaaaactcggtggaaagtgtgaacaatcgaggtttattgaggggtttttcattgtggaaaggtcgggcaggcaaaattttccacaaacattcgggatttttcgcatacagattgttgaatggcctttaccgggccaggccggatataagccggacgactccgaaaaactggggagaggatggacaggatttcagctggagccgtcaggccgggtcggccagccggtaggagaactggctgatgtcatatacccccgaacgcatcacatccgcatatttcatcgccttgccgagccccttcgccacacagtcctccgggttttcggccacacggcaggctacgccggtgcgtttggcgatcaagtccgccataccgctcatctgggaaaggccgccggtcaggacgatgcctcccgtcatcacgtcgcccgccagctccggcggtgtgttttccagtacctgctggatgacgccgacgatctcgcccaggggctcggctatcgcttcatggatatcttcggaagtcacccggcagactgacggcaggccggtaacggcatctcttcccgggacgtccatcgtgttcccgacgccgccgggcagggcgcagccgatggtttttttcacctgttcggccgtcaggatcccgatcacatggttgtatttgttccgcatataacggatgatggcgtcgtccatatcatccccgcccactttggccgagatggaggaagccacgccccgcagggtcattaccgccacgtcgaccgtgccggcgccgagatcggcggccatgcagccgcgggccgcggccacgtccagccccgccccaatcgccgcggcgaccgcttcctccatcaggatcacccggcggacattcgccgccgtcacggcttcgaccaccgagcgctgctccacctccgtcacggccgccggcacgctgacggccgcacgaggcttgagcaccttatacgcacagattttgcccaccatatatttgagcatccgttccgcgatgtcgtagtcggatatgacgcctttggccatcggccggatcacctggatggaggcgggggcccgtccctgcatggcgtatgcctcccggccgcaggcgatcaggcggccgctcgcttcgtcgacggccaatacggccggctcccgcagcagaatgccgcgtccagccgcggtgatcaccacctgggaggttcccaggtcgattcccagctccataccaggcatatacgccacctcccttgtcgaaaaatccgagtctttgtctgattatacgacaaagcggcccgtttgacaagcggaaaccggtggcagcctgattaaggctgccaccggttcagtacggcgccggctgaggcccgcgggatttgacggaaagccgtcaccggctcgggatcggggagatggggcaggatgtccttttggaaacaggcgacatcgtgccagcggccgcctttataccccgtttggggataggtgccgagacgggtgaagcccatccccaggtggagcctttcgctcggcgcgttgggaagggtgacgttggcgtacacgctccggatcccctgcagacgcagcagatcgataagcgcgccgtacagccgccggcccagccctttggcgacaaacgccccgtccagatagaccgacagctccgcgttccatcggtatgccgcccgttccctgtgccggcaggcataggcatacccgatgatccgcccgtccttctcacacaccagataagggtactcgggcaggattcccgccacccggccttcgaactcttcgattgtgggcagggcggtttcaaaggtgacgggcgtgtcgatgtacggggcgtaaacggagcggatggcgccgctgtcctcgattgtggcgatccggatgttcacagggacccctcccttgggctcaacggtttatttgtttgaggatctcagccgggcccgggcggccgtcagggccagcacttccgcggctccggcgattttgagcaccttggcgcattcgtccagggtggcccccgtcgtgatgacatcgtccaccagcaggagacgcgccccttccagtgcccggttccggagggcgtcctcccggacatcgtaggcgcccagcacattgccgccccgttccagcgcggtcagctctttctgcgggcggatggcggcgattttaacgagcacgtcgctcaccggcgcgttcagatatccggacagggccttggccagcagccggctttggttgtgcccccgcttccggatttcctccttgcgcatcgggatcggcacgatcccgtccaggtaggggctgccccattcccggcggaacacctcagccatccgctccgcgaaaaaagcagcggattccgcactcccgtattccttgaagaggaggatcccttctttgacagggtcctcgtaataaaaaggggaggcgcagcggtcgaagtgacggcggtgccgtccgcaggtgcagtcctcggtcccggcaccgcaaaaaggacataaagggggttcgatcaccggcaatttctccaggcaggaaggacagcagccggctgaaggcgggatgacccggccgcagcaggcgcaccgttccggaaacagaatggacagcaggatcctcttggttttcatcgcttttacgcggggcatccacaagcgcctcctgtctgatggtggatagcagggcgatccggggctattggcccgaacggcacggtcatatgggaacagggacacggactcgcaggaaatcgggtggttttatatgaccggccggaatcgcgggaacgggatggcctttatcctatagaaccaggagtggtgccttccccggaggctttggcctctcttacgtattcgttttgttgccggcggccgcgtccgatcccaaaacaatgctcatacaaaaggaagggcggccccgggttcagggtggtcgtctgtctgtggtgtcaggaatcgggaaacatctcttcggccgtaatcagaaaatggcggagaccgctgaaccggcgggttttcttgttgttctccaccatctgccggacggtatcgcggctccccaccaggatgagcagggccttggccctggtaacggccgtatagagcaggttgcggtaacttagctgtggattgctgcggaaaaccggcatcaggaccgcctcgaattcactgccctggcttttgtgaacggtcacggcgtaggcaagctccagatcctgcgcgtcctggcgggtgtaaaacgccacccggtcctcataccgcaccgcaagggtatcctcccgatggtcgatgtcctcgaggatcccgatgtcgccattgaagaccccgctgccgacctccccgtcgtcccgggtccaaccgatatcgtaattattgcgggtgtgcatcaccttgtcacccacccgcagaatgccgccctcgatgtggagctctttttttccggcgtcctccgggttgaggagggcctgcaagcggacgttcagctccctggtacccagttcccccttccggccgggacagagcacctggatgcccgaaaacaccgtgatgccgtaccggttcggcagccgcctggcgcacaggtcgagcagggtgtcggtcacgtccccggacgtgctctggggaaggaaaaagaagtccccttcctttttatcgaacaccggcatctctccggcgacaatccggtgggcgttcgcgacgatcgcgctttccatcgcctggcggaacacctcggtcagctgcacgacgggcagcacaccgctgtcgataatatcgtggagcacgctgccggggccgacggcaggcagctggtcggtgtctccgaccaggatcaggcgggagccggttttcatcgcccgcagcaggctttcgaagagcagcacgtccaccatcgacacttcgtccaccaccagcgcgtcggcatcgagcggatttttctcgttgcgtacaaagacgggggtgtcggcgtcgtcccactggacctccagcaggcggtggatggtcttggcctcgcatccggtcagctccgcgatccgcttggccgcccggccggtcggtgccgcgatggcgaccgtttcccccatgctttcgagcagggtgatgatggcgcgcagggtggtggtcttgccggtgccgggaccgccggtaaggaccagcatccctttctccaccgcttcgatgatcgcctggcgctgccgtgtctcataggtgatgtggttgtttttctccaccgcctcgatgctgtcccgtatccggtgggaagggaccggcgcaaagcttgtcagcagccggagtctggccgccgcatacttttccgcctgatagagatgggggaggaaaacgaacagccgcccgtcgatttcctcggtccggaccgcgaaggtcaatgccatgtcggagagcttgtcccgtaccttttccccgtccacccccagcagtccggccgctgtggggatcaggcggtcggcgggcaggcaggtgtgtccgttccccagattatggcgcagcacgtacaaaaggcccgcttccatgcgggcgggatcgtcggcgggcctgtccatccccatacagatgcggtccgcccggtcgaagccgatatacagcccgctcgaacagagcagatagggatttcggcgaatcttgtccacggcggcggatccccagcgtttatagcaacgcagggcttcggacggggtcaaaccgtagtccgcgaaggccagcatgacctcccgcagcccgaactggccggcaaaagcctcaccgatggcttttgccttggcggcggtgatccccttgatctccgcgagacggccaggttcctcttccaggatccgcagggtctcgtccccgaatttttcgacgatccgcgcggcggtggcgacgccgatccccttaaccgcgccggaggacaaatagcgcaggatcgcatccgaacccgcgggcagatgctgttccgcctgctcggcgcggaactgccgcccgaagctcgggtgctccacccattttcctttcaggcggagctgttcccccgccgcgaccgcgggcagcacgccgaccactttatgcagttcctcacccgcttcgagctccagcaccgtccagccgttgtccgcgttgcggaaaaccacccgttccacactgccgcagagctcttcgagccgattgtcctccatcgcgtgttcctttcccggcccggccggcccgaaaaccggccgggttcgaacatatattcctcattatagcaaattcccatcctattgtaaacccgacgccaggactttttcaaactcctcatatgtatacagcccctggcccagccggctgcagacgtcttccgccagccgcctggtctcatcgtccatgccggtatccaccagcatcacccggggagaaccggcgccccatcgttccctggccgcagcgcagcgcgccacatattcgatatcggtccgatgtccgcaaagcgggatcatcagcaccccccggtcctctttggggggcgacagcacccgcctggagatggccagcagtagctcggcgcatccatacagcgacagcagcaggatgaggatcagccccatgttctctcccatagtttcagccccttccgtattgaggaagggccctatcccaccacagcccacccgcgggcccttccgttccttccatcctatgcggcaggtcgggaaaaggtacgggggtaaaagcggcgcgctccggcggaaaatccggtccgggttccgccgccttgcaggaaaaggctcagcggcgcagaattctctgttttttaaaaggtgcacaccgaaatgcggcatagacgaagcggaaaatcggaagtgcggtgagccgcattccaggaatcggagcgacagctccgattcctccaaaaggctatgaccataacaccgcggggttatcctggtgcgtatggtccgtttgtacacgatggagccggtaaatgatgaggtttatacagccgccccggcaaagcctggaggacgatcagccggcctgcaccagttcttccagggtgccgaaggtgtagcccgaggcctcccatttgctcagcagctcgtcgaggatctcggcgttggtgctcgaggtgctgtgcagcagcacgatcgcccccggatggatgcggggaagcagcttgtcgaacgcctgctcccgggtgggctgcttgtcggtgtaccagtccacgtaggcgagactccagaaaaaggtatgataccccatgtcgttcgccattttgaggttctgttcgctgtattttccctgaggcggacgatagaatttggtcatttcctgtccggtcagttcccggtacgcgtcttccagcagggtcagttcctggcggaaggattcctcgtcggcgattttggacatgtcgggatgatgataggtgtggttgcccaccgtgtgcccttcctcgaccatccgtttgaccagctccgggctggtctcgaggtagttgccgaccaggaagaaacaggccttggcattatgtgccttcagcgcgtccaaaatggccggggtgttgccgttttcaaaacccgcgtcaaaggtcagatagatcgttttctgttcgcccgcctcgccgctcgacgcggtcgggccgacaaaataggcgccgtattgcttgaggaattccggggtggcgtttccagtcggtgttttgccgttttcctggaagctcaggccccagttggtgttggccgcggaaaccgccgccgtcttgggcacagccatcctgaccagaaacgggactgcaatgagaaccgccacacacagggcggcaatggcgagggctcttttcctgagtacgataaccatacccgctgctccttctgccgcctgtctgctgcctctctgccgtccccgcggcaagggaccgtctgtttccattttatgggataccgtcccggtttatgtcggtttcggttgtcctcattttgcgagatgtggtctgtatcggctaatgcggggaaggcttcgatccagcggtatctcgctatcgacggaggtgtggaaaccgctttggaaaaatatgggtttacaagatgtagcaactatggtatgattaagtgtgtgatttgtgttcacttcgggaagggggcatacgtatgcatctggaagacaaggaactcatcgatgagttattgcgtcaaatcgatatatgcgagcatcaggtgaatgcctattccaataaacgggacaaagactcgaaaaacatgtggtattactggtatggcaggcgggaagcctgtgatcagatcctggcgtatatccggaatcggatcggggaagccgcgctcaagtgaagttcctttttgtgtgaataaatcttacatatacaacgtcaaaagccgccctttttgggcggctttcatgtatcgaaaattctgcaagagaagggccggattacggcgccttacacgttcgctttgtttcctgtgtttcgtcctagaacacggatcggccggatgccgtcctttcgtcttgggtacccggggcgcaatgtcttccgatcatcggtgatatattcccgcgtttttcattcatttccccttaaaaatgctttttgggcagtctgaagccattgacccgtggttcctctatcggaaataaccggcaaatcctccgccgatacaccggcagcggaggattttgcatccctttcttgtttttgccggggatctgtggtattctgtagtcctgtatagataaacttgaaatagcccacaatgggaatacattatctttaaactttttgaggagctgcggcatcctaatcatagaatcggcaaaaagtgagggtctgtcatgggcaaatcggtgtttgggcgggaagaccggaagcctctggtcaagaatatcgtggtcgggatcatcggcgcggccctatgcgtgtgggggattgtggcgttgttcgccgttctcaatggggacaggctggaaaccgctccgggttcctcccttgcgtctgacacgcaggcctcatcggcgcctgcgaccgatccgccgcctacgacggccagcaccacggccgccacgaccgggacggccgaatccgccgaccctcccggctcggttccgccggaggccggcgacgcgtatttcaacgatgcggtcttcatcggggattcccggaccgagggtttgatgatttacggaaagatgccggaggggacgacgttctacgcggtcaaggggctgaacgtcaatacggcggcgacggcccagatccaggacggcgaggaacaggtgaccatcctggaaggcctcaagcgccatgccttcaaaaaggtttatgtcatgctgggggtcaacgagctcggctgggcttcggagaatacgtttatcgcccgctacggcagcctgctcgacgggatccgggaagccgtcccggacgcggtcatttacgtgcagtccatcctgcctgtgagcaaggagaaatcggacagctcggtgtataccaacagccgtatccagctttacaacagcctgatcgtccagatgtgcgaggagaaaggggcggtttatctgaacgtcgccgaggcggtgcaggacgaaagtggcgcccttccggccgaggccacggtggatgggatccatctcaaacggccgtattatgaaaaatggaaagactatatcatgacccataccgtgtccggctgacggacggagaagaatcccaaaaggacaaaggagacgacgcgagatgaaaaaggtaaaaacgggtgcgctgcttctggggctgctgcttgttctgacaggctgcggcaaaaatgaggcgaaggatgtggatccgtccgtcctggccgatacgctgcggaatgccattacgttccaggacgaactggaggcagtggatgctgcggcgatgggccggatgtatgaggtggacgaggcggatatcgaggcgttcaaggtgtataccggcacgggtgccacggcgg

SEQ ID NO: 2902 - DNA, 17941 bp, Unknown
  16S sequences of unknown bacteria
ctcgcgccggttacccgacctacgcccttagcaggggcgcctcgtcaccaacttgagtacttctccatatggtcaccggttgcggtgggcaaccggatatcctattcggttaacggctcataccagccggcggatgagctcctccgtgctgccttccagcaaatcaatcggcggaatctcaatcatggtatagcacccgggcgcctgctttttcaccgcgcgggcggcagccaccagaatctgtccagttagggcggggttattaatctccatcgtgaagcccatgcgctggctgtgcgtgctgccagaaacgcccttgcgcaccaggtcgacgccgtgacccatgtctttaagcgcgtcgacatccggcacctggatgacatgggtttcatcgtgcttgaaatagtcatcattcttgatagccgcggccacatccgcgaaagcatagccctccgctagttccacatacaccatgcggcgatggataccggttcccagcggaatggtcatggataacgcgtttttcacgccgggaatcgccttgaccgccaccgtatgccccatactcatgccagggccgaagttggtataggtaatccccttgggcgccatagcctccagcagggcccgcaccatcgagtcggtgccaggatcccatccggcggacataacggccgccgcaccgtgggctttcgccaccgcgtccagcctctgtcggacttcataaatcgatgaatggatgtcgtagctgtccaccgtgcagatccctttttccaggagggatgccgccaaatctggaaccgcgcggctgggggagcaaaggatggccacatccggcttcggcagcgcctcaatatcccgtaccaccggaatatcgccgagagcgccgacagcgagactacggctgaccacgccggccgcttcaaaatcagcgcttgcaagcaaggcttccagaacagcgtgcccaatatttccgaatcccacgatgaccgcacgcagcataaattcgctccatccttctattcacgtagcctgtctcttggcatcagaaacatgttggcggagaggaagggattcgaacccttggctctttcgagtcactggttttcaagaccagctccataaaccgctcggacacctctccgtgtcaagtgacggacaatatgatagcatctttcctcggggttgtcaatacttgccgcttcgttttttcacttacccgctctttttcggtgtgccgttatcaggcgtccgcgccgcctgttccccagcgtcccggcgcctgagcagccccacctgcagggccagcccggccgccgccatcagcaggacgctgaagaagagaaaaaccgccgtctcccccgccgccaaaggcgtcgccggatcgtatacaaaccaatagcgcttcgtaaagacgccgaacagggacatcaccagcagcagcgaaccgctgagcgccagcccggtcagcgccgccgggcgaggccgcagccaggacacaccggcgccgacgcccgccgccaacagcgcccacggccacgccgtgctgtcaaagctgcgcagtatcagcagcccgcaggcaaaccccgtgaccgccagactgacggcggagcctatccgctcgaagcggaaaaagacaacggccagcccgagtcccagcagcgcgccgcacacaaccatgaacaccgggctttgcagctgcattcccagcagggaaccgaccgaaacgcccagcagcatcccattacaggcgcaccatagccgatgcgccgcatagccgcacaggcaaaacaccaaccccagcaaaatccccacaatggctatggcagtatccatacctttcctcctaatacagattttaggagtagtatgtccgcctgccgtatgtttatgtaagaggcacgagcccctcgctgcgataatagcccactatcagctgcaccacccggtcatagctgaacacgccttcctcctccccctgggaggtgaggaagctgttgttgatcgagctggaaatctcctgcgtcttgccctcaaactgcttccagtaggcgttgcgctgtcccaaatcccgcagcatccccttggaacagtgctgccgcacggccccccacatgtcggtatcgtaatcgtacagcgcgttggagcaatagatgtacgccagcatatagccggaatagcggaaatccgctgagtcgctgtgggtggccgtcagataagcgaagaaattgcagtcgtcctccttggcaaagccgcgggtgtgggccagctcatgggctgccgtagccggaatatcgctgtccggcacgtcaatattgacgttcgcctccgcaaaaaacggaaaatacatgccggttatccccgtatacgaccaccaatgcgacagcagcaccggctttgtccgccagacgccgccccacagatagggatacgtatcatccagcttgcggtagccgttgtcggccagccgcagaatttccgccttggacaccgacagcttggtatacccgtcctcatcctcctccagcagctcccgctccgccgacgccttctgcgccagatcgatgcacacgcgctggagatatgcgggagactggatgctggtgtccagccccatcagctccgaaacgggcagccggtaaaaattcgcaccgtgcatcaccatgtacagcagcagcacagaggacagaacccagcccagcccctttcccgcgcgggccagcacccgccccttcgcttccgtccggcgcagccgctttgccagcaggattcccagcgtgacggccagcggcagcgccagcaccaccaagcactcggtcagggaaaagggcagaacggccacaagccctcccagcggcaccgaaaccgcgcggaatattccccgggaaaagaccttctccgtcagctgcgggacatggggcagccacacatacagcagcgcggctatgatggcgggaagcaggaacagtccgtgacgcagcccgcgcccaatccgtttcatgcaggcagccctccttttcgtttaaaaaattcgtttctttcattatataggcgaaacggtcgtctgccaagcccctgttttttcttttaaatgcgaagaaatgcggaaaaaactcttttcattcgcggcggaagcgtgtatactgaaagacggtttgtgaaatcgtatgcggacggtaaaggagcaaaggacatgacgttgtcactgcaggactttttatccagcctggtctcgaaccccatgttgattctgacggtgcttctcaccttgggcgtcatttttgtcaacggctggacggatgcccccaatgccattgccacctgcgtttccacccgttccatgggcccccgcgccgccattttaatggcggcgggctgcaacttcctcggggtgctggtcatgacgctgatcaacgcctccgtcgcgcagaccatctacaacatggtggacttccgtggcaattcccacgaggcctccgtcgccctgtgcgccgcactattcgccattgtgctgtgggccgtggccgcttggtatttcggcattcccaccagcgaaagccacgccctgatcgccggcctgtccggcgcggccatcgcgctgcacggcggtctcggcggcatcaacggcgctgaatgggtcaaggtgctgtacggtctcgccctgtcgaccttccttggttttgccttcggctgggcggccgctaagctgaccgctcttctctgccgcggcatggaccgccggaaaaccacccgctttttccggggggcgcagattggcggcgccgccgccatggcgtttatgcacggtgcccaggacggtcaaaaattcatgggtgtgtttatgctgggagtctttctggccagcgggaacggcgatgccgcacaattcacgctgcccctttggctgatgatattgtgctccctggtgatggccgtcggtacctccgtgggcggctaccgcatcatcaaggcggtgggtatggacatggtcaagctggaaaaataccagggcttcgccgccgatttggccgcgtccgcctgcctgctcgtctccttctttaccggcggcattcccgtgagcaccacccacacaaaaaccacagcgatcatgggcgtgggcgccgccaagcggctttccgccgtcaaatggagcgtcgtcaaggagatggtgctcacctgggtgctcaccttcccgggctgcgggcttatcggcttcctcatggcgtggctgttcatgcggctgttttaatagaaagcgcaagcgtttaaccaatcagaaaggcggatttcaaaatgggtaagaaagaaaaaaaggccaagaaagaatgcgactattttgaaatgatggtacgaggcgtcaagttttcctgcaaagcggcggagctgctgaaaaccaatctggaaaacttcgatcccaacaccttgcaggcccgcatggaggagatgcacgtcatcgagcataacgccgacatctccaagcacgacaccatgtctgagctgatgcgggcgttcatcacccccattgagcgggaggacatcatcctgctgatccaggaaatcgacgacgttaccgacgccatcgaggacgtgctcatccgcacctacatgttcaacgtggcggccatccgggaggaagcgctggaattcgccgacgtcatcgtccgctgctgcgaggtactcaaggacacgctcaaggaattccgccacttccgcaaatccgattccatttacgaaaacatcgtggaaatcaaccggcttgaggaggaaggcgacgcactgtatacccgcgcggtgcgcaagctgtatttgtcctcgaccgatcccatcgagctgagcgtttggcgggaaattttcgaccgcatggaaaaatgctgcgacgcctgtgagcacgtggccaacgacgtggaaagcgtcatgttgaaaaactcctgaaaactgccctgttctttccgaacgcgcaagcgcccccgctgcagacactcctgcggcgggggcgctttctggttttgtgagaaaaattaaccgaaataccggttcagcagaccctcgaaggctttgccgtggcgggcctcgtccttggccatctcgtggacggtgtcgtggatagcgtcatagttgagagctttcgccttcttggccagctgcattttgccttcggtggcgccgcattcggcctccacgcgcatcgccagattcttcttcgtgctgtcggtcaccacttcgccgagcagctccgcgaacttggcggcgtgctccgcttcttcataagcggccttttcccagtacaggccgatttcgggatagccctcgcggtgagcgacgcgggccatggccaggtacatgcccacctcggagcattcgccggtgaagttggcgcgcagcatttcgacgacctcggcatccaggccctgagccacgcccacccggtgctcgtcggcccagacccgctcgccggcggcagcggccggcgcagcggcagcggcgggagcctcagcggcacccatctctttaaactggtcggggccagcgccgcaaaccgggcaggcggcgggggcggcgtccccggtgtgcacgtatccgcagatcagacaaacaaactttttcataactgttacctccaaaatttcattcttatatgttccggccgacgccggtcagtgggacaaagaagccggttggcaggcaggacacaggccgctgaaatacacatcctgtacctgcacctggaaccccggcgggcagatgctctgcacggcctggtcatccaggtcgaaatcgtagatagaaccgcagccgcagcatttaaaatgtgcgtggtcggcggcatttccgtcaaaccgttgttcctccggatcgatggtaaccgtccggataagccctgcatccacaagcgcgtgcaggctgttgtaaatggtggtgcgggaaaaggtgggaaaccgctcgagaaccgcccggtaaatagtatccaccgtcggatgggtgggatgacgcagcaggtaatcatatatggcaatccgttgctgcgtgggccgcagtcctttttcggtaagagccgcggcgatttcctgaaccgatttggtaatggggcctgtcatatccacctctcttttctgtaatgatttcttttttgtattgattacaataatcactatacacgcaccactcggttttgtcaagacctttttttaaaaaaagggaattttttcttccttggtaaattcttctgcgcggggcatggtaatatgggaaccacacacagcatatgggcgggaggcttttcgtatgaaagaaatctatctggcgggcggctgtttttggggattggaaaaatacctgggcggcatcgggggcgtcaccgacaccctggtcggctacgccaacggcagcacggagagcccacgctatgaggaggtctgcaccggaacgacggggcacgccgaaaccgtgcgggtacagtacgacgaggtggctctccccctccccgcgctgctggatctcttttttcaggcgatcgatcccacggcggtcaaccggcagggacccgaccggggcacccaataccgcacgggcatctactttaccgcgccggaggacgcgccgcttatcgagcaggcgctggacaagcagcagaagcggcatcgccggccgctggtggtggaggcccagcccctccagaatttctggccggcggaagcataccaccagaggtatctggacaagaatccgggcggttactgccatatcggcaaggcggcctttgagcgggcggcccgccggggcggctaccggcgcaaatccgcggaggagctcaaggcgcagctgaccccgctacagttccaggtgacccaaagcggcgcgacagagccggccttccgcaacgcctaccatgcggagcaccgccgtggcatttacgtggacgtcaccaccggcgagccgttgtttacctcggcggagaaattcgacgcgggctgtggttggcccagcttctcccggcccatcggcagcagcctgctggaggagcggccggatagaagcttcggtttgcagcgcacagaggtgcgcagccgcaccggcggcgcccacctcggccatgtgttcgaggacggccctgccgagacgggcggccggcgctattgcatcaatagcgcggctctccgcttcatccccctggaagagatggaggcggagggatacggcgcctatctgccacccgaagagctataacaaggcggggaaccggtacgcctaccggttccccgccttgtgttaccctattatatagagaagccctgcttcttcagctcctgctcataccccgcggcggcggctgtcaccttgcgggtgtagctggtggtcgtgacgcccgcgtcccgctttttcctcatgttcacaatccccatgttgtattccatcagcccataatgcacgccgtttttgccgatgctttcggccagcatgttcaccccgatggtgatattgtcccggggggtgtaggcgtcggtcaccccataccgcttataatggctggcgaggtaccggctgtttatctgcatgatccccaccatgtcggccccctcccctttccgcagggcgccggtgcgaaaatcgctttccaccttcatcacgccaagcaccaggggatacgaaatttccaggcgttcgcacagctcataggtgaaccgctgcaaatcccgggacagaggaatggacgagagataccaggcgtccgccggcggtacagccggcagggcggtggcagacggcgcagacggccgcgtcgttgcgggcaccgtggcggcggtggtggtggaagcgcccgtcgataggggcgccgattccgtatgggccggcggcgtttccggcgcgtcgacctggacggccggctgcgcctgcacgcgtgcgctggcaaaaaccgtgaaaatatacagcgccgcggcggcgcagacagcggcaatttgtttcaagaaaaaaacctcctgccaaagtatccggccccggtttgtccgggggcctgtggacagctttggcaggaatttcctaatttatacagaatcttttaccggacgggtcagctgccccgcaaacaagggcaggttggaggcattgtccacgatggcatagagaaaggggcggtcgagaatcacctgatagtccccgccggggccggcatttttgcagatagcggcgaaggaaaaggccgcagccttggtgccgtgagcgttcagctcgatacaggttttctgccggatatcgctgaggaacaggccgggcccgcccatgggggcgaaatcgtcctcggcggggaagaaggcggccctcacccccaggcggttcagcggcggacggaaatccgcctcgtccgcataggagaagctggggatcccggcctgcacgctccctgccgcgccgtcgagcagggcgagccacgtctctccggtcagggcccgcgccgcgtcctccaggcggatcccctcccggggcagcagcccgacgaagctgaaccggccgccctgatagggccgtttgaaaccggtgacccattcattttccagataggccgtctcggccgaaaacagaaactccgtggaaaacgccccgtcggcggcctgaaagacgtgggaacgcacgtccttcttctcgtagggctcctcccatttcatatcgaacagcaccgcgctgaggagacatagctcgatggcaggatccaagctgtccagcgcccggggaatccggccttcggtctggtaatccacccaggcgttgatgtccttcagggcctggggcgcctgcaaatcggcccgataggccgccgcccgatagcggtcggcgtttgcctgcaggaaggccggccggatttccagcccctcgtcgatccataaggagttggccagcgtgaccctgcccgccttcttcaccgtccaattatccagcagccaggcgcacatggccccccgttcctccggcgcgcccagcagggcgtccagctcctcccgggtctgcccctgggtgccctcggccagcatggacagcgtcaggtacagggacacgggagacagcagccggttttccgtccctccggcctgttcgcgcagcagccgcatgctgaagtcggcggcggcggcgcggaacccctcgctgaaaggctgggcggcggacgcggcgggcgtcacgtcccgcagcaggttctccgcctggacggacaggcgcgggcgcgccagcagcacccccgcggtcacgccgcaggcggctaccgccgccgcgacggccatccaccatcggcggcctttggatggacgaatgggttcgttcatatcagcaccccctatatattggccgacaccaaaatatttggcggatatgcaacattttccgccaagcggaacactgtacatacatacgccctgtcgtttggcggcccctctcctttatatagtggggctttccccttaaaatgttgcagacggcgcgccgatttacgcgtcctgttcgtccagcgtcagggaaaaggcggggaggaattcctccaggaagcagtcggcggcgggcaggcccatggcccggatcgacgcctcggtggcggcgcgggcggaggcaaattcgctgttcccctggcccagctcctccacacatttgatcagggccgccagcttgtccgccgccttgacgatccgtttttcctgcgcccattcgtcccccgggcggagcaggggggcgtagtcctcccgcagatccgcgggcagcaggctgaggagcttatccgccgccacgtcctccacctgcttataggcgtcccggatggcggggttataatacttcacaggcgtgggcagatcgccggtaaaaatctcgggcgtgtcgtgatacagagcgataaggacgcagcgggaggcatccacccggccgccgaaacggcggttggtcagcagggccagggcatgggccagcacggccacgtcctgggaatgttcgcagatattttccgggcgggtattgcgcatcagggcccagcgggtgatgtatttcatccgggagagcacggcgtaaaacttcggtgtgcgtggcgtcatggcgggacattcctttccggccgctggtattcttatagcggcttctgcgttcagtataccaaagcggcaagaaaaactcaacaaaactgacaggaaagccctttattttccctcgaaactttggtatactggaaaaagctttatacataaaggaggcggacgggtggaggccttgaacatatcccggcggcaggcggtgcagtgggtggtctgtctgctggctttcgcgttcctgacgcggctgtgcatcggaatgctgtactacaacacgttcgacgtcaactggtacaagacctgggcgctggaactgcaaaacggctttttcgactgctattcccgcatgacggacgggaaatacgccctggattatccgccggtttatctggtgttcctctttatcgtcggcaagctgtacggcgcgctgcccctggcggattataagatgttcgacatgctggcgatgaagttcttccctatcctgttcgatgtgctggcggcgggaatgctgtatcttctgtgccggaaaaagagcgaggggatgggggtgctggccgccgccctgtgggcgctcaacccgtcgtccatcttcaattccgcctgctggggccagacggacgggatgatgctctgcctgttgctgctggccttctacctggtggacgcggacaggcccatcctcggctctgtcctgttcgcggtgacggccctgaccaagatgcaggcgctgtatttcacgccggtgctgtttgtggtgctgctgtaccgccacaagctggaaaaggcgctgctgggggttctggcggcgctggccacgggggtggccgccttcgttccctttatcatcggcagcgccggcgcccggggctgggaagcgctgctgacccccttcgaggtgtatttcggggggcttggcaaatatccctatgtggccctgaatacctataatctgtacggcatcggcaacatgaactgggtgcacgattccaaatcgattttcttcgggcacccggacgccgcgctgggcttcgacgtggggggcttcacctacaaccatctgagcaccctgctgatgctggcggttctcgcgctgacggtgttcctgctgtggcggggggtgcgggaaaacggcctgtggctgggctgctttgtgctgatgcaggggattttcatgctgaccacccggatgcacgagcggtaccagatggcggtgctgcccttcgcgctggtactgtacgcctataccggccggggacggtggctgggcatcttcggggccctgtcgggcatcaccttcgtcaaccagttcatgctgcttatccgcaacaacacgataaacgatccagccgccccctggaacgactggttcaacccggtgcaggcggtgttttcggtgctcaacctggcggtgttcgccttcagcctgtatgaagcctggcggctggctttccctgacggcttgcgcaaagcccctcagtctcaggccgcccccatcacagaggaggtatccccatgaccctgacccattctttacggcggcccaagagccgcgcgtggcacgcgttttttatcgcgctggccatggcgtttctgctgtttctccccttcctgatcatcgacaagggcctgttcatctattacggagatttcaatgtgcagcaaatcccgttttaccggatggcccacgacgcggtgcggtcggggaacatcttctggaactggaacaccgacctgggggccaacttcatcggctcgtattccttttatctgctgggaagccccttcttctggctgaccctccccttcccaagcgcggcggtgccctatctgatggcccccctgctgatgctgaaattcgccctgtcctccctgacggcatacgcctacctgcgccggttcgtccgccccgatttcgcggtgatgggcggcctgctgtacgccttttcgggcttctcgatttacaacgtctttttcaaccatttccatgaggccatcgtgtatttcccgctgatgctgctggcgctggagatgtatatgaaggacggcaagcggggctttttcgccgtcaccgtgtttctcagcgccctgtccaactattacttcttcatcggccaggtgttcttcctgctgatttactggttcgtgcggatgttctcgggggactgggactgctccctgtccaaattcctgtggctgctgttcgaggcggtcgtcggcacggcgggggcggcggtgttcctcctcccctcctatctggcggtgatacagaacccgcggacagacagcatgctcgccggctgggacgcgctgatttacaacaagcctcagcgattctacgacatcatccactccttcttcttcccccaggacatcccggcccgggagaatttcttccccgattcggacaacaagtgggcctccatgtcggcctggctgccggtattcggctgctcgggcgccattgcctacttccagtcacgcaagcacagcgactggctgcggcggatgctgattatctgcttcttctgcgcgattatccccgggctcaatgccatgttccagctgttcaactgggtatattacgcccggtggtactacatgatggtgcttatcctggtgctggccacggtggcctgcttcgagcaggcggaaagccagccggtggaatggaagcgggccttcggctggaccttcggcatcaccgccgccttcgcgctgttcatcgggttcatgcccaagagctggaacccggacaaggagaccggcaaaatcacctacgggctgatgaagcacgtggatcgcttctggatttatgtggccatcgcggtggtctccctggtgttggcgtggctgctagtcaccctgttccacaacgaccggccgatattctacaaatggggcgtgggggtcatcgcctgcgtgtccctgatctacagctggtatttcctgggtctgggtaaggccaactccaactacacctcccatttcgtcatcgagcagggcatcaagggcggggataaaatccatctgccggtggatgaacagttctatcgggtggatatgaacaagggtatggacaaccaggccatgttctggggcatccctaccatcaacgccttccacagcatcgtgcccgggtcggtgatggagttctaccccaccatcggcatcgcccggggcgtgggcacccggccagagccggagcattacgcggtgcgcagcctgctgtccacccggtatctgttcgactacgccaacgaggatcccgattatcaggaatataaatccagcggcgacttcttcctggtggacggggaaaccaagatgcccggctggagttacatcgataaacaaaacgggtttctgatttacgagaacgacaactatattcccatgggcttcacctacgatcagtatatgacccgggaatcctacgacgccatgtcggagagccgccgggagctggcgctgctcaaggccctggtggtggaaaaggcagacgagccggcggtcagccggatgctgcccgtgatggacgagacgacggagagcttcaccgagtacgaatacgccgacgactgcgccgatcggcgcgccgaatccgccgtttccttcgcgcgggacaaccggggcttcaccgccaccatttcgctggctgaggataatctcgtgttcttcagcgtcccctacgaggacggctggtccgccacggtgaacggggaaaaagcagccatctacaaggtgaacgtcggcttcatggccgtggcctgtcaggctggccaggacatcgtgattcgtttcgactacatgacgcccggcctggtttacggcgtggtaatcacagtgggggcggtgctgctgttcgtgctgtatctggtgctgatgcgggtgttcgacaagcggatgcgcgccaagctggacaaggcgttcccgccggtggatagtcccgccgcagacacgaccgaagaacccccggcggcttcaccggacaacgacgcagcggatgcgcccccggcggcagcgctgggcaacgccatggagataccgcccctggcggccgacagtgaatcgtcggatggcttcgatttataccgtctgtatccggcgcaggaggatccgccggccgcgccggaagaggaacatacacccgaataacccggaaaggacaaaactgccgcatgcctaaaaaactgaatctcaagcccggttttttctatacgctgggggaggaaatcgccaacgccatcacccatggcgtcggctctgctctggcggtggccggaacggtcatcctcatcgtcaacgccgtgggcgacccctggaaggtggtcagcgcctcgatttacgggttcagcatgattctgctgttcaccatgtcctgcctgtaccacgccatcaccaaccaaagggctaagcggattattcgggtgttcgaccacacctccattttcgtgctcatcgccggcacctatacccccttcaccctggtcaccctgcgcggctgggtcggctggacgattttcggcattgtctggggcgcggcggtgtttggcatcgtgctcaatatcatcagcatcgaacggttcaaaaaggtgtcgatggtctgctatatcgccagcggctggtgcgtggtcatcgccttcgtcccgctgctgcagaagctcgctctgcccggtattcttctgttaatacttggcggcctggtatacaccggcggtatcctgttttaccggcggaagggtgtgcgcgccatgcacgctttatggcacggtttcgtgctggcgggggcactgctgcactatttcgacatcctgttctatgtgatacgggcataacaaaaccggcgcaaagcaaggcttcgcgccggtttttgctgtatggattgttagaggctgcccgcaaaaacgccggccactatcagaacaacatacaaaatcataacgaccgcgccgccgatggtgccgataaggttcagggttttggcggtcttgagcttctgctgctcttcctccatggacatgcagttcttagcgttcagggtcatcaccaggcccgcgatgcccaagggcatgcagcagagcaccaggttgatgatcgaccacaccagcagcccggtgttggtctggccgctggcgccgccggggccgtaaggcgcgtacatgggcggctgttgatacatcggctgctgatagggctggttcaccgggggctgctgatacatgggcggctgctgataccctccagggacctggttgttaaccggcggctgcggggcagccggcgcctgcggcgcgccgataaccgcgccgcactgcgggcagttcgccgagccgtcgggaatgttcgcatgacactgcggacaggtagccataaagaattcctcctatgtatatcaatctatgtccaccctcatggggccaacagcgtaaagggaaacacggggatgttgcgcagaatccagaagccgagaatcaccagcatcacgatattgtaggtgcgcagggaggtgctgaatatcggcagcggatcgcggtgaaaaaccaggacaatgtatttcttcagcaaataatacgcggccaagggcagcgccatgacaaaaaacacattgtaatcgatggcgtccaccagatgcagatgcagcagcgcggacagcgcccgccccgccccgcagccgggacagtacagcccggtcagcttatggaacacacaggggaacgggttgccgaaccggtacagaaaccacaatcccgccagcgcggccgcgggcacgcccaggccgaacagcacacggaagggcatggaccagaggatacggcggtacagcggcgccggttgggaaaccgcctcgctgttcatgatattgtcattattatgccatgatttattcataattgcaagttccatttatccggatccatcattttttcgaagaaaacgcgatggtcaatacgcggccaagctgcctatgagcagcgcgaagaacagcaaaaccacaagcggaagcaaacaggagctgatgatgttcaggaccatagccgcgcgcagccgccgtttttcctgcgacgcccagtcggcactctgggccaagatggtcatcaccagggcggcaatccccagcggcatgaagcccatgacgatattgatgatcgaccacaccagctgccccaccgccagctgccggctggcggggtagtcgccgaccccgtacccgccgtatgagaagtagggctgggcgtagagcggcggtgccgcctggtagccggcgggcggaggcggagcggcatatgggggcggagaggcggacggcaaaacagcgccgcagtgcaggcagacagccgtttgctccggattgctccatcggcagtagggacagacaaccataccgaacccctcctttgtgatgacagaaggacactggaaaaagcgtccctgaaacacctgcgaaccatggaaacgcagctaggattctgcgtcttattcgcccaaagccgcactttttcagccttttaacgaatctacgctcattatgccacatttaccggacaaacgcaagaaaaaaagccgcccgctgaaagcggacgactccaaggcgactttattgtgcggaaaatttctgcttggcgctctgaatcttctgttcctctgccatgggtgtgggataccagccgcgcttctgcatttcggtgaagacgcccgcctggatggcgtgctcctcccggagaagcttaagcagctcgtcccgcacggcgggggtggcgcattcgttggcgcaggtgttgtacgcatcggttatctgcttctgcgcgctcagcgcatcgccgagcatgtccttatcctgcatcgggagggcggcgttgttctggctcatcttcgtctcccccttcagttcaagaacgccagcaggcgatcgtagtggttttgatgctggccggcgatttgctcatactgggtcttcagctgcggatcgctgctcaagacggcgtaggacttgtattttttaaccaggagctgttcggcgctcagctggtcttccagggagctgagctccttggcggtcaggttcggcatagaggttcgtcctttctcatttcacgtccggttcgggtatagtgtctgcggcggcggggaaaatattcacaggcggcttcagccgttttcagaaataccagctttcgtctcggtttgttcaggcaggctcctatgtagcccttctctgagcgtcgacttccttgtccattcccaggccaaagctgatttgcagcgcctcgtccacacgggtcatggacgtgtcgtccaggcggcccatatgctctttgaggcggcgtttatcaatggtgcggatctgctcgagcagaacaatggaatcccgggccagtccgctaccgagggaattgagctgaatatgggtgggcagccgcgccttgtccttctgactggtaatggccgccgcaatcacggtggggctgaaccgattacccacgtcgttctgtacaatcaacaccgggcggataccgccctgctccgagcccaccaccgggctgagatccgcgtaaaaaatatcgcctcgacgaacgttcaccattctcactcctgtttttttcggatgcatatcgtttgaacgccggggaatccgccggccattccgttatccataggattgcctgttccagaaagtttatacaagccgagagaaaaactccccaaagcccccttgcaggcggctggcctgtatgcctttccttggcaggtttcgcggcggatacccgcctcgttccattgtatgcatgtccgaaaaatgagtgaaaaaagaacaggacgcgccttagccaaagccccgtaaggatgttttttgaaagggatacggtgtaaccccgttt

SEQ ID NO: 2903 - DNA, 32759 bp, Unknown
  16S sequences of unknown bacteria
tttttcgcaaaattgcgcaaaaaccttgcacctgaacaattcaaaagtttacaccgacatgctcgggttaaggtacttttgaattgttcagcaggcattaatataaaattgtgctttgtttatatagagcaattttacggagtgaaaagaaatgaagaggtatattataaccacgggtacagtgacctatgccatcaaggggcgggatctgctcagaagaaaaggctttaatgtcaaaattgaacggataacctcgggaaagggcagcgccggctgcggctacagcattataaccgacggcgatataaacgccgcagaaggcttgctgcggcaggcgggggtcaagattcttgaaatcaatgcggaataagaaataaaacggagttgttgcaattttgcggcagctccgttaattcaatacggaggggtaagggaatgatctatcttgataatgcggcaactacagggaaaaagccgcagagcgttataaatgcggtggatatgagccttaaggaatactgtgcgaatcccggcagaagcggtcacgccgcttctatgaaggctgcggcggcagtatataatgtgaggcgggagcttgctgattttttcacggcgtcgggagcggaaaatgttgtttttacattgaactgcacccacagcataaattgcgttataaaggggctgcttaaggcgggagaccgcgtggtgacgtcctcgcttgagcataacgcagttatgcggccgctttataaggtcggcgcggcggtggatgttgcggcggtatcgctcacggacgacaacataacgctcaataattttgaaagacttataagacccgatacaaagcttgtgatatgcacgggagcttcaaatgttttgggcaaggcgctgccgataacgcagataggcgcgctctgcaaaataagaggagtgccgtttgcggtcgatgcggcgcagacggcgggagtttttcctataaatatgaaaaagcagggaatagattacctttgcatagcgccgcataaggggctttacgcgcccatgggaataggtgtgcttatttgtgaaaagccgcttaagaacactgttttggagggcggcacgggtactaattcggcagagcttgtacagcccgattttctgcccgaaaggcttgagagcggaacggtaaatgttcccggaataatgggcacggctgcgggactcggctatgttaaaaggctgggaatcgaaaaaatatacagccatgaaatagcgctttgcgagcttctttatgatgagcttgaaaggaatcccggggtcaggctgtattcgcccaagccgttcgcgggcggctgggcgccggtaatatcctttaatgcggaaggcttcaaaagcggagagcttgcgcggtatctgaacgagcgaggaatagcggtaagggcggggctgcactgcgcgccgacagcgcacagaataatgggaacgatagaaaacggagcggtcagagcctcccctgcggcgtttaataccgcggcggatataaaagcgcttgccgccgctttaaaaaaagcttaaaaaacgcaaattttctattgaatgaccctttattttatgttaaaataaaacagagactgtaagtaaaggattgttgacaggtgagcagcatatttaatgccatttatgcattctggaatcagataatttacgctgtcgccggtatgcgtataccgtttgatattatcgatatacttcttatggcgtatatcatttataaggctatcggttttttgcgtgaaacgcgtgcggggcagcttgcaaagggacttgttatattcgttgtaatctattttgttgcaaactggtggaacctgaccacaatgaaatggatactttcgagatttgtggattacattataatagccattgcaatcatatttcagccggagctgcggcgtatactcgagcgtgtggggcatacgaaatttgtcagctctcacggctcttcgcttgaatccgatccgcttgaggattgtattgataaggtcagccgcgcggcgggaatcatgcaggaaagcaaaacgggcgcacttatagtgtttgagcggtctacacagctcggcgaaataatagataccggcaccgtgataaatgcagacccgtctgtgcagatgataaacaatgtattttttccgaaatctccgctgcatgacggcgcaatgataataagggactcacggctctacgccgcaggctgcattcttccgctgacccagcgtgaggatatatcctcacagctcggaacacgccacagggcggctatcggcatgaccgagaattccgacgcggtggtgcttgtggtatccgaggaaacggggaacatatcaatagtttcaaacgggcagatagaacgtaatttcaatgccatatccgcaagggcgaagctcgggaagctgcttttatccgacgcagaagccgaaaccgacagccctgtgctcgcaaggctcaaaagcatgaatccgttcggaaaagtcaagggaaaggaagcgaaggaagcaaatgaatcggaaaataaaaattcccgttaacttttctttgaggcggctgctttacaaccgtcggtttacgattcccttttctcttatcacggcgttcatattatggcttataatcatgataagccaaaacccggatatagaccgtaccttcaccgatattccgcttaacataacccttgataacacctacgccgcggaaaatcatatggagataataggcgatgtttcggcacaaaaattcaccgttaccattaacgggccgagctatgttgtaagcgcgcttaaagcaagcgatttttatgtttacgcgtccgctgcggcaatcaattcgccgggcgagtatcaactggaggtatccggcgcgcgcaataccgccgtcaccgattacaatatagtctccataaatccgccgacggtaagcctttacttcgactatgtggatacaaaggaattcacaataaccgcaaaggctgacggggcggcggcgattgacgggcttgttgccgaaactccggtcgtgagcggcacggaaaacgataccataaccataaagggcccgcgcacggtcatgaataagattgactcggtcgtggcttacgccgcggtcaacaagaccctttcggaaagcgcaacctatgacgcggaaattcagcttttcgatgaggacgggaacaagattgacaaaacaaatctaaccctcagcgaaacggcggttaaggttgccgtgccgatatcgaagacgaagacagtgcctgtggtggctgactttacaaagctgccctcgggtatatcaaagagcagtatttcctataaggtcgatcatgacagcgttacggtcatcggcacgcccgacgcgatcgacaagataacacaggtgactctctcaccaattgatattaccacaatttccgcaggctcaaaccgtgcggaggtctctgcaaagctgcccgacggagtcagaattctcgattcgatagagcatttcaccgtcacggtggatacctccggcttctcggaaaaaacgctgaacatttccgatgtgcgctacagcgggctttcttcgggacttaaggccgcgaccgacaatgtaatacgcaatgttaaaatctgcggcccgaaggcggttataagcagattgaagaattccgaggtctacgcaaccgtagatttgtcggataaggcggcgggcgagcatacggtaactgtcaccgtaagatcggttcaaaataacatctggcaggtgggcacttacaccactacggtcaaaattaagtaaataaggcaattttatcattttccccgcccccgcatataatggaatatgtggggtggggaaatgattaaatacatacttattgccggctgcgtttgcttttcaatgcttggcttggcggagtttctgcacggcgtaaaaaccaagctcatagcttcggggaaaaaaggaacgacttatgcggtggtttttctgtccgacggtaatcccgaggatcagatagcctttgccgcagagcagcgcatatggcttggaaagagctatgccgacggtataatcgccgtgaattgcgggctgtcggaaaatgccgataagctttgcagggagacggcgaaaaaatacggcgtggcttactgctcggcggaggagctggaggattttatgccgctttaaaggagaggtggattttcttatggcggaggctttaaatgccgaggtcgccgaaatttcgggtactgttgaaagaattacatataaaaatcagaataacggctacacggtggcggaggttaagctgcccggggaaagcataaccgttgtgggaatgcttccttttttaacagagggcgactgcgccgtattttacggaagctataccgttcacccgacctacggcagacagtttaaggcggaaagctttgaacgcaaaacgcccgaaaacgccgccgctgttttaaggtatctgtcctcgggggctataaagggcgtaggccctgccaccgcgcagagaatagttgaaaaattcggcacggatacgctggaaattattcaaaaccgaccgcaggaattagcgtcgataaaagggatatccctctcaaaggcaagggatatatccgaggaatacaacaagcagtacggcgtcagggatataatgctgatgctttcaaaatacaatgtcacgcccgacaggtgccttaaaattttcaagcatttcggcgcgcagtcggttgatacaataaagaaaaacccctatgtgctgtgcgaggaggggcttgatttccgctttgaaaccgcagaggatattgcggcggatatggattttgataagcagagcgagctgcgtatcactgcggggcttgagtatgtactgcgcaaaaatcttttaaacgggcatacctgcctgccgcgcgcaaagcttttagaggttgcctgccgcttgcttgagtgtccgtatgacgcggcggaaagcgcgtgcgacaggctgatcgaatgcttcagaataaaggaaaaaagcatatcgggaacagattatctttccattcccgcttattactcggcggaggagcatattgcggcgcggctgcttgcggtaaagcggtatatcgaccgcagcataacagccgattcgcttgagatcgataatgtggagcgtcagctcggaataaaattcgagaatcttcagcgcaaagcgataaccgaggcatttgaaagcggaattttggtgctgaccggcggtccgggaaccggcaagaccacaacactcaacgccattataaagcttttcgaaaaccgcgggcttgagcccgagcttgcagcccctacagggcgcgcggcaaagcgtatgaccgagcttaccggcagagaggcaaagaccattcaccgtctgcttgaggtggaatggggcgacggcgataaccgtcagttttcacgcaacgagaaaaatccgctttcctgcgaggtcataattatcgatgaagcctcaatgatagatgcgctgctttttgacagtcttttaaaggcgttaaggctttcctgccgcataattctggtgggggattccgaccagctgccgagcatcggcgcgggcaatgttttgggggatattttagcgtcggatatgtttccgtcaataagacttaacaaggtgttcaggcaggcgagcaaaagcatgataatcacaaatgcccatgcaatcataaacggcgagccgcccgatttttcaattaaaaattccgattgcttctttcttaaaaggacaagccgcgcggatgtcagccgtaccgtgacagagcttgtaagcgagcggctgcccgcggcatataaatttgatccgataagggatattcaggtgctttgtccttcaagactgcttgataccggaacggtaagccttaacaatatgctgcagacggcgcttaatcccgatacgggcaaaaaggcacagttaagctttaagggtatatatttccgagtgggcgataaggttatgcagaccaagaacaattacgatctgcaatataagcgcgacggcggcgaatacggtacgggagtttttaacggcgatgtcggatttataaccgatatcgataagcgcgggggaattatgacggttcggtatgacgacaggacggtcacatatttttccgaggatttgtcagagcttgagccggcatacgcggttaccgtgcataaaagccagggcagcgagtacgattgcgtggtgctgccgctttatgatgtgccgacgaagctgcgctaccgcaatctgctttatactgcggtcacaagggcgaaaaagctgcttgtggttgtgggggatgagagcgtttggattgaaatggcggcgaatgataaaaaaacgctgcgctatacttttttaaaacagtttttaaaggaagcggatatttatgaaacgggtaatatcggttcttaaatcggtattcttcccgaaaacctgcgccggctgcggagaaataatcaacgaggacgatgagctgtgcgattactgccacgaaatgcttgtccgctgcgatccgcttaagcgctgtatgcgctgcggattgaaaaaggatgactgtcagtgcaaaaatcaagtcttcgcatttgaaatgtgcatagctccgtttgtcaacgacggcgttgcaaagcgggcaatgtatcacttcaaataccgccgcagaatgacctacggcactatgcttgcaaagcaaatggcgctttgcgttaaaaatgagtacagaggaatcaagtttgacggaatctgctttgtacctatgcacttcagaaagaaattaagccgcggctttaaccaaaccgaggttatggcaaaaattatctcggatatcctcggcgttccgctgataaacgcgcttaaatgcgtgaaatttgttcactcccaacacgaattgggcataaagcagaggcgtgaaaatgttaaggatatgtatgtaccgacaggaagccttcgcggcaaatcgctcttactggtggacgatataaaaaccacaggagccacgcttaacgaatgcgccgtgcagctgctttctgcaggggcggattgcgtttactgcgtgaccgcgcttataagcgaaaagaaataatcaatcgggggcaattatggcaacagatataggaatagatttaggctcgtcaaaaacagttatattttcaagctcaaaggttgtgcttgagctgccgaacgtcgtaacggtggacagcgaaacctgggagcctgtgtattacggcgaaaaggcaaagcagacaatcggcagaacgcccgaaagccttgtgtgcgtaacgccgatagagcgcggggttatttccgattacgatatagccgagcttatgctcaaaaactatatgcaacaggcgttcggcaaccgcattctgcggccgcgcataatggcgactcttcctgcggggcttacggagctgcagcaccattcgctttcaaatgttatggaatccgcgggaggcagaaatgtttcggtaatagaggggccgcttgcgatagcgttcggcttaggacttgatttttcaaagccgcgcggcacgctcattgtggatataggcgccggcaccaccgatattgcggttatttcaatgggcggaatcgcggtttgcgagtcctttaaaaccgcttcgggagaccttgattctcagatagtgcgctatgtcagaaaggaatataacatagagatcggggcacttaccgcagaatcggttaagatcaaaatcggatcggcgcttaaaagggatgttgaggttgcggttgtagcaaagggaagaaatgtcttctcggggcttcccgaaagctttgaaatttcctcgggcgagatatatgaggcgataatcgacacggtgaatgttatctgcaacgccgtgaggcaggtgcttaaccgcaccgacccggatcttgtagccgatataaccgaggacggaatgtatttaacgggaggcggctcgctgctttcgggaatggcggaaaagctggaggaatacctcggcgtttcggtgcacagactggacgacccgacgcacagcgttgttaagggcgcggcggcggcgcttaaaaaccccgggctgcttaaaaatgtggattatcagatgcgctccataaaggaattggcggtcgaatagattttagcgctttaaatcgttaaagaaatacttgacaaaactgaaaaataatgtataatataatttaatgtggtatatgaaagggtggacagaatgttcggttgcgttaactatcgattttattattctaaaacggactgcctgtacccttacgaagcttaaaccttaaagctttgaaattttaagtacggacagcccgcgatcgtttatgctttttggcaataaacgcttgcgggctttgttttggaaaaggtgatttaatgctgaacgaaaaaatggtgagtctgggtatgcgccgttcggttatccgcgaaatatttgaatacggcaaaaagcgcaaggcggaaataggggaagaaaacgtttttgatttcagcctcggtaatccgagtgtcccgacccccgcggcggttactgcggctttggagcgtattataaaggaaaccgaccccgtaaaactgcacggctacacctcggcgcagggggatacggcggtaagggcgaaaattgccggcagcatagaagaacggttcggttttcccgcaaataaagatttaatttatatgacctgcggcgcggcggcttcgctcacagtaacgctgaacgcgcttataaacagcggagatgaaattataattccgtcgccgttttttccggagtaccgcgtgtttgcggagaatgccggtgcacacgttgtgacggtgcagtgccgaaagcccgattttcagcttgatattaaggcgacagagaacgccgtgaccgaaaaaaccaaggcgataataataaactcgccgaataacccgacgggcgcggttttctcacccgatactataaaggcattaagcgatatgctgtgtaaaaagcaagcagagtacggtaccgatatttatattatagccgacgagccctaccgcgagctttcttacggtgctgaggtaccgtacatcccgaaatattatgctaatacggtgatttgctattcctacagtaagtcgctttctcttccgggggagcgcataggctacatatttattcccgaaggcgctgcggactgccgtaaattatacgccgcagtttgcggtgcgggcagggcgcttgggtttgtgtgcgcaccgagccttatgcagtacaccgtagcagagtgtaccgacgctttacccgatgtttccgcctataagaaaaatcgcgatctgcttttcggcgcacttaccgattacggatatgaggcagtaccgcccgacggtgcgttctacctgtttgtaaaatcgcctgaacctgacgctgtcgcattttgcgaaagggcaaaaaaatacgagctgctgcttgtgccgtcggatgatttcgggtgcgaggggtatgtaagaatatcctactgcgtaacggctgagcagatagaaagatcattaccggcgtttaaggcgcttattgaggagtataaataaatgacagagcttgaaaaggcgagagagcagattgaccgtatagataaagaaatggcacgcttgtttgaggaaagaatggcggcggtaaaaacggttgccgagtacaaaaggcaaaacggggtgcgcgtggccgatttatcccgcgaggcggaggttatcaagcgaaactcatcgctaattgaaaacgaggcgttaaagccctatttcgtaagctttttgcagagcaatatggatatttcaaaggcgtatcagcaccgcctgcttgaaggtatgcgcatagcctacagcggcgttgagggcgcgtttgccaatattgccgcaaaccgtattttcccggacggaactgcgtttgcatgcgaagattttaaagcggcatacgaatcggtggaaaagggcgagaacgactgcgttattcttccgattgaaaacagctacaacggtgatgtgggtcaggttatggaccttacctttttcggttcgttgtatattaacggaatttacgatattgaaatagtgcagaatctgcttgccgttaaaggcaccacaatggacgaggtcaaggaggttataagccacccgcaggcgctcggtcagtgtgcggcgtatataaggcggcacggctttaagccgaccgaggcggtaaacaccgctgttgcggcaaagcttgtggcagagtcgggcaggcacgatatagcggcaataggcagcagcgaggcggcgaaaaaattcgggcttaaaaagctcgaggcgcacattaacacaagcggcaacaacacaacccgctttgcggtgttttcaaaggcggcgaaagccccgtctaaagctgataaccagtttattatgcttttcaccgtgccgaatgaggcggggcttttgggtcaggcaatagcggtaataggaaaatacggctttaacctgcgcgccttaaaatcccgaccgacaaaagagcttatctggagctattatttctacgccgagggcgagggcaatataaacagcgaaaacggcaaggctatgcttaaggagcttaaagaaaaatgcagcaatgtgcgggttgtgggcagctttgaaaaggaaattgtgctgaagggtgacgatgaatgatacttcccgttaaaacaggaacaggcggctacaatatttaccttgagcgcggcgcgattaaaaaagcgggggaatatttaaacctttcccgccgcgcgcttatagtgaccgacagcggcgtaccgaaagaatacgccgaaacggtggcggcgcagtgcagggaaccctatattgtaaccctgcccgagggcgaaaaaaccaaatgttttgaaagctttaaatatttgctttcaaaagcggtggaatacggctttacaaggagcgactgcgtaatagcggtcggcggcggcgttatgggcgatcttgcgggctttgcggcggcaagctttatgcgcggaattgatttttacaatatccccacaaccgttttatcgcaggttgattcatcgataggcggcaaagtcgccattgattttgaggggtataaaaacattgtcggcgcttatttcccgcctaaagccgttataatagattcaaatacccttaaaacactgcccgaaagacaaatttcaaacgggcttgcggagtcggttaaaatgtcgctgacaagcgataaagagctgtttgagctttttgaaaagggcgatattaaggaaaatattgatacgattattgaaaaatcgcttaaaataaaacgcgcggtagtcgagcaggacgaaaaagaggagggccttcgcaaaattcttaatttcgggcataccctggcgcacgcaatcgagagcgagaacgaaatgcagaacttatatcacggcgagtgcgtggcgctcggtatgatacctatgtgctcggaaagtgtgcgaaacaggcttattcccgtgcttgaaagacttaatttgcccacatctaccactgtaacggcggacaccataataaacgccatgcggcacgataaaaaaatgtcgggcgataaaataacggtgatttttgtaaacacggtgggcgaatacgaaatgaaggaaatgccgtttgatgtattcgcacaaaaaataagggggtctttagggtgaaaaacagcttcggcaattcggttattttaacgctgttcggtgaaagccacggtgcaggtatcggcgcggtgcttgacggcttagcccccggaattacggtggatgaggattttatacgcagtcagttatccctccgccgccccgtgggggatatttcaacgccgagggcagagcctgataattttgtaatagaaagcggagttttcggcggcaaaactacgggaacgcctatctgcatagtaataccgaacgttaacacccgctctaaggattacagcgagctgtgctcaaaggcgcgcccgggtcacgcggattatgcggcgtacacaaaataccacggctttgaagattaccgcggcggcgggcatttcagcggcagaattaccgcagggattgtagccgcaggcgctgttgcgatttcggcacttaaaaataagggcatatatataggcacgcacattaaaagcatagcgggggtaaccgaccgcgaattccggaatatcgcggacgatataaaggcagtatcgcaaaaggaatttgccgtgctggacgacggcgttaaggaaaaaatgataaatgagataaccgccgccaaagcggacggcgacagcgttggcggcatgcttgaaaccgcagttgtcggtttgccggcaggtataggcgagccgtggttcggcggggtggaaaacgtgctttcctcagcgcttttcgccgtgcctgcggtaaagggcgttgagttcggagcaggctttgcgcttgcaaatatgcgcggcagcgccgctaatgatgaatttttctgctcaggcggtaaaatcgccaccgccaccaacaataacggcggcataaacggcggaattacaaacggtatgccgattatcttccgctgtgcggtaaagcccacacccacaattcataaggagcagaacacggtagactttatcaagaatgaaaatgttaaaattacggcgggcggcaggcacgacccctgcattgtccaccgtgcgcgcgtggttattgacagtattacggcaatagcactttgcgatatgctggcgggcagattcggtactgattggttgggtgaataatggaatacggctgtataggggaaaagctttcgcacagcttttcaaaaatcattcacgcaaggctggcggactatgattacgagctttgcgaaataccgcgcggcgaattggatagctttatgaaaaaagccgattttaaggcgataaacgtaacaattccttataaacaggcggttataccttatttgtattatataagcgataccgcaaaaaaaataggcgcggtaaacaccgtagttaataaaaacggcaaattatacggctataataccgatttttcgggtctgcacgcgctgctggtccgtcagagagccgatttaaagggcggcaaggtgctgattttaggctcgggcggcacgtcaaaaaccgccgcggctgtagccgaggatttaggtgcaaaggaaatttaccgcgtttcaaggtccggctcggacggcgcgataacctatgatgaggcttataaaaagcatggtgacgcgaccgcgataattaacaccaccccctgcggaatgtacccgaatatcggcacttcggcaatagatttaagccgctttgaaaatgtgaaaagcgttaccgacgcggtctacaatcctctttcaagtgcgcttgtaatatcggcgcgcgaaaggggaataaacgccacgggtgggctttatatgctggtttcccaagcggcatatgcggtggaaaagtttacgggcggcagcatatccgcagataaaacagaggaagtctaccgcgagattttaagggataaaaagaatattgtgcttataggtatgcccggctgcggcaagactacaatcggtaaaatatcagccgataggcttcacaaggaatttatcgacaccgacgatgaaattataaagcgcataaatataccgatagcggagtattttgcaaagcatggcgaagaaagcttcagaaggcttgaaagcgaagttataaaagaaatttcggcttgccggtcctcggttatcgcaacgggcggcggggcggttttaaaccccgataacataaggtttttaaaggaaaacggaacggttatatttatcgaccgcccgcttgaaaaattggtgaccacagccgaccgtccgctttcttcaagcagggagctgctcgaaaagcgatataaggaaagatacggcttgtattgtgccgctgccgatattaaaatcgatgcggtgaacgaaatagagcaaaatgttaaaaatattgaagaggtctttttaaatgaaaattcttgtaattaacgggccgaatataaatatgttgggaataagagaaccgggtatttacggcagcgacagctttgaaacgctgtgcagtaccgtgaagagccacgccgagggtgcgggaattgaagtaaagctgtttcagtccaaccacgagggcgcgcttgtggatgaaattcaagcggcttacggcaagtttgacggcatagttataaaccccggcgcatacacgcacacaagcatagcgctgttagacgcagtaaaggcggtttcaataccgacggttgaggtgcatatttcggatgttgcctcgcgcgaggatttcaggcagataagctatataagaaaggcttgcgttaaaacgatatgcgggcatggtctggcgggctacaccgaggcaatagactacttgattaaggaatacggcgataaataatgatagcaaccattgaaaaaggaacggcatacggcagggtggaggcgccgccctcaaaaagcgtttctcacagatatttaatttgcggcgcgctgtcattcggcagcgttatagaaaacgttgcgttttcagaggatattaaggctactcttaattgcctgagcgccttgggtgcccaaatcgaaatcgacggcagcacggttaaaacaggcggaatatcgcccgataaagctgttaagtgcgcagagcttttctgcaatgaatcgggcagcacgctgaggtttttgattccgctttgtcttctcttcgggcaaaagatcacccttaaaggtacccaaaggcttatgagccgttcgcttgcggtttataaggaaatgtgtctatcgcaaggcattgagtttacggaggataaggaaagcgttacggtatgcggcaggctgacgccgggtaaatattccgtaaggggtgatgtttcaagccagtttatatcggggctgatgttcgctttgccgctgcttggcagtgacagcataattgatataaccggcgcgatagagagcggctcatatctcggtatgacggtaaaggcgcttgctgatttcggtattaggatcagccgaaccgacgagcgaaccatatttataaagggcaatcagacctacaagccgcgcacgctgcgcgttgagggggattactccaatgccgcattttttgaggcgttcaattcggtaggcggcaacgttgccgtggcaggattaaaaaaagatacctgccagggcgacgcggtttacagaaagcttttcggtaaattggtgcgcggctgtcccgaaatagatatttccgattgccccgatttagcgcctgtcttaatggcggtggcggcggcaaacaacggcgtaagactcataggtacgcaccgtcttaaaataaaggaaagcgaccgcggaagagcaatggcggaggagcttgccaaattcggctgcagcacagaggtctgggataacgagataacggtgcatccgcgtatgctgaaaacgcccgagctgccgctttcggggcataacgaccacagaatagtaatggcgctgtctctgctctgcagtataacgggcggcagcatttacggagcagaggcggtaaacaaaagctttcccgattatttccgtaggcttgcttccctcggcataaaggttgaagaaaaatgaaattaagtaaggatacaaatattttaatagtaggcttagggcttttgggcggcagctacgccgaggcgcttacaaagggcggttataccgtaaacgccgtaaccaaagagcaatcatcggttgatttcgcacttgaaaaaggtataataaaatacggcacaacaaagcttgaagaaagcattatttccgccgcagatttggttatattcgcgctttaccctcacgttttcaccgattggatagaaaaaaatcagcatttattaaaatcgggagcggttataaccgatgttacgggcgttaagggctgtattgtttacaaaattcaggaaatgctccgccccgatgtagagtttatagccgcgcaccccatggcgggacgcgaggtatgcggggtagaaaacagcgactccggcattttcaggggcgcaaactacatagttgttcccacggaaaaaaataccgccggtgcaatagagctttgccgcgatttgggcgaaaaactgggctttcaccgcgtagcggagctgtcagttgaaaagcatgatgaaatgatagcctttctttcccagcttacccactgtatagcggtaacgctgatgtgctgcaacaacacgcccgaccttgaatattatacgggtgactccttccgcgatttaacgcgaatcgcaagaataaacgatgaaatgtggagcgagctgtttttggataacaaagatatgctgcttgccgaaatgcgcagctttaagcaaagctttgaggagctttacgaaaaaatagaaacgggcgaccgagacggaatacgcgaaatgatgcgcctatccaccgagcgcagaaaacgttttaataagcacctgtaagattaaaaactactgccatactaaggggaaaaagactatgaacatgaaatttttaagaaaactaccgataccgcagcaaataaaaaagcgttacccggtatccgagcaggacgcggcggtgaaggcggcgcgagacgaggagcttaaaaatattttcgcggggaaatccgataaatttattttggtaataggcccctgctcggcggacagccgcgagccggtgcttgattatatttcaaggcttaaaagggtgcaggatgaagtaaaggacaaaattcttatagtgccgcgtatatataccaataaaccgcgcaccaccggtgacggctacaagggtatgcttcaccagccgaatcccgatgaaacacccgatatgctaaaaggtattgtcgcgataagagacttacatatggcggcgctgcacgattttggcttttcctgtgcggacgaaatgctctaccccgataaccaccgttatttatccgacctgctctcctatgtggcaataggcgcgcgctcggtcgaaaaccagcagcacaggcttaccgccagcggacttgatatacccgtgggcatgaaaaaccccacaagcggagaccttagcattatgatgaactctataaccgccgcacagcacagccacacctttatataccgcggttgggaggttgtaagcgagggtaatccttatgctcactccattttgcgcggatacattgattttgcgggcaaaaacgtttccaattatcactatgaagaccttgtaaagctgcatgagctgtatgccgaaacatcccttgtaaatccggcggcaatagtagataccaaccatgcaaactccggtaagcagtatttggagcagataagaatcgcaaaggatgtggtttacagctgcaaccacaataaggatatacgttcaatggttaaggggcttatgattgaaagctatattgaggacggcgcgcagaaaataggcgagcatatttacggcaaatcaataaccgacccctgcctcgggtgggaaaaatccgaaaagcttatttatatgatagcggataagctgcattgatttttaattccgcattccgcattccgaattttgcattatattacggcttgcacttcccgcagggatcatacccctccctcaccgcttcctcgcggcttttaaaggaaacgcggttttcatccttcagctttttggcatacaagcagtccggcgtgtggaattttttggaatttgaatttcctatgtacgccgtaggcgcggtttcgttgggcttgggctttgcgggcacagtgctgtcggcgggtatttcatcgggcatagagccgctgccgcccgggcggtagccgtttacggtgtcgtcacttgggtaatttacggttatctgtgcgtgtgattcggcattgtcggcaacggatccgttgcacccgcaaagaataacgggtataataagcagtgcaagtaattttcttttcataagcaaacttcccttaatttttttacggaggcttttaatggacgaccgtgacgatatttcaagactttcgcggctgaaaaaacgcgctaatcggctgccgttgctgccgggcgtttatataatgaaaaataagaacgatgaaatcatatacatcggcaaggcaaaggcgcttaaaaaccgagttacgcagtatttcggcggcggctcggggcacaccgcaaaggtgcgcaaaatggtctccaatgtcgatcactttgaatatattgtgtgcgacagcgagtttgaagcgcttattctcgaaaactcgcttataaagcaaaatcagccgaaatacaacatacttttaaaggacgataagggctactcctatgttaaaataacaaacgataaatggaaaaagataaccttttcgcgctctgcagataaaagaggcgagtatatagggccttattcatcgctttatgtggttaaggaaacggtggacgaggcgcgaaagattttcaagctgcccgattgcggcaggagctttgataaaccctcaaagccctgccttaattaccacatcggcatatgcgacgcgccctgccgcggaaaaataagccttggcagttaccttgaaaacgtaaacgccgcggtggattttataaagcacggcggagcggacagtgaaaccgaggcggaattaaacaaaaaaatgcttgccgccgccgaaaggctggattttgaaacggcggcaaagctgcgcgaccgaataaacgccatgaaacggataagggaaaagcaaaaggtggttcgcgcgacctataaaagcgaggatgttatcgcgtccgccctgctcggcgagactgcggcggtaagcgttttcattttcagaaactaccgcctttgcgataagcaggtgtttttattcgacggcatatccgacagggaaagcctttatgaggaatttttgcagcgctactatcttgaaaaggaagatataccctcgcgcgtgttaatagattcttcggcggacttttccgctcccgagcgctggcttgccgaaaaatcgggacatagcgtgagctttataaacccgaagctcggcgagcaaaaggcgctgcttgatatgtgccttaacaacgcggctgaaaccctttcgcaaaaggcggaaagaacagggcgcgaaatgtcggtattagatgaactggcgcgccttttggggctgccctctgctccgcggtatattgaggcttacgatatttcaaacacggcgggcagcgaaaacgttgcgggaatgatagtatataaggacggaagaccctttaagcccgcgtataaacgttttaaaataaagagctttttgggtcaggacgatttccgctctatggcggaggtgcttgaccgccgatttaccgagtacgaaaagggtgaggatgagggctttgcggtattgcccgatttaatattgcttgacggcggttcaggacaaatgtccgccgtgcgccccgtgcttgaaaagcacggaataaccgttccgcttttcggtatggtaaaggactcaaagcaccgcacccgcgccatagccgccgtgggcggggatataagcattaaatcaaaccgtgcggcgtttacctttattacaggcatacaggatgaggttcaccgctttgcaataggctaccataagcagagaagaagtaaaagtatgctggcaagcgagcttaccgaaattgagggaataggcaaagcccgcgccgccgcgctgcttaagcactttaaaacggttaaggcgataaaatcggctgcggctgatgaattggcggcagcgcccggaatgaccaaagcggcggcggacgccgtgtataaacactttcattgaggaattataaatgggaaaaacacttgaaaagcataccgaaattgagcggagcataatcaaaaaattccgcaagacgatatggaataattttataggtgcggtaaaggaatacgagcttatttccccaggtgataaaatagccgtttgtatttcgggcggaaaggattcaatgctgcttgcaaaatgcgttcagcagctgcagcgccacagcgaaataccctttgaagccgagtatattgtaatggatcccggctacaaagccgaaaaccgcgcgcttatagagcacaacgcgaaattgatggatataccgatatatatttttgaaagcgatattttctcggttaccgagcgtgcgggcggttcgccctgctacctttgcgccagaatgcggcgcggctgcctttacagtaaggcaaaggagctcggctgcaacaaaatagcgctggggcatcattttaacgacgttattgaaacggtgcttatgagtatgatgtattcatccgaaataaagaccatgccgccgaaattacacagtaccaattttgagggtatggagctaatacgcccgctttataaggtaaaggaaaaggatattattgctttttcaaattataacgggcttaaatttctgcaatgcgcctgcaggtttaccgaaaacagcgtccacaacgaggggctttcaaagcgcaaggaaataaaggcgcttatagaggatattaaaaaggtaaacccgaatgtggatgataacattttccgcagtatacataacgtaaatatggctaccatacccggctggcgcgaccgcgattcgggcacattacacagctttaccgaaaactattagaccgataatttagtctcgcgggcgtagaagaatatatactgctgcgcaatacccgcgtatggcttggcttcatcgggcagctcgcccccgaaaagcgcctgcattgcgcgctttatccacacgtctttcgggaatgcgtcaatatggcagagcgagaaaagcagcgcgcaatcggcaaccttgggacccacgccctttattttcataagctcgtcgcgggcgacgtcggtcgatactgttttaagcttttcaaggtcaatttcacgcgacgatattttctgcgccgcgtcaagtatatatttcgctctgaaaccgctgcgcagcaccgctaaatcctcaagcgtgcacgccgctattctttcggcggtggggaaagcgcggtacccgcccttatcctcgccgaaattatcgcacaggcggcttataatgcccttaatgcgctttatgttgttgttttgggatattataaaggagcaaagcgtttcccacggctcctggtttaaaattcttatgccgaaggaatactccgccgcgtttttcagtatctcgtttttgcttaaatttgtatttaccgcgcgataatccctgtcaaggtcaaagtattttcgccatatgttttcaaagtcgtgttcggtcgtgttaaaaagcaccagtgtgccgtctgcctctttgcaaagctctaaatattttccgtaggctgtgccgtgccatacgccgttttccttttcctcccagcggaaagcctggccgcagtcaagcgtgtgcggcaggtcaataccgtcgggcacggttatgtaagcattgttattttcatactttacagtaaacatataatcaccgaaatagattatactctttttcgacaataatatcaataaaaaacaggagaaaaaattatgagagacgatatttgcaccataccggtaagcgaggttttcgagcataacgacggctgtcctatatgccgtatgcgcgacaccattgaggaaagaatgaccgattatattttaggcgacgccatgatggaacccgatgtaagaattgagacaaataaaaccggcttttgcgagcaccactataacaatatgatgtcgcgcagggggcggctgcaattggcgcttatgctgcaaacccacattaacgagataaacggcgaaattttcaagaaaaagcttttcaataccgacagtaaaaagaccggaaatgccaaaaacataaccgattcctgttttatctgttcaaaaatagagtgggggctttcccgaatgatagataccgtttaccgctgctacgaaaccgagaaggattttcgcgatatgttcaattcacagagtatgttttgcctgccgcattatgagcggctgctcggcggcgcttcaaaacggaatatgaaatcatattattcggaattttccgaaaaccttaaccgcataaccggcgaatactcaaaatcgctttatgacgatttgtcaaaatactgcacaatgtacgattaccgcagccgcgacggcgagaccgattggggaaacagccgcgacgcagtggagcgcacggtcgcgtttttaaacgggagaatttataaagaggaatagtttattttcactcacaacataaaacgggagattatgggcacacccataatctcccgttttaaattagctgtagattaaagcttacgattaagcaagctcaacagtagcgccgacctcggtgagcttagccttcatagcttctgcctcatccttggaaacagcttccttgagggtcttcggagcgccgtcaactatagccttagcttctgcaaggccgagaccggttatctcgcgaacagccttaataaccttaatcttctcagcgccgacttccttaagaacaacatcaaactcagtcttctcttcagctgctgctgcgccgcctgctgcgggagccgctactgctaccgctgctgccgcggatacgccgaattcttcctctactgctttaacgagctctgaaagctcaagaacggtaagagctttgatttcttcaatcatagctgcaattttctcagatgccattttattttcctccgatttttaattagtttttttaaaattattccgcgtctgcggtttcgtccttatcgacgattgcctgcaatacgcgtgcaaaggctgcgataggagcctggaacgcgctgcaaacggttgcaagaagaacttcctttgtgggaagctttgcaagagattcgatggtagcaatgtctgctacctcgccgtcgaggaagccggatttaaccttaaagttatcatgaccctcggcgaatttgcagagtatgcgcgctgcggcggtgtaatcctctttcgaaagggcaatagcggtcgttccttcaagaacagacttcataccctcaacggaggtgccttcgatagcgcggctcaaaatggtgtttttaacaacgaagtattcaactccgttttcgcggagctctttacggagcgccgtatcgtcggcaacggtaatacccttgtaatcaactacaacaccggtaaccgcaccgcttattttttcggcaagctctgcaacctgctgctgctttttctcaagaactgaagcgttcggcatttgattttcacctccgaaagtataaataatgcccgtccaaagacttaaggacgggcataaataagcataattatttaggcgcacacctcggcaggcgataagcttacggcctgtgcggccacctgctgtctttggattgcaacaatgtgattataatacaagtgccgcattttgtcaagcactttttttataagttgggcaaagatatgacgatatcacataaacggtgcgaaaatatggagcagcgcctgtttgaagcgcattttaagcgggcgttttttccatttgtcgatcttgatctcttctgagaccttaaggatttcggaaaactgatccttgatatcgagcaccgtgctgttatcgcatatccaggctccgcactcaaagtggaagataaagctgcggtagtccatattgacggtgcccacggttgcaatcttatcatccgaaacgaagagctttgagtgaataaagccgggcgtatattcgaatattctgacccccgcctcgagcagctcgagatagctgtactgcgtcacgggatggacataccatttatccggtatatgcggcgttacaatacgcacatctattcccgagcgcgccgccatgcataaaatgcttgtcatggtattgtctattataaggtagggcgacgcaatataaacatatttctgcgcggtgttgaggatctgcatataaattccctcggcgggatttttgttgttgagcgggtcgtcgcagtagggaagaacaaagccgttatccgcagcggaaaagtcggaaatgtgggaggaaatatcaagctgttctcccgttgtgaactcccacatacagcaaaacattgcaagaaagctttttaccgcctcgccgcggagcatgattccgctgtcaagccagtgaccgaagcgtatcattttattaatgtactcgtcgcctatgttgaatccgcccgtaaacgccgttttgccgtctatgaccacaattttgcggtggttgcggttgttcatgaaaatattcattgagggctttatcgggttgaagaccgaaacatctattccttcggcgcgcagatttactataaagtccttgtgctgacgttttattgagccgaaatcgtcgaatatgaccctgacctcaacgccgttcgacgccttttcgcttaaaactttgtgaatggcgtcccacatctcaccctctgccaatatgaagaattccatataaatatatttttcggcagcttgaagctcctcgagcatgcgctcaaatatcctttctccgggagagagatattcggttacagtgttcgagtaaagcggataacccgattcgcccgaaagataatccgcctggcgcgaatggaacaaatcgtaatatttcagcttttcgcgcacgccgtccttttctcggagaaccggcaggtaatgcgattcgcagacctccattttacggcgcagatgcgggaaaacgcgcccgcctccccaaagcagaaacaccgaaatgccgaataccgggaaaatcaatataaatattatccagatgattttgtggctgggattgccgcggcggtttactatatatataaccgtcatcacaccggcaatttgcgaaagctcgtatatgaatgcggattttcggcttacatcgcgtagagccaaaaagaaaaataaaaactgaacaagaagcaaaagcgcggaaactataattcttgtctgtattcttatgccgcgttttctgttactcacaggcaacacccccaataccgtattattttaccataacaagaagaaaaaagcaattactataattgagcatctgcaatatgtttgtttcttttatacattattaaacgacaataaggatgataattggcaatatattcttacaattccgtgatattgaaaagatgaacggcgcatcatataatataaaaggagtacaaaatgagaattataaaatatcggtacaaagggggtcggcttaccaatcatcagcagggaagtgccgcatcggcggcaaaattctttacggaaaggcagattataatgaaaaaggtcattagtattattatcagcattctgcttatcacagcccttgcggctccggccgtttttgctgcgggtgagcaaaaaacgcataattatgacgattacatcaattaccgcgatcctcttgcaaacacataccgcaggctcacagaggataagaagcttaaggcggtttatttcggcggctcggtaaccgcgggctacggcagctcaaacgcagggctttattcctggcagtcgctgtcgagcgcatggcttaaaagcaatttccccgaggcgaatatttcggtggttaacaccgccataggcgagagcggaacatatctcggaacataccgtcttgagcaggacgttattgcgcaaaatcccgatttgctgttcatagaatatgcgataaacgataaatataagggctcgtcaaaggagcaggcggcgcttcagtatgagaccatagtgcgcgaggtgcgttcggctcttccgaactgcgacatcgtaacgctgctcgttaccgataagaccgcgagcgagctgcttccggagctgtatccgaccgccgcgggtcatgagatgatagcggaggcatacaatattcccacggttaatgtgggggcggcgcttattgcttcaatgtccgataagtctgcggaatgggatacctattttaccgataccgttcatcctaccgacgtaggttataagaaatattacgactgtcttgaggaattcctctataacagccttatctgcgaggatttgtcatcggctgatgtaggtcacaatatgccggagattcaaagcgaacacctgcttgacggaaaccgtatgtcattaatgggcgagggaatgcagggctacttagtttcggcggacggctttacctacagcgatcagctttattacggtcctgcggcaacaccgcatatgggctattatacctgtcctaaaggcacagcgggcgaaataaccttcagatttgaggggacggagcttgcaatctggactaatttctataacggctcaactgttgacatttcggttgacggcggcgaagcatcccgcgtcacctgcgacagacatgctcccacaaccttggtaagcaagcttgaatcgcgcgagcataccgttaaaataaagcccgttaccttcggggacgatacaacggaaatgaagatcggcgcgatattcttccgtgatgaaaccaagcagacgttagggaagggcactgctgtaaaggagcttataacggtagacccggtcaaggtcggagacacctcggttacccttaatttcggagaaacaggcagcaaggattggtttgttataacgagaaagggcggagcctacagccagcacctcggtaagagcggtcacgattacgattactgcgtggcgggcggttctgttacgcatgagcttaacgacccgattaccgccggtgagtacgaggtgattctgcttttgaatgacggctatacagagggcggccgcttcggcttcactgtcggcgctctgatactgaaccgtgaaacctattacgcaagcgaaaagattgaggtcaactgggctaatgtgccgtcatccgtaggctgggcggcggtttatccgaaggattataccgataaatacaaatactgcgattacataagcagtggcgacgcttccttcccgtcgggtcagagcggccgctataacggctacacctggccgcttgaaacgggcgattataccgccgttttctatgacggcagcggatataccgtaaactgcacggttgatttctccgttatcggaacaagcgttactgtcaccccgaaggaaatgtatgtcggtcattctgaaagcgttacaattgaaatcagcagcggcggattggccgcaaacgcataccaccgcgttcgcctttataaggcaaaatccggcttcggaaccggaaacacgggcttcggcaatgccggaatcaatttctctaacgataatcttataggcgatgcaacaagcttcacaacagatgcaaacggcggcgcgaccgtcacacagaccctgcaccaaaagattacggatcccggcgtatacggctacgcaatcatggactcaacatgggatacaaaggcgattgcctttattgaaatcaaggatgcggcgagggtatcaatttcaagaacctccgtgccgctcggcgcaaatatcccgctggcgcttaaggtgaccgcgggagacggcggacttgaagccaataagaaatatacaatacgactttacagtggctggaacggcactaccggttttggttcgggcggcgttaacttcggcggcggtgagaagggtcaagccaccgttaatacagatgcaaacggagcttttaccgctctgcttatatcccatgtaaacggaattacagaacccggcaattatgcctactgcattatggatgaagaattgaataccatagcgcgcgcgttctttgatgtgaccgcggcaacagatccgttccccgaggacgcgccgtctgttaagcttgacaaaaacaccgtcatactcggctcgtccgagcagcttacattctccgttgcaaattcggcagaactcggtcttattgccggcaagagatacaatgtccgtctaatgaggaccaaggacggtttcggagtaaatgattcgggcttcggcgaaagcgggcttaacttctcatcgattttaggagagggtaccggcattactcttgatgaaaacggctcgggcagcgcttcccagtccattcactcggagctgattacagaacccggagtttacgcttatgttttgatggacggctggtctacagtcgccagagtgttctttgaagtgaaaaaagcacccggagatgtaaacggagacggagcagtggatatccgcgatctgatacatctgaagaagatgtatgcgggaataatcgaaaaaaccgacgcaggcgatattaacggcgacggtaatctcaatgcgacagatttggcggagctgaagaaaatacttcttttaaaataatcgacaaaaggcattgcagcaacgacccccgatgcggatatccccatcgggggtcactttatattgcccattatgttgtaaattcgacatgcgaaatcatagcttctgtacataccctagggctcccttgtgtaaagggagctggctccgaaggagactgagggattgtcagtgactaaagcttatctgcaaattttagttttctgcttaatttaagttcgtaacagcccctccgtcagccatacggctgccaccgtctcggctgccacctcggtcggtgcttctgcttcgcagaggtgtccgccggacacccgcacccttacacaggggaggcattttttgtacaaaccaacggctcccttgtgtaaagggagctgtcgagtgaaacgagactgagggattgtcagggatgaatgtcttgttaacaatagagatattataaatcagttctaaacaacatcacagagctatctttccgtgagctttttcaaattcttctatcgcatcgcgtatcaaaattaaaatttcgctgtttgcactcctgccttcgtaatctgcaagaacatggagtttgttgagcatttcctcgtcaattcttatcgataaactttttacagccataaaacaacctcattttaaaataaatatgtatttattttatgtgcattatgtgttataatgcgtattatgaacacaaaatgtgtttataatacgtttaaaagaagcgataaatatgactgtaacatttttcgggcatcggaacacgcccgacagtgtgaagccactgcttaaaaaagtcttgcgcgagcttatcaatcaagatggggcaaaaatgttttatatcggcaacgagggaagctttgatcggatggcgtatgatgtcctgaaagagctgaaagaggagtatccgtttatagattataaggtggttttggcatatttggagaggcggaaaaaggatataaaaaaattcagcccatgggaaacggtttttcccgatgagctgacaaaaactccgccgcgcttcgctatagcaaagcgcaaccgtataattttaaggcttgccgataccgcagtcgtctatgtggagggaccgggcggtgcggctgatttcaagcggcttgccgaggcttgcggtaagagggttataaatcttgcgccgtgatgcgcaagccgtgattattccacgttttttaatattataccgaaaagctcgtccgcacgggcggtattctccgaaaggtaaagccacccgaaaagacattccagccccgtggcgatatgataatcgccgtttgaagcgtttttcggtgtggacgaggtatggaaatttctgccgcgcttgaaaacggaaatttccttttcggaaagctccggctcaataaccgaatacgcctttgcctgtgctgcggcgttcaccattgtgacagagagcttatgcagctcgcccgacgggcggtttacctccgctaaggcggttcttacgtacagcccgtacaccgcgtcgcccacaaaggcgagcacggaggggcttaaaagattgggattttccgttttcatcacatcacaaactcaaattcaatatcgtaaacgcttacggtgtcaccctgctttattcccgcgttttcaagggctgtaataattccgcttgagcgcaaaacccgctcgaaatattgcagcgactcatagtcctcggggtcgatagtgttcataatttccattatccactcgcagttttcaacaaaatagaccccgtcgcaaacgcgtattgtaaagtcacgctttttcttgaccgtaaggtcttcaagcggcttcggctcggcttcatatttctttatgggcggcagctttgcaagctctgccgcaacatagtttataagctcgtccgtaccctcggcaatagccgccattaccgggaagaacttataccccttttcggtaaagtaatccgatatgcggcgaatctcttcatcatctgtcaaatcgcacttgttgcccacgattatctgcgggcgggtttcaagctcgctgctgaaaacggcaagctcgcggtttattttattaaaatcgtcgatcggatctctgccctcgctgcccgatacgtcaataacgtgcaaaagcagacggcagcgctcaacatggcgcaaaaattcgtggcctaagcccacgccttcgcccgcgccctcaataagcccgggaatatccgccataacaaacgagctgccctcgcccatacgcacaacgcccaaaacgggggtaagggttgtaaagtggtaattcgcaattttcggctttgcctcgcttaccaccgaaatgagtgtggatttacccacattcgggaagcctataagccccacgtccgccaagagctttaattccagcgttacgtcaagctcctcgcccgggttgccctttttagcaaagcgcggcacctggcgcgtaggcgtggcaaagtgctggttgccccagccgccgttgccgcccttagctattacaaccggctccgaatcggatatatcggcaattatcctgccgctttccgcatccttaaccagcgtgccgacaggtacgcttatgataaggtcgggcgcttttttgcccgagcagcgccctccgccgcccttttcgcccgattgcgccgtatatttgcgcttgtagcggaagtccgcaagggtagaaaggttactgtcagccttgaaaataatgtttccgcccctgccgccgtcgccgccgtcgggtccgcccgccgcaacatacttttccctgtgaaaggaaaccgcgccgtcgccgccgtcgcccgcttttaaatgaatttttgctatatctacaaacatattactctgttatttcctcttccggctctacctccgtttgaaggtatgcctcataaagttctcttgccgcatcgtaatttttcgccgcaacgtaaatattatcgggcacaactcccgcgcccaaaagcagctttacagagccgcctgcgccgtcctgacggcatataaacggtatgccgttttcctttagtatgtcctgaaatatttccgaagttacgggatttttaattaccgccgccaaaaccggctcgttttcgtccggctcttcttccttttttcttacccacttaaaaaaactcattcgttttcgttctccgcgtcctcaaaaaactcttcgtcaaactgcggctctgaatttaaaaattcctcataaattgtgtttgccgcgtcaaaatcctgctcgtcaacataaatatcatccgccacaaacgaaccgccgaaggtcaccttcattgtgccgtcttctcccgaatcgctgctgtaaagaatacccgcctccgtaagcagatccttcaggatctcagccgacacaacatcgtcaagcgttgccaaaagcaccgggttgttaattactttctcctctttttcctcttcttcggtaatttccgccgtaaggtcggcgccgcaaaccgggcaaagctccgctgcgtcgtcgcactcggctttgcaaacatgacaaaccttcataaatcttccttcctttctaaaaaataaatccgggtagcagccgccgcccggatttgctttttcttactgctcaacagcgtaaatgctgacctgcttgcggtctctgcctacgcgctcaaacttaaccttgccgtccaccaaagcgaacagagtgtcgtccgatccgcggcctacatttttgcctgcatggatgtgagttcctctctgacgaacgaggatgttgcccgccagaacgaactgcccgtccgtgcgcttaacgccgagacgctttgactcactgtcgcggccgttcttggtagaacccataccttttttatgagcgaataactgtatattaatctttaacatcaatctgcacctccgataattacgatattgctgccgtattccttcgacagctcgcttaaatgcagccgcagcccctttaaaaccgctagggtcttgtcgccggggtttgtaacctcaaagcgcatggagccgtcagatacatcagccgccgccttgtcgcctattatttcggttactgtattagccgccatatacgccgcggaggaaaccgccgcgcaaacaattttaccgagctcatcatcacagtttttcgagctgtgacccttgatttcaaagccgcaaagccctttttcatcggcaaaaaacttaaccttagtcataatcagccgatttcgccgatctgtaccttggtatagggctgtctgtgacccattttgcgggagctgctcttcttcggcttgtaagtaaatacggttattttcttacccttgccgtttttaagaacggtgcccttaacgaaagcgtcctttacataaggcttacct

SEQ ID NO: 2904 - DNA, 16702 bp, Unknown
  16S sequences of unknown bacteria
tcagcgacctgaacgacgagtcctcgagccgcaccggcaccgccggccacaacaaagggaagcatattggaaacaccgttcataaggtgcttgtaaatctttctgcccgctccctctccggtgtcggactcctcgcctgccccgcccgaatggcggtaaatcgaggttttttcggaaagcacgcggtttataagctcctcgggctttttaatgccgtcggaaacgggaacgcttataagctttttgccgtcaaaccgagccatttccacatttttgtcggcggcaatgattatgccgtcggcctcttcaatttcctttttggtgagtacgtttttggcgccgcccgagccgttggtttccaccttgacgggtatgcccattttctttccggcctgttcgattgcctcggccgccatataggtgtgggcaatgccggtggggcaggcggttacggcgagcacgcggtagccgtcctttttctcgggctcggctgctttagcctcatcgggatatttttcggtttcctttttgtcaatgacggcaaggaactcgtcggcggattttgcggcgagcagctcttttctgaaatcacggtccataagcatggtcatcaggcgggaaagaacctcaagatgaagatctccgtccattggagcggcaatcatgaaaatcagatttgacggcttgccgtcaagagcctcgtaatccactccatcgggcacggtgactgccgcaaggccgggatatttaacggcgtttgactttgcatggggaatggcaattccgtctcctaccgcggtcgagccctgagcctctctggcgagaatggccgatttataggccgaaaggtcgcttaaattgccgaccttttcatggagggaagcaagcaaatcaatggcttccgtctttgaaccgagcttttggttcaaaagaatactgtcttttttgagcaaatctgtaatacgcattttcatttcctcctgttttttattctccgctctgcacgctgtgcagtaattcataaattttgtcccgcgttccgagaccctcggaaaaggcggtggcagcgcccgcagccgttccgagcttcagggcgtattcataatccttcttttcggtatatccggcgataaatcccgcaaccatggaatctcccgctccgaccgtatccacggcctcaccgcccacggcgggcatatagtgggttttgccgttttcgtcgcagagcacggcgccctttccgcccatggaaacaaggacgttggaggctccctttttcacaagctttttaccgtattccgccgaaagctcgggagtttttatttcaactccgaatatttccgacagctcgtcgttgttgggctttataagaaaaggtttatatttaagggaatttacaagcagctccttggtggcgtcgaccacaaaatgcactcctctgccgtaaagtctttccattattctttcgtatatatcggagggcagcgttttgggaatgcttcccgcaagaatgaggacgtctccctctttaagcctgtcgagcttttcaaaaaggcggtcaatatccccctgctttatgtcggggccctgagcgtttatgtcggtttcttcaccgcttctgattttgacgtttatacgggtgattccgttttcgagtcggacaaagtcggcgtgaaggcccttgttttcgatgccctgttcaagagccttccccgtaaaccccgccacaaaaccgagggcggtggactcatgtccgagttcctttaatataaatgatacgtttattccctttcctccgaaaaaggcggtttcacgctcgctgcggttgatgctgcccttttccagctccttcatataaacgatgtagtcaattgcgggattgaatgtgacggtgtaaatcactttaaaacctccttaatgacggttatatcacggtacctctcgtcgggcagacggtcggtaattatgcaaacgtcgctgttttgggcgaaggtgacggcggcggtgcggttgaattttgaattgtcggcaagaatgtaggttatatagctcttttccgccgccgctctttttacacccgcctcgttgatgttgggagtggtcagtccgttttcaaggcttattccgttggttccgaggaaagccttggtgaagttgtaattcttaatggactcgacgcagcttattcccacaagagcctgggtggtcggcttgacctctccccccgtcagaatgacgttaaatccgcgctttgcaaggcggtgagcgtggagaaaaccgttggtaacataggtcgcgcccttttgctcgatataatctatgagtttttcggtggtggttcccgcgtcgatgaagataaggtcgttttgatgaataagtgttgcggaatatttggcaatggcgtctttttcggtcatgttaagcttaagcttttcccccacgtccggttcggcggatatgagttcggccgtcagcgccacggcgcccccgtgaacctttttaagcttgccctctctgtcgagagccgcaaggtctcttcttatggttgactccgacgcgtcgagcgcctcgcacagctctgtcacggtgaccgaccgtttttttgatatttcgtcaagtatttttccctgtctttgcgctgttaacatattatctcccgtttttcttttttcaaagctttgttggcgtttcatgaattatattgattgtttctgactgtatattatcatgcttttggttgtttgtcaagtgttttcggtcaaattctttcaaaaataatctatttttcttgaatttcggtcattatcggtcttttaattgctttacaaggataatttttccccttatattgccgaaaaatcgtatttgtgatatactgtttaaagaaataaactcatttgcagaggtgaaaaccttgaaaaaaacatacataaccgtgcttcccaatcatttcggcgcatttttaaaggccaacaagtgctttgcgaagctcggaataaacataacaagagtcagctataacaaggcaatcgactcccacaccctttttatcgacgcggaaggacctaaggaacagcttgaaaaagccgacatcgagcttaaaaaaatcggctatcttgaaaacaacaaaaaggacaacaccgttgtgctggcggaattcaccatagaaaaccgcccgggcagcgccaccgaaattctcgagcttgtaagccgatttaattttaacatttcatatataagcgccaatccctgcgccgacggaatgcaaatgttcaagctcggtctttttgtgaccgacaaggacaaatttttggaattcgtttcgcttgcccgcaagctttgcccggttagggtgttggattacaaccacgccgagcgaacctatgacaacagcattttttatcagtcctttgtggccggcctttcctcccgcataaagctttcgggaaaggcgcgcagcgagttgacggtcaatgccaatcttgccatgcaaaacctcgacgaggaggggctttcgccctataaaaccttcgacacaattggcagcattgccgaaatgctcggttccttcacgggagaaagctttcatccgagaattacccgcgaaaagctgaccgaaaacaccgaaatcgttcttatcgagcctccctgcggaagcaacacagccatactcataaacggcggcaaggcgctttttatagacggcggcttcgcgatataccgagaggaaatgctgaaaattttccgagagcttttcgatgactttgactcaatggaaaaggtcatgttcatcacacattccgacatcgaccactgcggtttgcttgatgattttgacaaaatcatcgcaagcgaggcctcaaaaaagagtctcgagcttgaatttgagggcaaggacaacttccgcgagcagaacattcttcacaagccctatataagaatttgcaaggcgctgaccggctaccgcccctgcgacccgcaaaaaattgtcgtaccgtggcagagccccaaagagctcaccgagccgctgacaagcatcggttttctcgatttcggcgatctgcattttgaggttttcgaaggaaagggcgggcacatctacggcgaaacggtgcttatagactatgtcaataaaatcgcgttcacgggagacatatacattaatttaaagggcttttccgacgagcagaaaagatttaaccgtctcgctcccattcttatgacctcggtggacaccgaaaagaaactgtgtgccgacgaacggcaggcgctgctttcccggctcggtgtcggcgaatggaaggttttcggcggacacgggcagaaaaaggattttaagataagtttggactgacaggtggttaaaatgaaacattctcttgcaatattcgatttggacggcacgattctctatactcttgtcgaccttaaaaacagcatgaatttcacccttaaaaaattcggatttcccgaaagaaccctcgacgaggtaagaagatttgtgggcaacggaatcagaaatctcatcatccgcgccgctccaaagggcaccgacgaaaagacaatagacgaaatgttcgaagtctttaacgaacactacgccgttcactgcaacgacaacaccaaaagctatgacggaatagacgagctgctcaaaaagcttaaggagcaaaaggtcaagaccgccgtggtgtcaaacaaggccgactatgccgtgcagacacttgtgaaaaaatatttcgacggactttttgattatgccgtcggcgaaaaacagggggtaagaaaaaagccctgccccgactcggtaaacgaggtattaagagtgcttgacacgccgaaagaagcggcggtttacataggcgactcggaggtcgacgtggccaccgcgaaaaacgcgcaaatggactgcattgccgtcgactggggatttcgcgaccgagatgttctcataaacagcggcgcaacccttattgtgtccgacgcggcggctctttataatgaaatataaaaacacaaaacccgacggctgaatttcaaccgtcgggtttcattattgtattgactcagttttccgaaccgtcgtcggaggaaccgccgttttccgaagcattgctttcgtcgtcggaaggctcgtcctttttggaaattttcggccagacaaggaggaaaaccacaagcagcacggccaccacggccgcaatgatgacgatgggattaagtccctgatcgcccgtcaccggatttaaaaggaaattcagcatttatttcctctcctttgattaaagttcgtcaacgattttcttggtatctcttgcgataacaagctcctcgttggtgggaataacccaaacgtcaaccttggaatcgggagtggagatttgctcctccatgccgtgccatacggttttgttgaaaggaacgtcgatcttcacgccgtagtaattcatgtgggtgaggatgttctcgcgaaggtggggagcattttcgccgataccgccggtaaagacgatggcgtcgattccgtcgagagcggcaatatagcttccgatgcactttctgatctgatagaactgcatatcgcgggcaagaatggctctttcgtcgccctcggcacaggccttggtcaaatcgcggtcgtcgctgtattttccggaaatgccgagcacgccggattttttgttaagaaggttggacatatccttgggggaaatgttttccttttcggccatgaaggtaacgaccgaaggatcgagggttccgctgcgggtgctcatcatgaatccgtcaaggggagtgagacccatgctggtatcgataaccttaccgtccttaatggcggttatggaagaaccgttgcccaggtggcaggtgatgagcctaagtccctcaaggcttttgccggtcagctcgctgtaacgggccgaaacatagcggtgggaggttccgtggaaaccgtagcggcgaaccttgtatttttcataatattcatagggaacggcgaacatataagcctcgggaggcatggtcaggtggaagcagttatcaaacacgacaacctcgggaacatcggtgccgagaacctcgcggcaggcacgaatacccatgaggtgggcggcgttgtgaagaggagcaagatcgataaggctttcgatgccttccataaccttctcgtcaacaagcaccgacttgtcgaacagggcgccgccctgaaccacgcggtggccgacggcagatatttcgctcatatccttgataacggcacattcgcccgatacaaggtttttctgaacctcgttgaatgcggcgatgtggtcgttcatttcgatttcatacttataggaacggccgtcgtgggtctttccgctgataattccgccgattccgatacgctcggcaataccttttgcaagcacgctttcgtcggtcatatcaaaaagctgatatttaagggacgagcttcctgcgtttacaacaagaactttcatatgttttctccttttccgttatacttgaaattacaggcataatattgtagaatagacttaccgatttattatagaacattgacttcgaaatttcaagtgaataggaccaaaaaaatgaaaataaccggaattattgccgaatacaacccctttcacaacggccacgcatatcagataaaggctgcaaaggaacgcggaagcgactgtgcggttgcggtttgcggcggccttttttcccaaagaggggagctttcggtgtgtatcaaaaccgccaaggcaaaggcggccgcggcgggcggagccgatcttgttatcgagctgcccctttgttacaccctttcccccgcccccgattttgccgcgggaggagtcaaaacaatcgacgctctcgggtgtgcggattttcttacattcggctgcgaggaggaaacccccgacagacttttcgatgttttaaaggctcttgagaccattgaaaacaccgacgccgtcaaaaacgctctcaaaaacggttgttcgctgccctcatcaaggcaacaggctctttttgaaattaaccccgaatttgcagatataatttcaaagcccaacaatattttggccctcgaatatatttccgcccttaaaaaaatcggttcggcggtcaccccggtagccgttccgcgcaagggtgctttgcacggttcgggtgaaattttcgaaaacatatgctcggccacaaagcttcgggaaataatgagaaacgacatacagtcggcagcgcaattcatgccaaaaggcagctttgatattatatcaaatgaagccgaaagaggccgcgctccccttgacatatcgcgaattgaaaacgccatgcttttttcgctgaggaaactcggtcccgacgacatttcgcagataaacggagtttgcgagggcatggaaaatctgatttgcgagggcataaaaaaacacacaagtattgaggaaattgtcgaatattgctcgggaaaacgatacacaaaatcgaggatacggcgtattttaatgtgctcggtgctcggaataacaaaagagcttgcccacgttttcccgccctatatccgcgtgctcggatttaacgaaaccggccgcgaggctcttaaaatcatcaaaaaaaccgcgtcggtgcccgtggtaacaaaggcctcggaaatacccaaaatttccgaaaaagcaaaagacgtttttgccgtcgaaagccttgccgccgaccttgtctccctcgcatttgacccgcccgaaaaaagcgggcttgagttcaccgaaaactttttctcgtaaattcattgttttttaacagaaacaaggtataataaagttaagcaaaaaagcaccgcttgcttaagcttgcttaaataaaaaggaggccgaaatatggccgtcaaactcaatcccgacaaggaagtggttcgtcttgtcaaagaagggcttaaaagaaccggcggttactgcccctgcagaacggcacgaaccgacgactggaaatgtatgtgcaaggaattcagagagcagataaaggacaaaaacttcgagggcttttgccattgtatgctctattataaatcaaaggactgaaaggagtttttttaaatggcggaaataaacgttaccgacaaaaattttgaaacggaagttttgcagagcgaaaagcccgtgctcgtggatttttgggcaagctggtgcggcccctgcatgatgcttgctcccaccgttgccgaaattgccgaggaatattccgacaaggtcaaggtggttaaaataaacgtggacgaggccgaaagccttgcactttccttcggcattgaaagcatccccacccttatggttttcaaggacggcaaggcggtcaataccgccgtcggcggccgctcaaaagagcagatcgtcgcaatgtttgaaaatctttaaacacaaagccaagaaaaaaggagtgttcgtcatgaacactccttaatttttttatgcagaaattttacttctcaaaacattgagaccgagcagtatataaatgattccggtcgcctttccggcaccattttgcaccctttcgtttttacgaagcagcgcatttgcaaaggacgcggcaaaggccagaacaacgctccaaatcgtgcttgtggtgaaaaaggtcaaccccaaagcaagaaacggcagcggtgatgaccctgcgctttgcgaaacaaactgaggcatcagggcaaggaaaaaaagcgccgccttgggattgaggacatttgtgagcactccctgacgatataccttcaaggggctttcgtcgagactttcggggtcggaatcgaaaagcggctttttgctgacaatggcctttataccgagaaagacgagatagcccgccccggcaaatttcataatgttaaaggccaatgccgattcccgcaatataaccgaaaggccgagcgccgcgagaagcgtgtgcacaagaataccggtggaaattccgagagccgaaatcacacccttttttcttccgcccaccatcgcgcgggtgaggacataaaccgtgtccgagccgggcaccaaattaagcaatatggccgaaaccacaaactgcccgtagtttacgatacccattaaagctcctcgggagcggacaaatcaagcacacagctcaaaaagtccttggttctttggttttgcggattcatgaaaacctcttcgggggttccctcctccacaatatatccgtcggacataaacagcaccctgtcggccacgtccttggcaaaacccatttcgtgggtcaccaccaccatggtcataccttcggcggcaagctttttcataacctgaagcacctctcccaccatttcggggtcgagagccgaggtgggctcgtcgaaaagcataatgtcgggattcatgcaaagggcgcgggcaatggccacacgctgcttctgaccgcccgaaagctgggacggaaaggcgtctgccttgtcggacagtccgacgcggtcgagcattttaagcgccttttccttggcttcctccttggtcatttttttgacgtcgacgggagcaagcataagattctgaagcacgttcagattgttgaacagattaaagtgctgaaacaccattccgatgttttcgcgcaccttgttgatattcacctttttgtcggaaatatcgaaaccgtcgacgattatggttccgccggtaggctgctcaagacggttgagacaacgcagaaaggtggattttcccgagccggaggggccgataacgaccacgacctcaccctcgtatatgtcgttggaaatatccttaagcacctcgatttttccgaaggtcttttcaagatgctccacatgaatttttacgttatttttattgacggccacggtttagcctcctttcgagaacctttgcaagctttgaaagggcggttattatgatgagatacataatgcccactataagccatgtttcaaaggatttgaaggttatggcgacaacgtttttggcgctgttgacaagttcggggaaaccgataaccgaaagaatggatgtatccttaagagtgatgatgaactgattgatgatgctggggatcatggttcggatggcctgaggaaggacgacctttctcatggacttccaatatgtcagaccgaggcttcttgccgcctccatctggcctttatccaccgactgaataccggcgcggataatttccgccatatatgcgccgcagtttaaagcgagacatatggtaccggccgtcagcgccgaaagggttatgttatttcccaaaacgtttttaaagaaatatggcactccgaagaaaacaaagaaggccagaacgatcatgggaacgccgcgcacaatgtccacaaagatctgcgcaatggctctgcacaccttgcttttgagcacactcatcataccgaacacaagtccgataatacaggcgaaaaacaggccgcaaagagcaagaagcagggtttgccccattgcccgcagcaacagttctccgtattgggtaattatggttatcacagacagagctcctttcagaatagaaacggaataccgaaaaaacggtattccgtctcaccgcgcaaaatctttgtcaaagcgcgttttgccgaaatttagccgagatatttgctgattatctcgtcatatttgccgtttgccttaatgttcttaagaccggcattgaacatatcaaggatttcctgtttgtcggagctgaacacggcaagaccgtagggggaaccctcgttctcgctgccgtcaacaatcttaaggtcaactccgtccttgatggaagccttcataatgggggtgtcctcaaagcaggctgcagcctgaccgccaacaacggcctgatacattgtgggagaatcctcgagaatggtgatctcgaagccgtactggtccttcaggctctcggcataggttttgccctcggttccgtttttgacggcgacggtctttcctctgagattctcaaaggaggcaatcgtcgaatcgggagcaacggccatgcactgggttgcggtgtaatatccgtcggagaatatccaaccggtggactttctcttttcggttatggatgcgccggcgatcatggcgtcggcctgaccggcctggcaggcggcgatggaagcgtcccaaccgaggctgttgagcttgtattcaaatccctggtcctcggcaatggcggccacgatgtcaacatcgatgccgacaaagttgcccgaagcatcggtatactcgaagggcttgaaaacggtgtcggtggcgatgacccaggtttttccctcggccttgccgtcatcctttttatcctcactcttgccgcaggatgcgaagcaggttgccgtcatggcgaccgcaaggaaaagagcggaaatttttgcaaattttttcatcagaatctcctccaatgtataatataatgaagaaattataccataaaaagcaaaaagtgtcaataatttaaaaggttaaagttctgtcacaatatcttattgacatatcagagcagcttttcgaagtattcggcgtaaattcttcccatgacctcggcctgttttttcagcggatgaaccccgtcctcggaaaactccgaaagatttttgccgcagtattccgccgcgagcagcccgtccatagggcaaagcacacagccgaattccgacgcaagcgccctcacggcgacaatttcctcatccaccttataccgccaaaaggccttatccttcacgggaagcaaaaagggctcgacaagcatgatttttgcgcttgttttctgctttatttcggtgagaattttgcggtaattccgctcgaaaaccgaaacgtggcggaaatttcttttttcggcaaaatgccagcaatcgttaactccgaccaaaatcgaaagataatcgggctgctcggcgataaaatcgctgtcgagacgggctatgagatcgtcggttttgttaccgccgatacccaaattcacaaactcaaaatccgcatcgggatgatttttcgcgataatttcggcggcatatttcggatagcccggcccgagatcgtgtttatcttcataatttctgccggcgtcggttatgctgtcgccctgaaaaaggattttcattttattcaccttcatagtttgatttcaacgggatcttctatcaccatggatttcggagtgacggcgcagtcgaaggcgagtatttcaacccccgcctcttttgccctcaaaagcgcatcggcgaattccggatgagtttcccgatttggcataaaagcacttatttccttcatctgaatcacaaaaagaatatagcagtcgaagccccgctcctttgccgaaataagctcgtttatatgttttaccccgcgcgtcgtcggcgcgtcgggaaaaagggcggttccgtccttttcaagggtcacgcccttgacctcgagaaaggcctttttgccgcagtcctcgacgtaaaaatcaaaccgtgaattttcaaatttgacctcacggcgaatttcggcgtttttggaaaaaacattgccctttttaagccattcttcggcggcggcgttgggaatttgggaatccatatttatgagaagcggcggtttaccctcccttttcttctccaccgccgtaaggtcataggcggttttgcgattgggattttccgacctttcgagaaaagccttgcagcccggcacaagaagttccttacagcgcccggtgtttttaacgtgcaccgtctcggtctttccgcaaatttccaccgtcgcctcaaagcggttgagccgctgtctgaaaataccgtcggttatgtttttatagttcacttcagcttttccgcagctcccttaagacgggaaacgacctcttccctgccgagcagcttcatgatctcataaagatcgggggtgtttcttcttcccgtgacggcaacgcgcaaaacggtggaaagatcgcccacatggcccttaaaggcgtcgggattttgcttatattccttgacgttcgggcaaaagccgagaggctcgcacagcgcctttatgcctgcaaaccagccgtccttatcggcagaaccgtcatagctttcggcatatttttcaagtatttcctttatgtccgccgacgaaagattttccggcatatcgaaggcggcgggagccgaatagaaatattcggtatattcgggcacctcgctccactttgcaatgtcctttcggggatttttacccgaacggtctatcgtgaaaataaaacgggaaaactcgggattcgaggtaaaggttttgaaaaattcggggtcgttcttttgcgcccatgcggcgatttgttcatacatctcgtcggccgacatacccgaaatgacgtttttgcttacatcgtcgaattttacaaggtcaaaaagcgctcccgaagaggacatttttttaaggttaaagggaaaatcgtcctgagaggcggttttatttaccttgtgccactcctcataattggaatttgcaagggtgagcagatattccctcaccgaaacggctggatagccctgctcaaaatagaaggaaacggccgcctcggggtccttgcgcttggaaagcttgcgtttaccgccgtcctcctctttcataagcggagcgatgtgggcatatttcggaggtttaaatccgagcagcttaaacagctgaaggtgaacgggcgccgaagcaatccactcgtctcctctgacaacatgggtagttcccataagatgatcgtccacggcgtgggcgaaatgataggtggggattccgtcggtcttgagaagaacgatgtcctgggtgttttcgggcatctcgattttgccctttatcatatcgtcgaaaaagaccttgccgtcctctttgcccggcgaacgcagacggagcacatagggctttcccgccttgatattttcctttatctcatcaaagcaaaggcctctgcagcgggcatatttgccgtaatatcccgtggtctttttttcggcctcctgctgctttctgacctcgtcgagggtctcggccgagcaaaagcagggatatgcaaatcccttttccacaagggatttcgcaaaaacatgataaatttccctgcggtttgactgacggtagggaccgtattcgcccttttcctcggtttcggatatgactccctcgtcaacggtgcagccgaaggccgcaaggtctctgagaattccgctcacgccgccctcgacctcgcgctttttatcggtatcttctattctgacataaaaaacgccgccggtagtgtgagccacccgctcgcttataaaggccgagaaaagatttccgatgtgcataaatcccgtggggctgggagcgtaacgggtcacccgcgcaccctccttaagctgtcttttgggaaaacgctgttcgcattgttcgggagtttcggttatatcggggaaaaggagcgccgcaagctccgtgtattcattttctgtcatttttatcaatccttttagaaaatcaagtcgcttaagcaacctttgcataagctttgcgcggttgcttaacatacggtgttattataccataccgccgccgtattttcaattataactttaaaaggcctttttgttgtaaaattattatatgtgtggtacaatatacatgaaaatttttccgaaaggaattgattatatgaaacttatgtttttgggcgccgcccacgaggtcacaggttcctgcacccttcttaccgcctgcggtaaaaacatcctcatagattgcggaatggagcagggtcccgacacatttttaaacagcgatattcccgttgcccccggtgaaatagactgtatacttctcacccacgctcacattgaccattcgggaaagctgccgctgctgtgcgcccaaggctttgacggcccgatatattccacaaaggccacctccaagctttgctccataatgctgctcgactcggcgcacattcaggagtttgaggccgaatggcgcaaccgcaaggcaaaacgcgccggcagccacccttacgttcccctttacaccaccgaggatgcgcaaaactgcataaccaaatttgtcggctgcgactatggcaaaagctatgaaattgccgacggcatttcggtcagctttatggacgcggggcatctgctcggttcctcctcggttatattctcggtcaccgaaaacggaaagaccgaaaagctcattttctcgggcgacatcggaaacgtcgaccgtccccttatccgcgaccccggcacccctcccgccgccgattatcttgttatcgaatcgacctacggcgaccgcctgcacggcgagcgtcccgattatgtggatcagctttcgaaaattcttgaggaaaccttcgcccgcggcggaaacgtggtcatcccctcctttgccgtgggaagaacccaagagctgctgtatatcataagagaaatcaaggaaagaggccttgtaaaatccattccgaattttaccgtctatgtggacagccctcttgcggtggaaacgacccacatctacggcaatgacatgaccgaatattatgacgacgaaacccttgagcttgtgaaaaagggcgtcaacccgatatactttgatggccttaaggtagcggtgacaagcgacgaatcgagaatgataaacgacgacaaaaatcccaaggtcattctgtcggcaagcggaatgtgcgaggccgggcgtatccgccaccacctcaagcacaacctttggagagccgagtccacgatactttttgtgggttatcaggcggtgggcaccctcgggcgcgcaatcgtcgagggagaaaagcaggtcaagctcttcggcgagcccatagaggtcaaggcgcacatcgaacagcttgccggaatttccggacacgccgacaaaaacggactgcttaaatatgccgcggccgccgcaaagggcgcaaaaaaggtatttgtaaatcacggcaacgaccctgtgacaaccgagtttgccaaaacaatttccgaagccctcggcgtcgaggccgtcgctccctattcgggaagcatatatgatctcgaaagcggactttgccttgcgaaaggcaacagcacttatatcgaaaagcccaacaaaaaatccaattttgccgcttctccctcctttgaacgtctcaccgaggcctccaaaaagctccaactcgttatcggaagaaaccgcggcggcacgaacaaggatctggctaaatttgccgatcagattttggcgctgtgcgagaagtgggacaggtgacggcatggctgacaaaaaaaccgtgacaatatacgacgtggcggcggcggcgggagtctccatcgccaccgtaaaccgcgccttgaacaacaagccgagaatcagcgagtccacaagacggcttgtcataaaggtggccgaggaactgggatacacggccaacaaggccgcacaggctctttcccgaaagaccataaaaatcggaatcataatttgcgataccattcccgaggttcagcagggaattctttcgggcatgaaaaaagcaatatccgagctttcgacccttaacgttcaatgtgaaatatattttgtcgaaaaaaaggaaggcgaccgcttttcggaatataaaaagggctttgacaaattccgcagagataacgtcaacggcataatcatctttaccggcgaccagc

SEQ ID NO: 2905 - DNA, 6317 bp, Unknown
  16S sequences of unknown bacteria
ctatcgtcagatttgtttttgcgtttttgtccgtaatattttttgcggacactgcacttatttttatgagaaaaagctacacattagggctgtttttaatggttttagccacagtttttctcgttttcgtcaccatattttacagcagggtaaaaggtttttgcgctgtcggtttcggcaaatttttaaagtatctttttgtttttgggcttgtttgccttttagccttttctgcatttttatatgccaaagcaaaaacctcagccgacggcagtgaaaaggcggttatagttttaggttgcggtttaaaccgggacggcacaccttcgggcactttgcaaaaacgcttagatggttgtatcgactatgccaaaacaaacccggacgcctatatagtggtaaccggcggcaaggcgaaaaatcgggatattaccgaagccctggctatgaaaaaatatcttgttgccaatggcattgacccggacaaaataatatgcgaggaccaagccgtcagcacaaaagagaacttcgtattcgcaagggaaattttgcaagaaaaaggcatagagcccactaatatagcctatatcacaaattcttttcacgcctaccgatccggtgagtacgcaaaactggcaggttttaaaaatgtaaaggccataagcgttgccaccgacccggttgttattattccggcaaccgtaagagaagttttagccgtaacggctttatggatttttgaaaaataaaaggaggtttactatgaaaattctgcttaaacacggaaatcttatcaacgaaaaaggtgatattttaaacgacaccgacttgctgataaacggtaaagtaatcgaaaaaatcgaaaaaattatcaccgacccggcagatgaggtcatagactgcaccgataaatttatcactccgggttttgcatctatgcacaaccacagccctatgaatatctttaagggcattgcggaagatgtaaacatagacgattggtttaacaaagagatttggccttacgagagcaaaatgcaggacgaggatatttattggggtgcaaaacttgcctgccgggagatgataaacaacggcataaccgcctttgccgaccactattttaaaagcgacttaatagcaaaggcctgcaaagaaatcggtataaaaggcgatatagcctacacgattttcggctttggcggagattgtcaggaggagctggctcttgcggagaaattctgcaaagattaccaaaatgaccaatgggtaaagccccgtttaggcccccactccccttatatgtgttcaccggaagttttgcaaaaaatcagtgcaaaggcaagggaacttggcaccggcttgcatattcacatcagcgaaaccgatgtgcaggtaaagcaaagccttgaaaagtacggtaaaacgcctttcgccctttgccgggaaaacggtgttttcgatgtgccttgcatagtcggtcacggtctgtggctgcaagaggatgatttgcaatatttaaaagacaatatgtgttttgccgtatccccaaaaacctatgcaaagcttggaatgggtatgggcaatttgtggaagtaccgcaaaaaattaaatatcgcagccggcaatgacggcgccgccagcagtaacggcatagatgttgtggagcaaatgcgtatgtttgcccttatgggtaaattatatgacaacgccgaggattttacccttaaagaaatttggcagtatcttataaacggccacagatttttgccctttaacagcggaattcttgccgccggctatgatgccgatttgaatatttgggatttaaacaccgtttcaaccgcaccgatttataacccactggcggcgataatctactcatctgtgccaagcgtcaacataaaaacggttattgtaaacggcagatttgccaaaaaggacggcaaactttgctttgatgaaaaagaaattattaaaaatgcctctgcctgtgcaaaagaaatttacaagcgtggcaaaggcaaaacaaaattatatttttaaaggaattatattatgataagagattttataccacaggacaaagaagaacttatgaagatggcgaaggatttttacaacggcccggcagttttataccccataccggttgaaaatttttcccactgttttgacgaaattataaaaggcaaccctatggttcgtggccttaccatattacatcggggggaaattttgggctattgtcaactttcctttacctattccagcgaggcagacggccttgttgttttaatagaagaactttacattaaaccggctttccagggcaagggcgtaggcaagcaggtattcgattttatcgaaggcgaatatagcggcaaggccaaaagataccgccttgaatgtgaacatgaaaatgtaaacgccatgaaattgtacacacgccttggctataccgaactgggctatgtacagatgattaaagaataatattatatagtatttataaggaaattaagatgaacacacctgtaattataggcattgccggaggcagtgccagcggcaagtccacatttgccagaaagatagttgattattttaacgagcctatatcggttctctgccatgactactactacaagccgtttaaagaaatgagctttgaagaaagaacaaaacagaactacgaccacccgtcaagttttgacaccggtttgcttatcaaacacttaaaagctcttaaagccggtaaagcggtgtatcgccctacttattcctataaaaatttcacaagacttaaagacaccgttagagttgagcctaccaaagttatagttgttgatggtattttgatttttgaaaacgaagaactccgcaaccttatggacataaaaatttttgttgacgccgatgacgatataagatttatccgccgtatgatgcgtgatgtggttaaaagaggcagaaccgttgacagtgttgtaaaccagtaccttacaaccgttaaaccgatgcatgacagctttgtttccccaagcaaaaagtatgcaaacattattgtgccggagggcggagaaaacaaggttgcccttgacatggttacaagtaagatcgaaatgattttacaagacaaaaaataaagtaattttatataattatatcaagacggttctccgttaaaacggagaaccgttttgtcttaacatatgatgattgtcaattactgcgatatagcctgtttaaattgccatatattatcgtaattttacaggttttgcttttcttttaaaaaaaattcgcacttcaatttgaagtgcgaattgccgtatttgatttttatgaactccgcaataaatttgccaccgcaaacattgcgtcccaagttttgctgtcaaatgcctattgttttattcttctttatttctctttttcaaaagaataagtaagaaaatcaatgccgcaccggcaataacaagaggaacaatcgggaatgatgatccgttctctgtctgtgccgcactgcttgaatccggtgtagtgccaacttcctgagttttgtcactgctgtcggcctttgtgtccggcttggatgtgctgtcgttttcatctttgatttcggatgaagtttcatcttttgtttcggaagaaacatcggaattccgcttatcctttgtaggatacaaaggagccgaaatcgttgaggccgccttaacagaaatttctttctgccacggaccgccgcagtaatcacaaatagcctgctcaatgcctgcctcttttgttgttgcggcttttacaactttccattcaccccagtggtggcctgttgcacttattacaagagcagatgcgcttacttcgttttcggcttttgcgtcgtcaaacaatttaccgcacacttcacattcataatgtgcccttgtgccgtctttttcgcaaccggcggatacgccggcaacaaattttgtcttgtggcccaaagcgtcaacaatcacaccgtcttttgtagtttctgttttaccgtctttgtcaaggaaaatcttgccgcatacagaacattcataatactcttttacgcccttttctgtgcaagtggcctttacttcttcatgttttgccatgctgtgacccagagctgaaattacaagatcttcttttgtaacttctgtttcgcccttttcgtctgcaaaaattttgccgcatgtttcacactcgtagtattcctttgtacctgtttctgtacaggttggctttacttcttcgtgctttgtcatgctgtgacccagagctgaaattacaagatcttcttttgtaacttctgttttgcctttttcatctgcaaagattttgccgcatgtttcacactcgtagtattcctttgtacctgtttctgtgcaagtcggttttacttctttgtgctttgccatgctgtgacccagagctgaaattacaagatcttcttttgtaacttctgtttcgcctttttcatctgcaaagattttgccgcatgtttcacactcgtagtattcctttgtacctgcttctgtgcaagtcggctttacttcttcgtgttttgtcatgctgtggccgagaggtgcaagtgtaagagctgttgtataaacagcctccttgccctctgcatctgcaaacagcttatggcatgatgtgcattcatagtaagcctttgtgccgtattcggtacatgtaggttctgctttttcgtgttttgtcatgctgtggccgagaggtgcaattgtaagatctgttgtataaacagcctccttgccctctgtatctgcaaacagcttgtggcatgatgtacattcatagtaggcctttgtgccgtattcggtacatgtaggttttacttcttcgtgctttatcatgctgtgaccgagaggtgcaagtgtaagatctgttgtataaacagcttccttgccctctgcgtctgcaaacagcttaccgcatgatgtacattcataataggcctttgtgccgtattcggtacatgtaggttttacttcttcgtgctttgtcatgctgtgaccgagaggtgcaagtgtaagatctgttgtataaacagcttccgttccctctgcgtctgcaaacagcttatggcatgatgtacattcatagtaggcctttgtgccgtattcggtacatgtaggttctactttttcgtgagcaaccattgaatgtttaaatgtattataaacaagctcttctttggttacctctctcatgccgcctgttgcattctccaaaaagagtttaccgcagttttcacataccaaatgttcttttacaccgggcttgtcgcatgatgtaggctcaacttctgcaataactcttgtaaaatggtcggtagccggttttacggtatccttttcctcaatggcaacaacatcgcctgttgcggttactttaaacaaaccgccgcataattcacacttagaatatgcaatgttgccccgttcttcacatgtagcatcctttgccggtacatctgtcaatttatgttcctgtgccggtataacaagttctgctgctgttgtttcaacaagtattgtaccttcttctacaaagagcttaccgcatttggtgcactccttatgtgctttaacacctgttgatgtgcaagttgcagatacttcttcaacatctttatatgcgtgacccttggcaggtataacaacatcttttgcttttacctcaacagtaattgtaccttcttctacgaaatattttccgcagtctttacactttgagtattcaatgttgcctttctctgtgcaagttgcctcttttgcggcaaccttttctaagtcatggtcaagcgttttaatttcaagtgatgatttgtcagtaaccggctctgttattgtgccgttttcaactgcccattcaccgcatactttacattcaaggtgtgctttaatgcctttttcgctgcatgtagccggcttttcggctacttgtttgtaatcatgagctttttttggtgatatgtaatcactttcatctattttttcaagacccaaggcattttctacaaaagcaccgccgcaaactttacattttgagtattcaaagtctacgccttcttctgtgcaagttgcctcttttacggcaaccttttctaaatcatggtcaagcattttaatttcaagtgatgatttgtcagtaaccggctctgttattgtgccgttttcaactgcccattcaccgcatactttacattcaaggtgtgctttaatgcctttttcgctgcatgtagccggcttttcggctacttgtttgtaatcatg

SEQ ID NO: 2906 - DNA, 2951 bp, Unknown
  16S sequences of unknown bacteria
actatgaaaaggcggtgatctgggccagcgccaacggcgtggtctacggcagcaatggcaagtatgacccggacggcaagatcacccgggagcagatggcagccatgatgcggcgctacgcagccttctgccagattgataccagcgaccgggcggatatcacgagctttggcgatgccgcacgggtcagcagctgggccagagaggatatgcgctgggcggtcgcggtcaacctgctctacggcagcggcggcaacctgaacccgacgaatcacgccacccgtgccgaggcggcatcgattctgaagcgctttgcggtcaatattctgaagtaagcgctgcggcatttcccttcgtacttttacagccggtccggcagggggccggccggctgtgaaaaatttaaaatatggaggtccaaatgaaaaagagaattcttgcggtacttttgtgctgcgctatgctcctgggcgtcctgccgatttttgcgcaggcaagcgacgtaccggccagtgactcgctggggacggtttatctttccatcagcgatgatgcaaagtacgccgaaggcaacgacgacgccgggacgatcatggcctatgtgccggtcagcctggatgaagtcgcgaagattaagctggaggactataacctgagcaagtatatcatgctggacaaggaaggcaatgaaacggtcacagtcttgcacctgtttctctatgcactgaaaaacttctacggttcggttgatgaaaaagcattcacggctactggcgcccctggttccctgtttatgacggcgttctggggccatgactgcaacctgacgtattatgtcaacgcggagtatccggaagccagacctggctggggtgcgacggcggatattattcccctcaaatccggtgacttcattgatctttccatgtataccagttgggcattctacagcgacgacgcagctggctatcattacttcctggatgcggatggaaaaatcacgcacgactatacgacagatatcacgcaggcactgccgatcagctacgggcgtacctggggcgggatgggcggcaaaaccgtgacggtcccggagacaacgggaaccctgtactacagcaagaccttctatgacaagaacgcccagtctgttacagtcgatgccgagggcaaggcacagattaccttcccgtctgatggcacctggtatctctgggctgacggcagctacggcaagagcgccggcaatgaggatgcgattgtctctgctccggcgtatgccaaggtgattgtcacgaataaggataaggatgcagcgcaggccgttgcagatctgatcaacgccctgccgtccgctgcgaaccttacgctggcagataaggacgccgttgcagcggcccgggaagccctttcggccctgacggaagcccagctggcctacatcagtgacgagacgctggcgctgctggaaaaggcagaggcgaagcttgccgcactggaaaagcccattccctttacggacctgacccaggattggtatcaggagagcgttgcctatgtctatcgcaataacctgatgtacggcacgaccaacacgaccttcagcccggatgcaaacctgacccgcgccatgttcgcggcgatgctgtatcgcctggcgggcagcccgcgtgtcgttggcacctgttccttcccggatgttcccagcaccgcgtattatctggatgctgtgatctggggtgaaaagaacggcgtcatttacggcgagggcggcaaattcaatcccgatggcaagatcacccgggagcagatggccgctatgatgcgccgctatgccgatttctgcgagctgaagaccgatgcccgagcagacctgagcggctatacggatgccgccgcggtcagcagctgggcactgaatgatatgaagtgggccgtcgcagagcacctgctctatggcgataccaacagccgcctgaacccgacgaacaacgccacccgtgccgaagccgccgcgatcctgcagcgctttgccacgcggctggcaaagtaacgggcgggcaacgacacttgcaacaggaaccaacaagaacacacaaaaggggctgcctcccaaagaggcagtcccacattttttgttttattttattgataaatcaagaaacaaaacgcggcaggcgagtttgcctgccgcgttcgcgtatgataaaattgattttgcaacttttttgcgatttggcgcgatcagcacaggccgtggcgatgcatgacctggcgcaggttttccagcgcgggggcggacatttcgcccagcggcaggcggcaggggccgacagggaagcccgccaggcacatggcggccttgataggaatcgggttgacctctgagaatagcgcgtcgatgagatccatggattcgttctgcagctttgcagctctgggataatcctgggcaaggcaggcgtctgtcatctggcagacgagctccggcgcgagattggagagcacggagatcacgccccggccacccagcgctaggatggggacattctgatcgtcgttgccggaccagaccgggaaatccggcccgcacagggcaatcgtccgggagacctgggcggtattgccgcaggcttccttgaccccggcaatattcgggtgctttgccaacgcggcatactggctaggcgtcatgtgtacgccggtgcgggaggggacgttgtagagaatgacagggatatgcaccgcgtcggccagggcggtataatggcgcagcaggccgtcactgttgcatttgttatagtagggcgtgacaacgagcagcgcgtcggccccggcggcctcggcggctttgcttttttcgatggcgtggacggtatcgttggtgccggtaccggcgatgaccttgcaggcgccgtttgccgcggcgacgcagtgggcgatgagggcgg

SEQ ID NO: 2907 - DNA, 7617 bp, Unknown
  16S sequences of unknown bacteria
ccttgttgcaagcggtaagaaccgaaagcgacaaaacaagcatcaacgctattgcacaaaatgtgaagatcgattttcttttcatgatttttgtctccttttttctaaattgatttatttcaaaccgcaaatcaggaattgcgttctaaaaccgttaataattttccgttttcgttcgttaaagtgcgtcgattgcgtctgcaagatagtcggacgggacggattcatagaagaatgcgtcgatgctgccgtcttccttggcgcatttgactttgtatgcgctgctttcatccgacacgttgtcgcaaagaagcgcaattttgatttcggggttccgcctcctggcttcacgcgcggtgttcattcgcatatcgaacgtgccgtcgcccgaccttgtaacgtccattacaagagttgttaccgcaagcgcgttcgtcagcgtaaggatacgctctgtttcctgcgaagaagatttttccacaaagaaccccgcacgtttcagggcgtttgtcaccgcttccaaaacgagtctgtttctgattgcaagtacgactcttttcatttcatatcctttctcctttacgtacactacgcctgattttacattttgcatatatatattatcatagggaatatgcggttggggagtgccattcggcacccctttggcaagttttttatacttttcagaaaaaatttttgcaaaaaaaaaagacagccgcgggtaagcgactgcctgttgctgtatatttgattgcattatcggtcagatttcgtcgtcggttttgtcgagtatcacaagccccgattctcttgctcttacggcaagttgagtgcgggaacggaaacccgtcttaaacagcatatccgcaacgtggtttttgacgacgcccgaagaaacgccgagtttttcggaaatttccgtattgctgtatccgcccgtcataaggcgcaggatttcaagttccttttcggtaaattccgtactgagtgcaagtcccattctgacgggttgcggactgtcgggatagacgatttcgccgcttactatccgttccatcagcgacagaatcggctgttcgttcacttccttgtaccaaaagccttcaacgccgatttgttttgcacgctttatataggaacactcaggcatactcgtgacgacgataattttcgttttcgggaatttcgccttgatttttgccgccgcttcgagtccgctttcgccgttttccgtaaccacgtccatcagtatcaaatccacgggcgtgcgagtgcagacaatatccgcaacggaagcgttttctatcgccacttgcagatagaatttatccgacgactccacaaaatgcgaaaagagcgccttcggcatttgctgatcttcgactatcatgactgagtattttccgtctttcataaagtttctccttgcggcagttcgataatgagttcaaattgcggtgcgctgtgaataatcatcgtgccgttttccctttctacaagcaagcgaagccccgaaagtccgccgccttctatgatttcgcctttcggcttttcgccgtcgttggtgatttctatcgtatatttgccgtttttttccgataccgtaaccgtcatcgtcttaccgtttgcgtgcgaaacggtgttcgtcagacattcgtgcattgcggcgatgagtattttttcgcttaccgtatcggctttcggcttttcgccgcaaaaatccacggttacggcaacgagttttgccgcgtcatttatcacttgcaagttgtctttctttgtgcgcggacgagtgcttttcaatgcggcgatttccgcttgccagaagcatatcatttgcttttgctcggttttgtcaagcggttcggcaagtctgcgttttgttgcaagcaagagtttgcccatatcgtcgtggatacggattttcgccgccaaaagttccttttctttcgtgaggagcacaacgttatccccgtatgcgacaaggcgtttgttgacggctttcagttcttcgagtttttgctctaactctttggtaagacggtatctttctgttacgtttgccgcaacgatttcgtaaacggttttatcgtctatctcatgcgagtatctcttgaacgataccactttgccgccctcgtattctacaataggtttttctcccgtttgaagcggcagacagttttcttctatttcaccttgcgagatcttccgccaaaaacttgcgccgtccaaaagtgccttacctgttgcaagaacgcaaagacggttcatttcggtattgaaaaaccgcacgagtccgctttgctcgtaaaaacatattccgacaggaagtgtgtccgcactctcttttatggataccggcgagatgtgtttctttttccaaagcactgcgctgacaagtccgtaaatcgcaagagcgagcaacacgacagcaacaacgcaatgcaaccatagcggcaaagaaatgatcgtgagcgacggctcgaatacagattcccctacacgatagagcttacttccgcacattgtaaggaataccgatagaaacgacaatgcaaacgttaccgccggcaaaacgatatagcggcgtttcttgtaaaatctgaccgacgcaaacaacccgataatcgccagaacgaacgtgaaaataaacgaaacgacaatcatctgtcttacataaaacggtgcgtctataaatctcatacagcacccccttcgggcaaagtaagcgagtaataaacttcttcgtcgtccgtttgaattgttacgttgtatttctcaaatttcgattttactttctccgaaatttctttcgctttattgtcgcattcgatacgcaaaacgagattatcgccacgcctcgaaagacgaacgataacggcactcggtagtccctcgtaatttgcaatgcaggcttggaaaaagtcatagaaaacacctgcgtttttgccatagattttacccgaaacggcgcaatcgaaagtgcattccgcacccgtaagcgaaagaaacccaagcgattcttttgtcgcaagcgacagttcgcccacgtctatattttcctgcttttcggcaagcataacaaggttgcttctgcgtttgatataagccgccaaaatgcacgcaaaacgcattttatctatatattccgtgctgtttaactgcgttttgtggtacatatccgacaaaagcgcatcaaggcgtttcagttcttcgcaggtaacttcatccatctttgcgtacagtttgttttgctctgcaatctgcgctttttgctctttgagttcgttctccgcttcgatgatataattttcttcggacagtctttcgttggtttcggaaagtgccgcgtttatctcgttgaccttggataaatcttcgattctgaaaatatatccgccgtgtattttttctgctgaaagccgtgtgttttcatctatcattacggggctttttgccgcacgactgagcaggtttttatccgtggaaatcgacttttcggagtcgtatatcacactcaaattctcatccgtgataaccgccgaatatgccgaacgatagaagtaattttcgtattcgtcgttggacggaatcaaacctatggcgatacaactttctatcattacgatacaggtaaagcacaacagttccgggattttgaacgccggcgtatccgtcaaaaagcatacggtggaaacagctacgcacacaatgaaaacggttacgggtatccacattttacgcctgcacgccgatatgccgcagttcaaaatcagcacgataaggcttgtaaacgttacggcaatctcccacgcgagcgcgatataatatacggttctatgctcgtaggaaaaaccgttctcaaagttcaaagcgaacgcccattcgtgtgcgtcgtttgtgaatatcagaagaagcaatatcacggcgggtaaatataagagataccacgcttttgcgagcggtttgccctttttgctctctatgctgaacgccgcaagcaaaatcgtcggcggaataaacattcgcggaacgtagtatgcgtaccaaagatagcgcgaaagggcgtctgtgtcctttgtcagtccgtaccttatcattcgcaccacaaggaaaaacaaaatcagcacggcaaccgtaaggaaatatgcacgcagatctttccgcatcattctatgtataagagaaacgccccacgccaccacgagagaaatcagtatcgtgtgcgccaacaaagcaaacagggcatgccaaaaatcaggaaggctcgaatctaccgcctgaaatacgcccgctaaacaaaagaaaaacgcgcatacggcatatagaactattctttttttgttaacagcagtccgcatttcagcgttcctccttttcgttagttacttatattatagcatatttttccgattttttcaatccattccgccccataaacgaaaagtcgaatcgcttgctgtcaaccgtttaccactcctgattttttatgttatccgctatattcataatcggcacgccgagttcctgtgcgtacttatagcatttatacgcaccgccgtaatcacgcttgatatagacgatcatcatatcgcagttctcggcaagccatttgttacgttcccctatcgccgctttgtaatggcacttcctatcggtcggaataataacgctatcataagacttctctaatttttctcaccgtaaataggaaatcacccctcgaaacggcataaaaaaagagagaacgtttatccttgttctctcttaaaagatttgtattaaattgttggtgtcaggcggtaattaaaacgaagtcgtcagttcaagtcctgtttttctgaaaaaatgccgaaatgtagctgttaaattcaaagatttcgcaaggtgcgcaaaccacaagatatagaaacaaaaaagcacaagacccactaaatcttgcgcttttttgttttgtagctttttcgtactacaaagatgcgaaagacttacaaaaagtacggatttcccgcatccatcaggggcccatgaaggaaatcagatcgtagcctttttctttgcccaccttcatcatgtattccagccgatagactaagcgccggtagaaatcgataatcagttttatttccgtatcgtcttctgttggtctgttgtcgttgtacgccttaatctgttcgtcagtaaggttttttgcatacagcaactgatatgtcgcagttcctcttttttctcttagcttcgccgtgtactcgttttttcgccctgtagaaagcgcgtcgattgtatcgttgatgtccgttaggatttttgccatagcttcataagtatagaagttatgtgtcaaataccactcgaaaccttcaacgcatgaagtatgctctttgccgtcttcatccacccatttttgataatctctccatttgtttgcttcgagatcttgatcaaagtatttgtacagaaatggcgtcagatactgtgcgacatcgtcttcttcgattgagatttcgatgcttctcattgccgcaatcgtgtcgatgtcgtttgtgttagagtggtcgacaaccctaaccggcatgatccaaaaatacgatgaactattatgcccatcgacaatgcctatttccttcttgtaaatgtctctgccgattacagccaagcttaacgctttagcctgctcaaccacttgttcatttttcaaatgctgtgattgtgcgttatcaaacagttccctcaacttggtatatgatttttcgcatatatccgagtctaaaagaaaccgatgtacggtgtgataaatattctcgtctgacatgaacggaggatagtcttcgccgagcaaatcgagcatgtcactgatgtataattgcgacggtgcacacaatctcataaaatcagtttccttttgaggaaagattcctttcattgcctcgatgagttcttctttgctgacttcatcgtaattctttactgtaatgctgtcattacctgcatttctgtatttttgccaattatcgtatttcggattataaacatagtaaatatatccgtcatgcgttacaaaaagaagattctcttggtagaattttacgacttcaaaaccatcaaacagtttcatgtcttcacctcgcttctgtggttttctcgctatcggattatctgataatactcttttccgaatggcatatctctgacaatcgttttgtctcttatatgaatgtcccttgaaatgtcctcgaacaatttagtaccgtccttcaaatacagttctgcagaataatcccaattcgtgctttttgcacggatataataccttgttttatataatatcaaatctcacggcaaatttcaactactttcagcaattttcaaaataaactttcccgaatgtttgtgtttgtttcactcggacaaaatctcatttttaaggcaattttcaaagcggtgtcaaacgataagtacttttcctatataaaaatccttaatttatttcgccctgctttacattgcgcagtttttttaagttttccaaaacaaatggactatttgttgcgatgcgtcccagcgccggacatccgtccatctgcccgcagtcggcgcaagaatctaattccttttctctaacgcaattatgtacggggcaaaatttgtcgcagaaaggcgtttttgcgcctttgattcggcatcctgtgcagttaatcatttcgggagtaatcgtcaccccgttgagctttgtccacagcatggcagtcttttcacgcaaagcgctatcgttcgtaatcgttgctatccgcgcgtcgcacttttcgcagtccagtccacaacaacctataaattgatttgtgtatttcatagttgcctccataaattgaaattcatccttgccttaattttagcatattatgcggtgcttttcaatcatttgtatcttataaaaaagtggtctgcaagaaaatacttacagaccactatacttggctccccctgttgggcttgaaccaacgacatcatgattaacagtcatgcgctctaccgactgagctaaggaggaatataaatggggaaacggggggacaggaagaccggggcgagggaaaaaggaaatcagaaagcgggatatacggagaagccatatatcccggaaaggtaagatgttggcgatgagctatctttccggtccgtctccagacaagtattgttgccactgcggagcttaacttccgtgttcggaatgggaacgggtggaccctccgcgttaaaatcaccaactaccgccgcgcttgtggtttggcggttttgcgtcagcgttgagctatctttccggtccgtctccagacaagtattgtcgccactgcggagcttaacttccgtgttcggaatgggaacgggtggaccctccgcgttaaaaacactgacttggtgcaccttcagggattcgaacccgggacccactgattaagagtcagttgctctaccaactgagctaaaggtgcgaatatatacctgctcggttggtaggaaccaacccgagcgaaaggtgcgactgattattcatgggttgtgcccattgaaaaccgaataaagagggaaagaagaagcagaaagaaacccaag

SEQ ID NO: 2908 - DNA, 1845 bp, Unknown
  16S sequences of unknown bacteria
gcgcgactcgtttctccggcggccctggtcgccgtggccatcgcgggaatttgcgggtacgccctgccggggaaggacctgtccgacgccatgcggctgtggcgctttttgctggccgtctgcgccagcatcgcggggctgtttggcgtgatctgcggcgccattgcgctgctcattcatctggctgggctgacgtccttcggtgtcgcttatttgcagccgttttccagcgtccggggcagccgcgcgctgctccgaccccggctggggcggcaaaaataccgggatgccgcgctgcatccccaggattccaaaaatcagaggtagcaaatgcggaaattatggttgctttttgccctggcgcttgtcctgggcgtttatcatgcgatcccgttccagacaagcgacgtctcgagcttgctgccggtacagacgctggtcatccacgcggcagaggggcagtgccaggtcgcctgcggaggtgatttgaccgggacgggtgcgaccctcgccgaggccctggaggatctgcaggtcgacgccgccgggcatgtgttcctggcgacggcgcagcagattgtcgtctccgggacaggggatatctggcagcagttggcggaaatgcggcagctgcgccccgcagcgcagctctatcaagcggcgacgccgccggatgcggtggaggcgacggcgtttttgctgcagcatccgtcccaggtcacgctgctggagctgcgggcggcgcaggaatatggcgacagcgtctgcgtgccccgattggaagaaacgcaagggaggtacacgattgcagatggaacaacggtctgaacgggcggggctcctggctgcactggcggccccactgctgctctgggcggtccgggcctcctggctctgggtcctcgtaggcggtgctgctgcggggggattttatttgctgttgtgccgtctgcagccgctgcaggacctggcacatgtgacgcggacagtcatcggccctggtgcggcccgggtcctgctctgggcccaggccgtgggactggcgttggccggtggctggctgctgcggcaggccgatgctatcgtgccaaatctgacccggggctttccctggatcaccatcccgcttttgtgcctggctatggctgctgtttggcgtgggcctaaggcggcgcgggcgacctgcgccgtgctggtctggctgcctgctgtgacggctgccgtgatcgtcctcgcggcactgccgcagctgcacggcgcctggctgcgcccgaccaggcggccaatgcagcttgtgggagcgtttgcggtgtttttgtttccggtggtcagccggtatacatcatcggagaaagccgggagcgggaagtggatcctggcggccgtcgcggcagcggcgctgctcgccctcgtgacggcaggctgcctttcgccccggcaggctgcgacggagccgctgccgttttttgccctggctgcctccagccgtctgctgggccaggcggcgcggttcgacgccgtgctgtccacagcggtggctgctgcgttgtattgcgcgctggcaacccttggcagcttcacccactgcctgacaaaaaagaaaagtgccgcagcaatttttaccttctatgccctgctgtttttggctgcgtgcttggtgcaggcgatccccatcggtgcagtggtgctatatttagtggtattctggggaattatcccaatatgtatgattgttctggaaaaagcaaaaaatggggaaaattcgcgaaaaagatattgacaaaagtgcagggagctggtatactaacgaagcgcattacggaagcgcagttaataccaggcaga

SEQ ID NO: 2909 - DNA, 32759 bp, Unknown
  16S sequences of unknown bacteria
atctatagagcctgtcaacattctgacggaaaactatgcgaagatcggtcagatcataggtacgacgacatttgaagagatggcagccagggtagaaagtatcaaattctgctgtattcgggacaagcaaaatgattcgctgacgatcaagccggtgtggctgatgacggtatcgggaggctgcagattttggtttgatccggagaccggagagcttctgggatatctgagagcggaggtgaactgatggactggggacgggcaaaaaatatcatcctcattgttctgctgattaccaatatttttttaatcggcgtatacgggctgcgttatgggcacagtaaagagagcaattcggagctttacagttatacgatcgataaactgaaagcaaatcagatcgagctggcgtgcgatatgccaaaaagtccggggaaaatacccgctttgatcgtacaatatgaagaatacgataagaacgcggtagaaaaagccatcagagatattgaaaattccagcggaaatccgaaggaaaaaagaccggaggatcagagtgaatatgaagccgcagccgaggtttttctaaaggaatgcggtctgctgccccacagcgcgaaacctgtggattacagggaaggagaggatggcgaagtcgtcgtccgctatcaaaacacgtatgaggatattccgctggaagaatgttatatggacgtgaagtttgaagatggaattgtcgcgggaatcgaacgtcagtggatcgaacccgtggaagagggatccgctaagctttcgattacagagccgataacggcccttctcggttttatcgatatcataaatgatgagagacagagccggacggactccggcggttctttgcctccggaagattccggtgatacggcggcggaagagacttcttctggtgaggaatccgaacgggggagtgaggtctcgccagaggagacggtaaatgtagaaaaaatcgaactcgtatattatgcggataaaaacggtgtgagtgaaaatatactgtatgataccgcttttccggcctggcgcatcgaatataacggcggcagaatcaagtatatttccgcgtttgagcaataatacgtcacagctacttcataagattatcacatagaacgtgtataaataatgccaggaggaggaaacctccggataggagctattagaatgaatctgagcttttgctcttttgcgagcggaagcagtggtaactgctatctcataaaaagcagagagtcggcaatactcatagacgcgggcatcagcacgaagaaaattcatgccgcactggaggaattgggaacggagcgatcggagatctccggggttttcgtgactcatgagcacagtgatcatgtgaaaggcctgaaggttctgacgaaacagaatcccctttggaacgtctatgccagcgaagaaacctgtctttgtcttcgggagaccgtacataacagcgaacagatccgctctctggatacagatcacatcacacaggttggcgacatgaggatccgggcgatagatatatcgcatgatgcggcgcatccggtttgttatacggtcacatcgggaaattccaaaattacggtgcttactgacacgggttatgttcccgaacgtgtcaggccggagctggagtcttcagatctcatcgtcattgaagccaatcatgaggtaaatatgctgaaagcgggtccctacccgtatcgactgaaactgagaattttgggagacagcggtcatctgtccaatgagaccgcaggggagatcctgtcggatgtcatgtctcgtgacgacagatatcgaactatacttctcgcacatctcagcagagaaaataactttccccagctggcgcttcagacagtgacaaatattttggaggagcaccggttttatcccggaaagcatatgcggctggaagtactgaagagggaaggaatcagcggatttaccgaaatataaaatgaatggggaggtcatcagatatggacagagaaacatgggacaaaacgcataccagcgggagcggcgatccggacacagaaaaagaaaggaattttagggaaagcgcacagacgggaacaggtccatatggaaatggggaaggattcgtatcttcggaatcggacggcgaagcccggagcggcgcggaaggagatcttcggaaaggatctgcggaaggccgcgctgatacgggaagcgcaggaggtgaagccgaggtagattacagcatagcgtcaggtcttcgagaggaggtaaaatcccaaaggagtacgtttgcgtggaattcaaaaaattcatctgaaaatgaaagtacagacggtatacagggcagcagctttgcagggcgcacttcatccgcatcttcggaattttcatcggaaggaacatactccgcggaaaattctgaagcagagaacggctggaaatctgacgatttttcccggaatacagatacatggacaaatcatgctacgcaggaagaaggcgcagattttttccggggcgagggatcctcttatcaggaaagtccggatttcatccgacagcagaacggtaaacgtcagaagaaacagaagaagtctgtgagcagccgtaccaagaaaggaatcgccgttgctctggccgtgattctctgcttcggagcgggaatcggtggaggagttctcggcgcgaatctcttcggttcgaagggcggcggaagttctaccagcaatatctctatcgattccagtgagagcggtatggacgcggcttccgttatcgcggaaaagctgatgccttcggtagtcggtatcagcacagtctctacggaataccggcagtcgatcttcggaactcagcagggaacggtacagggttccggaacgggatttatcgtagatgaaaacggatacattcttacgaattcccatgtagtagataatgggaattcctcacagatcaccgtagatctgtacgacggatcagaatatccaggtacggtattgtggagtgattcctcactggatctcgctattgtgaaaatcgacgccaagaatcttcaggcggtagagttaggggattcagatgatgttcagatcggagattatgctgtcgctatcggaaatcctctgggacgtgattttgaacgaagcgtaacccagggtattatcagcggtctcgacaggacgattactacgacggacggtgaaagcaccaatacgatgcaggggcttcttcagacggacgcctccatcaattccgggaacagcggcggtcctctgatcaacagttccggagaggttatcggtatcaataccgcgaaagcgagttctgcggaaggtctgggatttgcgattccgatcaataccgctcttcctgtcatagaggaggtcaaggagaacggtacctatgaatctgtctatctgggcatcacgggcatgagcgtagaggacgctatggcgcagtatcagacggacttcaagactgaaaagggtgtcgcagttcttcagatttatacggattcgccggcatcggcggccggtatgaaagagggcgacgtcatcacggcgatcgacggcgatgcgatcgaaaatatgagcgatctcaagaaaaaactggtcaattacagacctggagacaagattacggtaaccatcgagcgcagtaagacagatatgacactggagctcactctgcaggctcagagccaggcttccgctatgcaatataagagttctggaacttccggttcgtctggaagcagcggatcggacggctattccggaggtcagcaggacggttccggaacttacggaagtgatccgtacagcgatctgttcggcggtctcttcggcaattagacctcaaaaggaggcagaccgctcggaaggaatcaggcgggccggctgtttcaaaatcgcccgcccatttcagatcaatgaaaatatctgtggcggaagaagagtacgaagcgatccaacggcattttttcggctgaacggcaaggtaatatttgaaagatgatttaagaaaatccccggaatctgaaatatctgtagaatttcagattccggggattttcatgtgtgtttattcggcagcgcggctgctgtgaaaaatcatcagcaacggagaagcggacagcgttattcgtgatacggttacttttggatctgttttttcggatggattctgtcttctctgccgtatgccgccgcttcctgtacataatgacgcgcattatctgtattggacgcgatctcttccggcgtcagcatacgtgtgacagcggcggggcagcccatcaccagtgagccgtcgggaatgactgcattctgtgtgaccagagcgcatgcgccgacgatacaattttttccgatcaccgcattgttcataatcaccgcgttcataccgatcagagagttgtctcctatggtacatccgtgaacgacagcattgtgacctactgtcacatggtttccgatcacgacgccggctcccgtctctacgtgaacgacactgttatcctggatattggttcctctgccgataacgaccggctcgcggtcggcgcggatgacggcgttaaaccagacgctggattcgtctcctatggtcacatctccgcgaacgacggctccttctgcgatatacacattttttccgatagttgggtttttcatatttttcctcttttctgtttctgcggcaggtcagcgggtgaaaccggggaaggcggccgcatgagattctcgatcagtaaaaatcgtgatatacggtttaaaatatcataattcatcgcatccggcaaatgtttccggcgtaatttcctttcatcggataacagtgtgctggtgatgtataatgaatactacggtattttcattcagaatgatcgctatgacagatttgtcgatatgaaagagagaacatcctcttggaggacgcgggaagaacggttttgtgggagcggatgggaaaggagctgaagaaagcagccgcggtggcaggtacctgcgcatatgccggcggaaatggcggagaaatccggggagcggatgaagaaagtaatagatgggatttgaagatacgtccgcggtgataagatgatataataaagagaaaaaaggaatttgtacgaatactgcagggacggtgcagatgagacgacgtgatgagaggtgaccgggagttggtgaatatcaatatcatatgtgtggggaagctgaaagaaaaatactggacggatgcggcggctgagtatgtaaaacgtctgagccgctactgcagaatacgcatcgtggagctgaaagaagagcgcctgccggacaatgcctccgcatcagaggaggaatatgtgaagacggcagaaggcagaagtattctgaagtctctctctgcagattcttatgtgatcgccttggatgggaaaggaaagcagctgtcttcggaacagctgtcacagaagatagaaggcctgactctcggaggctgcagtactgtcgatttgattatcggcggatctctgggtctctctgatgaagtgcggaagagggcagattttaaactttctttttcctctatgacatttccgcaccagatgatgcgggtgattcttctggaacagatttaccgcgcgtttaagatcagccgcagggagccttaccacaaatagaaaaaaaggagcccgcctgctccaacagccgcgggctctggtaacggtatcgtttaaaaatgatcactttttcaattcagtagccagatgcccgcattgaggtagcccgcaaagatcagccagagcagataaggtacctgcagccatcctgcggcgggcgtgatatcgtgaaactgaaagatcatataaattacaagtataatgagaagaatcagccaagccagcgcaattccatagattgccaggttgaaaaatatcagcggccagatgaaattgacgattagctgaatccagtaaaccgccgggatatcgtaactctttagcccgtcggaacgtttcatcgtcacgaggtaggcggagattcccatgagcagaaaaagcgtggtccatacgacaggaaagaccgcggaaggcggtgaaagcggcggctgattgagctgaccgtattgctgcatggcgcttcgcgtgagaaatccggatacggctcccgtgataaggggaaccgcgagattgaatatgagagctttccatctgattttcataaacatacgtcctttctgtattcttatttttatgcatatagcgcaaaattatacgaaaagaaaagagaaggacgaggagtgcagctgaaaaaagacaaaaaatgaagaaagactgtgaatcacagtctttctttctgcatgtcaaacaatctgagaattatatggagggcggtttatgggagtaaaccgctactgtcaatcgaatttatttacggcatttacatatttgccgagaattcctatatttacaaaataataggagaacttatctttcttctttacctgcactaactgcgcttgctgcagctttttgatatgctgcgatatcgtggcctgtgagtagtcgaactcggaaaccacatctttattgcagaccaactgacgagctgtattgcatttcatgataaatctgaaaatcttaatgcgtacaggatgagccagtgcatcagaaacatttgcgataagtaaaatttcgtcttcctggagatcatcgctttctttacgtaatctcataaaaagtaccttcctgaatatatatcgtttattctctatgtacaattgtagcatcgctctggaaaaagcgcaaccatatttttatgacaaatcattaacaatgaaaaatatggtgaaaaagaaaaacgaataaatatatctggatgatataagtatatacgaaaatagttttggcatcaagatgagattgtatgaaataacaaaaaattataaaaaactgcggcggaaaagatccggaagagaatggtgacgcaattctcttccgggcagaagtttttaatactcgtaatattccgccgggacgtccaccttttggagctcatcatcgtaatcgaagttgccgacgatgtagtccagatgtccttctacaaattcatatcctttttccagcacatattttaccggaatctgaatttcataatcatccagatcgccggactccagagcgattttcagataatttctcggaatgaccatgagaacgtgtccttcatgagaaaaataatagtggaacttttccaattccggaggaagtccgcccagataaggagtgtccagtgtgatgacctgcatatcgaatacgctttttctcacgttgagatcctcgaagccgaaatctttcatgttgttaaaatccattttttattgcctcctgtttcagcaaattaagacaatatgattacactgtttagttatgttcaaatcggaacagatctctaaatattcgtctgattagagtgtgaaaacgatttcaacatagtatcggggagcagactctctttcggtctttcgccagagtgcgatttctccgtaaaagccgggaatggaacccgctgtccgctgaagccgaaaccatcaatattatgttatattataacagaaaatatctctcttgaaatataaaaatgaattggaaaaaatggattacgtaaaaaacagttggaaaatgttttcgggaggatttaacagttgactttaacaatcataaaatagataatagaaatacatgtgcagaggagggtgagcagaataatggttataaatggtaagacaatcagcaatctgacagaagaggaaaaagtacttttggagaagaaattttccagctttaaaagactgccggtggaatcgaataatgtgtgtccgaattattacaatccttatcacgatccgagaaattgtcccggttcctgcagatactgtctctgggacggtgtactgaccgaagaaggtatgtaggtagaaaacttctgcaggaaaaatagaacagcgaaaaagccgcgcccccgccgtcaaccgtgcgatcgccatatgacagcgggggtgcggttttatgatcttgacttttttaaagagatattttctatcttttgtgtgatttcccggttaaagggagctgcgatattcctctcatcggccagctgtacgacgatcccgttgattttttttatctcagtaggtctgccttttctgagatcctggaccatagagcagaaattatctccggtggcttttgctacggactccacatgctcccagatcttttctccgtcgtaggaacggccggcggcttcaaatacggcaacggcctcatcgatgagctgacgggaataccggcgcatctcagggttctcactgataaatcggtttgcgcagtcgttcagagcacagacggcgttgatgccgatgttgacaaagagcttgcgtatcacggcatcctcggcatcggaggtaatgacagtttcaaaacccgcttcgctgaacagaacggaaacagaatcaagcagatttttcgcgtcaggagcctgtggatggagtgcgccgatagtagtcactcccgaacccgcgtgattaacgcggccgtcggatgacatattcgcgccctgagcggtggttccgataatgatccgatccgggtttgcgacggcttcgatatcggcgtgattgccgtatccgttctgcagtgtcaccgcgacggtatcttttccaaagagcgcgcggtgtgtttggacggcttcttccgtggaaggcgctttcacagcgatgagtacgagatcgaagggcttcagatcccgggtatcggtgacagcttttacacgggcggtacgggtggttccgtctttttccgagatgacgataccgttgttatttatggtatctgcgtggctttgagatcgaacgacacagatgagatcgtgtttttcggcaagtccggccgcgaagagcgaaccaatggcgccggttccgagtatggcaatcttcatgaaaaaatcctcctgtttgttttatgataccgaatcagaggggttttggcaatttaaaatcgtctctggtgcggcgatgtttccggacttctttgttttcggcggttgcagaggaggagaacggttttgcccgggagaaggggattctgtcctgtgacggcaggatgagaaaaaggagcggagaagagtgaatttaaaagacagcaaaaatatggagaaggaagatagaatgctgctggcgaatatcgaagataagattcgccagtcagaggatcgctatatgattacgttcagttcttttctggatctgaggcagcgaagccttgcggagactgttttgaagacgcggaaagatctgaattacggtttttacggcggttacgagaatgcggaacgggtgatctgcgctttttttccggagggatttctggtcggtgaaagcgctgcgcagcatttttcctctattcccggggaaaatccgctgtcggtcatccgggctctgaggaagaagggatcgccggagctttctcacagagattatctcggcgctctgatggggctgggaatacgaagagaggcggtgggcgacattctggtcagagaggacggcgccgatctcatcgttttgaaggaaatggccggttttgtactgatgaattacggcagagcgggaagagcggtcctggaactttctgaaattcctgcgggcgatttgatttgggaggaaaacgcgccccgggaaatagtagagagcgtggcttctctgcggctggataatctggtatcggcggctttttccgtatcgcggagcaaagcggcagaagcggcagcggccgggttgatctttgtggatggaatccatgtgaaaaagccggatcgtcttatgcgggaaggggagaaaatcgttttccgcggaaaaggcaaggcggtattttccggtgtcaggggaaaaagcggtaagggccggatcatggtgtcgattgagaaatataaataaagttgaaaaaagagaaatagaaaaggcatccgaaatccggatgccttaatttgtaattccggaagaaatgccaatgttttcatccggtgattaagagagcaaaatgtattcgtcaggaaagagcttcggtaagctgaggaatgatctgctttttgcgggatacgcagcctttcagatacattctgtcgtcttccgaagatgtgaatgcctttgccgccgcttcttccgcaccttggcccgcaaagatcagatcggtggattcatcgagaatatccgtaagcataaagaagatcatgtccacgccgtgttcttcgaaggtatcgtgcatatacgacgtcatgcgggattttaattcgctcagctcgtccgcgtccatagaggtaacctgacccacaccgaaagtagtgccgcctgcgctgaattttttataatccatatggaaaatctcttccggctctttttccagaagattgcttcccgctttgaacatttcttttgcatatgcctgaatatcttcgatacccgcaagctccgccagagattccgctgccgtccggtcctgatctgtgcaggtcggagagcggaacgccaaggtgtcggagagaattgcggaacagaggattcccgcgatgtccttttccggctgcaggccggcttcctggtaatgaaggtatacgatcgttgcagtacagcctaccggcatcatacggatgtagagaggttctgctgtctgtatatcgccgagcttgtgatggtcgagaataccgaggatttttccatccatgatattatcggcagcctgtgcgatttcgttgtggtctacgagaattacagtttctcccgcagcattttcgagaagttcgggcgcttcgataccgaagcggctgagtacgaattctgtttcaggattcatcgaaccggctcttttcgggatataggcgacatctgcggtattttctgtattcttaaatgcggcgtagcctatcgcggagcagatggaatctgtatccggatttttgtgaccgatgacataaacggtgttgttgctcaaagtgtcttcctcctgtctgttgcgtacgtttcattctaaactaattttacacgtctataggcatatgcacaattattatttttgtacatatgaaaaatattaccgtcggtttccgggatcttcccgcttaacggatatcctccaggggacgcagaagttcaacgtccaccgtttgtccggcgcggtacagggtgactcccagacgggtgacgagcatggcgtcgcccgacagaggcggttttccggaatttcgtgcatttgtacgagaagcgttccatgtgccgtcctcgttttttgtgaggttcagcatgcagagaaattcgatagctcccggcgcatggatatcttccgtgagaaatacagagacgacaggccgctgtctttcgggaaggttcatagctctggcgattacgggacgcaggcaccattctaagccgtagaacgcagctgccggagggccggaaagattgatcaggggcctgttttccgctatggccataccgaagggccgccccggggcggcttttacccagtggcttatcatttcaccgtattcgctgataatttttgtgttgtagtcttccagacctttggaggatcctccgttgataattacaatgtcacattcatccagcgcctgccggagcacctctctcagttcgtgtttcacatcttttgcgataggatagcagagcggttctccccctatttcgctgatcagatgagatgcgagaactgcattggattcgatattctgcccccgctgcggcggtgtgccgggcgggatgagctcgcttccggtgggaataaaaccgacgatcggtttttttatgacggcgagttccgtaatccctccggagagcagagaagccaggtccagagctgtgatcgtctgtccggcgctgacgatggtttctccttttctcatggtggatccggcggatctcacattcatcccgcgctggaagggggtctcttccggaagatggatagagaccgacccgtctttgtgcaggtcgatatcttcgattcttatgacgctgtcgaaagcatcgtcaaaatcatctccggtatcggcgcggacataatcgacgccggaccgccaggaggaagtgtcgggaaggccgccggcaaatcgccgggaatctacagcgatcccgtccatcgaagcagcgcgtacgactggcagattatactgaactgtctgatcttctgccggaattctgccataggattccactgccggtatgatctctgtctgcacctgcggctgccatttttcaaaaagacgctgcaaaatttcttcttttgtaaggttttcagtcacagattttacattctccttcattgtagatgcattcccctttcgagtcggacagattctttatgctgaatttcagtttcatatggtaatatttcaatgagctgcagtttctcgttgtgttttgtgaggcccgccggttttgaagacgggagataccggaactctttcatatttatcttatcacaccgcaaattgcgatagaatgataatttcttatttttacgggaagaacgcggtaatatgcataaacgacagcggttttcaggatacttaatacagaagaacacagttatagttataaggaagaagcagtcattcagacagaatgccgcttaggacgggtaaaaattttttctttggcagggcggaagaaagttggtatttttacggcgaaaacggtgtgtcttgtctgaaaaagatttaaggtcctgcaggaggaaagaatgatgaaatcgaatttcaggaaaagaagaggagcgataagtttcgggaaatttaccgattggacggcggtagtgacggcagtctgtctcatgatctgcggagcggtatttgcgctgaccggatgcgatgcggaactgtctgcagcggaagaacggcaggcagagcagaatcagcaggatgcaaagggcgcggccgctgtaatcgacgtaagcggaaggatggaagccgattttctcgatatcggcaaggcagactgtaccgtaatccgcagcgattcgcaggtgaccgtcgtcgatacaggctatcaggaaacagcggaaaccgttttggcgtatttggattctatcggtgtagagcggatcgatcatctgatcctcacccatttcgataaggaccacgtcggcggagcggccgcgcttctggagaaatatgagatagggatgatttatcagccggattacagtgcgaaggaggaggattcaaaaccttatctccgttatgaagagactcttcagaaggaagatctccaccctgtgacagtcaaggataatctgacggttatcatggaagatgtggtatttacgatttatcctccggaaaaattagagtacagcagagataaggataataatcggtctttggtcacgacagtacagcacggagacgtccggatgtttttggccggcgatgcggagcgggaccgaatcgatgagatcctgatgcagattccggatttgaagtcagatctgctgaaagtaccgcatcacggccatcgggaaagaaattcatcggaactttttcaggcggtggatccgagatatgcggttatctgcgcggacagggatgataagtcagacggtcctgacgatgacattatcgaggcattggaagaaggcggagcgcaggtattcactacaggagacggcgtcgtgcaggcggtcagcgacggaacgaatctcagtgtcagacagtgaggaaaagatgtcgtacagaaatttctgcatcgggggtattttagtgagagaatcgagatgcctgcgggcagataattgacagatatctgcgcgtatcctataatgaaatgcgtttaggaggtgcggcggaaatggatatttcgagatattttccgatgtgggaacaacttacggcgcaacagcggtcggcgctttctgggtctgccgtctgccaggacattaagagagggacggtcatccacagcggatctgcagattgtctgggttttttgctcatctgttcgggacagcttcgggcgtatattctttccgatgaggggagggaaattaccatttaccggttgttcgaatgggatatctgccttttcaccgcctcctgtattatgcgcagcatacagtttgatatcattattgaagcggagaaagattcgcggttttgggtcattccgccgaaggtttaccaggaagtgatggagcggtcggcgccgctggccaactatactaatgagattatggcttcacggttttccgaagtcatgtggctcatcgaacagatcatgtggaaaagttttgacaggcgcttggcctcttttttgttggaggaagcttctattgaagggaccgattgtttgaaaatcacccatgagataatcggtaatcacatgggcaatgcccgggaggtggtaacccgaatgctgcgttacttccaaagcgaaggtatggtaagtctgtcacgggggacggtggaattgaaggacacggagaggctcgaagaactggcgggaaaatagactgagcggtaccagaccactgtagagatcgttctttcggaagattttcgcttgataaacaacgccggatactgtttttacaagtatccggcgtcgttttgtttcgtacggggcagaatgactgccctccgattttggaaggttatgtaatctgcagggagccctttgctcccatcagcaggcttactacgtcaggcgcattgatcagcacatatctctcgtccatctgttcggctttgaatccattatgttccatacaggcattgcagatgcatacctgtccgcccagcttcagaaattcttctacctgtccgcctgcctcagggaaaggcgctccgatatccacaccctgaacggcgccgggctggcccagcgctacggcttctaccatgaggatgatgctggcgctgtgtccctgtttcagcgcgttgacgcccatgaccaccgctaccgtcaggttattcgggttttcctttccttcaaaaagggtaacgacaaaatctgtctgtttcattttgatctgctccttccatagattaaaaagggaaatatcggctgtacgctgcttagagcatcgagagaatctgtgctttcggtctcgcacccatggttttctccgtgatttttccatctttgacgaccatcagtgtaggaatgctcatgatctgaaactgtgcagccagttcctgttcttcgtctacatttatttttcctactttgatgtcggaatgttcctccgcgatttcctcgagcaccggaccgaccatccggcagggaccgcaccacggagcccagaagtcgagtaaaacgggtttatcggaattgatgacttcggactgaaagttgtttttattgatatggatcgcagacatgttcttgccctcctcttcttgtgggttatcgcttacggccgctttttcagcagccctctgttacttttgttttattcatgtgctcattatagctgctttttcagaggtcttctgtgatattgtcacacagttggagaagagcgttctctgtttctgccgtgatttcttctaaaaactggagtcctcctgtacagaaagcgatgccggttttttcggcataaatgggctgtttttttggaaatattaaagaagagaaaaaagaaacctgcttatcaaaattttgataagcaggtttctcgttcgatctgcggaaaagaaatgatttctgttttttcataccgtccttcggaacttcagtcccgagaaattttttctttcggagatattatgtgcacgacacttttctccagttttggacgggaaagacgcatctgggaaccgcattgcaggcagcggatgcggaaatccatgcccgcgcgcataatttcaaaggtttttcctccgcagggatgattttttttcagctcgacgatatcgccgatattgagttttaaaggcatttgctgacctccgtctgcaatgatcaaggttcatttgagcctttttctttgacctccgtttttcatatgtcatttgacactgtcatttttatttcgggacaaagtctgtaatcgtctcacggcgtggggttcataccttccaaattttattgcactttgcgctactttgtgatcttatctgtgcccatataaggtctgagaacctccggaattgtgacagaaccgtcttcgttctgatagttttcgaggatagccgcaaaagttcttcctacggccagtcccgagccgttgagcgtatggacgaattccggtttcgctttcggttcccgtctgaagcggatgttggcgcgtcttgcctgaaagtcttcaaagttgctgcaggaggaaatctccacatatcttccgtaactcggcatccagacttcgatatcataagtcttagcggagctgaaaccggtatcccctgtggagagaacgattactctgtaagggagatttaactcctgaaggacagcctcggcgtcatttgtgagtttttccagctcatcgtaagacgtttccggagctaccatttttaccatctcgactttgttgaactggtgctgtctcacgagacctctggtatcgcggcctgcagaacccgcttctttgcggaaacaaggtgtgtaggcggtgtaattgattggaagttctgcgaagtcgataatctcatcgctcctcagatttgtcaccggtacttccgctgtcgggatcagatattcgtctttgtccggaagataaaacatgtcatcttcgaacttcggcagctggcccgttccggtcatagccgctcttcccaccataaacgggggaagaatttcaccatatccctgtttctccgtatgaagattgagcataaagttgatcagggatctctccagtcttgcgccgagtcctttgtatacggtgaatctcgcaccggacaacttagcggctctgtcgaagtcgagaatgttcagatcggtgccgatatcccagtgggctctgtgttcgaaatcgaaagtccgcggttccccccattttctgatctccacgttgtcggagtcatctttgcctacaggggattccggatttggagtattgggaattccgagaagcagttctcttaattccgtctgcaccgcttttacctgttcgtcgagggcggagatattgtcggagagttttttcatctccgccatcagctctgtcgtatcctcgccggcttttttcattttcggaatctgtttggaatccctgttctgcttcgctttgagagcctctacttcgctcaggagatctcttcttctgtcatcgagttcgatggcgtgtccgatgttgtaatcgccttttcctctggactccaccgccttttttacgttgtcaaaatcctcgcgaattcgtttgatgtctaacattttctatcaatcctccagtaaatttatttccgaaacaaaagccgcaggcgcggattcggctgaatccgcgccgtggtttattcggaaaacggtatctatgcggccatctggtccagatagccgttgagctcttcgagatattttccataggtagcccaatcgccttcgcgttgcgccgccacagcgttatcatacgcctctgaagctaatcctgcaagttctgtcagggacaatggcgtatcagaagacggactgtctccctggtctggttcgctctgtccgtcgccttcctgtgtttccggaggcgtaccgttcggtgtatagttttcatccagtgagaagagcttgatcagcgcttcagccagcgtcggttcataggcgatacggtcgccgtatgccacgatgacacgttttacctccggcagactggtatcggtagacgattccagatagaccggttctacgtagagaatcgaatcgttgatcgggatgacaaacatgtcgcctctcgtatatttggaaccggaagagttccagagagagaattccttggatatttccgtattctgatcgatttgggattcgatctgcatcggtccgtagacgactttgtctttcggaagacggtacagtaccagctctccgtatttatctccgtcgctgcgggcgataagaagaccggtcatattcttcttgctgtttggagtaaacggaatcgaagagatgaattcttccgattcttcgccaggaagtttcatgatgtaatagttcggttccatctgtttctcttcctgtccgtagatttccgtagcgatactccacttgtcttcgttctgatagaagacatttacatcgtccatgtgatagcgctggtaaatattcgcctgaatcgcaaacagtgtgttcggatagcggatatgtttcgccagatcctccggcatttcggagatatctttgatcagtcccggatagatttttccgatagtatcggcaatcggttcatcggaaacctgataaaagtccacggatccgttgtacgcatctactaccactttgatcgggttgcggatatagttgacagatgtggtctcatccagctgataagatttggagtacgggtagtaactgctggtggtgtaggcgtcgatgatccaatagagtttaccgctgtcggataccacgatgtacggatcggcatcgtaatacaggaacggcgccagctttgttacacggtccatgatgtttctctcgtacagaattttggaattgctgtcgatatttgtggatacgagaattttaatattctgttctttaatcgcgtagaatatgcgtttcagcagagacagttcgatgccgttttcgccttcatatgtagtatagacattggaagtgccgctcggatagtcgaattcctgctcgctggtatttgtgataatatagtcgtctgtggattctccgaaatagatttcgggacgtttcacctggatatcctgcgtatcggactcaggaggaatattgtcgataatcatcttcggctgtccggtggctgtgatggcgtcgactctggagagggtgatgccgtaaccgtgggtatatttcagatgctttgacagccaggacacgtcttctccgaggttatcgtagttgatttctctggcggagaggaaagtctgcgtatattctccgtcgatcatatagcggtctacgtccacatcaaagaaactgtaataggcgcggatactctgtgtctgattatagaattgttcagacggcgaaaaatcgttgattctcacgttggagagggtcgcggaattctcgagaatgccttctgcagtgagattttcactggcagggaagtcgatttcattcacactgtccaagtcgtaggctttctgtgtgaattcgatgttgcttttgagatatttagattctttattgagctcatccggcgatacatagagagattgcatcgcggtacctgccagtgtcgccgcaacggaaacgcagatggtgacgacaggaagaatgagcatctttttgtagctgtttttcctcgcgaatatcagcactcccacggcggacagcaccgccagtaccgcttcgatccgataagcccagagtgtgatatggatgtcggtaaatcctgcaccgataacatttcccgtaccggagtacaaaagtgtatactgtttcaggaacagagctccggctaccgcaagaaggaacaggaccgccagaatgaccacctggcgtttcgcgatactgaacatgacgccgaaattactcttgtcaaaagatacggaaggcgtcctctttctggcggttctgtgtccgccgccaaacagctgttcccacggattctgctgtacatttccgtcgtcatccaaaacctccgcctcttccacgtcttcataagcttcatggcggtcgagaatcgacgggcgtctcacactgatcatgtatgcataatagatgagcgtaaccgcgagaaatcccacgataacagaaatcgccatgctgctgatggaattcagcagggccagacggaatacataaaacgacacgtcgttgttgaaaatcggatctgcgacattgaagtctgtgctgttcatcgcgtacagaatctgctgccacagtgtggtagtgaccatccatgtcagcaccagagaaaatacggcgctgataatgtgggtcatccgactgatggatttgtcagaggcgcggcccggtacggtttccaactttctgagatattcttttttcagcagtctcagatacacttccgaaagggcgaatatgatgacaaaggccgggatgccgattttcagctctgtgaagagctttttaaagaagacctgcgtgtatcccaggtctttaaaccaccagtaatccgtgacaaaggtaatgatcgtaccgaagcacagaaccagaatgataagaaggagaattacggccgaaagaccgattttcttcccgctgctgcttttgtttttttgcttttctgtttttcctttactttttccttttagcattttttaactcctaactcctgaatttataaataccggccgcttatataccggtttgcggcttatttatatctccgtccgctgccggagcggtgctctggattccttcagaactgccgaaagccgatatcttgctgtcgtccgctgcgaaaatgcctgtaacctgtgtctcaatgcggtgtatcagggtggccgctcccgaatcaggggcgaataatttgattccgatgatggcaaattcgatgaccagcaataccgaaaggaggatgatcaatgttttcgcaacagttcccagactttcgttttcctctgaatccggatcagaagatgcttttgactcttcccgcgcagttttcttttccgctctgcgctggctgcgttccgcgcggagacgttccttttccgcttttttctcggctttttctctctgtttgcgttccgcctcctttatggaatcgatggcgtcgagagcttccatcatttctgtctgccgctgctgggagatcgtatctgtggtaatgccccgatgatctgtttcagggtctatcgatggaatatagatcgattctgtctgtgagcgggatgcggcgatatcctccggccggatgctgaggatatccggattttctgtcgcttcgccgctgttcggctttgtctccgaatccgattctatcctgcatccgtcggaaatcggagcgccggccgctttcggctgtccggtttcctgtatctcagggataggggaatcgggctctttcccgttttccgacatgatttgacgggcttcaggaccgaaaatatctgtgatcgtcatttttgaaataccggacggtttttcccagaattccatatcggaatcctgcggcatatccccgctgttctgcatcgtctgccggatttcctgagccgcatttctctcttcgagagccgccgccagcgccgccgcttcaagagccggaatctgcatcgtctgctgtgctgcttcagaagatgcggacccgtctgcgatcttgtccggcttcagatcacgcccggacggacggttctccccggaatcctgcggggtttcgtcagaaacgtctgctgcagagatatcatccgtgatcttagccgtctcttcagtgctgcaaggattttcgtcaccggaaacctgcgcatcactgtccggaaggagtttctcatccagatcgccggcgaaaaagtcatcgtcggcatccgtctgaaaatcttcgccgataaccgcggcttctgcggtatcttcttcactttttgaaacggcttggctattgtggacttccggttcgataccggctgtttttctctccgccgatgtttcgtcgaattgtgcgtaatccgtcctgtcctcgccgtcgacgtagacgtggccggaatcagatgtatctacggtttttacgacggtagcgccgtcgtgtcttctggtcacttctacggaagcgtttccctgagcggcatttatttccacggaaacctgaacatttttcggaggctgttttaccgcgtcgagacggacctcgcgggtctggactttcttatcgtcgtttaacgatgcaagactgatttcctgggttttcacagtcacctttgtgccggaaggctcattgatgctgatctgaacgcttttgtcttcttccggcgcctgacgcggtgcgccgttttctcttcggaaagcttcgtactcgtcttcgatggtacgaaaagaaatggtgggaacaaagcggagtttctggctttttgtctccgctttctgcgcttcttcatattcggcaggtgtgagataagtgaccttttccatatcatctttaaagcgtttttccgcctcgatcagccgatgaaatcctgaaaattcatcggattcaccggtatctttcttttgcactgtctcatcgctgcccggcggaatttcagcttcttcggatcccggcgttatttccgggctgcctgaaataacggtctcattatcttttttttcttccgtctctgtccccgcggaagccgaaacggcgtcagcggtctttagaaaatccgccgtctctgctcctctgtcttttactgcagcgggtttatcggaaatttttccatagatgtcgccggaaatattatgcagcgctttgacgaagtcgtctgtgaaagtatcaggcgccgccgttttttcttccgcggtcttttctctgtcatgtgagttgccggaattggaagaaaattgaaatgtaaaatgatcctctgaggaaccttcctttgcagaacggttttcggaggaggttttcggaggatgagagattgtatttctggagatttccgctgtctgcgaatgctccgcttctatgtcggatgagagagcatcgccaagcaggccggagatgagactgcgctgcgcatcggacatgtctgcggaattatgcagattcatggatgcgggcagatgaaatacgtcatttttctgtacatcgtctgacggcgctgcagtacggctgtcttctgagtattttcggccggagacctcggatcctttaaagatgcggtccatctcccggtccagtgtctgctggcgtttttcgtttttcgtatcaaaagtaaacagatctctgatttcctcaggctccgcccaaccgttcagagactggtcgtaaatctttccggaattttcatcgacaatccggccggatttccagtcgatagaaatgtcctgttgtttctttggcttcggatagtcctgtacgttccatttgaattcacttccgaatgtttttttctcgtcgggaatgactgccccgcagtgcgggcattgacgggatcccgatatcagttcgttattgcatactttacatctcataatcttatctatctcccaaatgcggcaaatcgtgctcatttaattaataattatataataaagaaagatcctaatcaacgaaaaacaaaaagggaacgtctttcctctttataaagaagaacgttcccttttttgcgggccggtaaaatatccattcggggctttcagtccgtaaataacgatggtcggccggtcagtccgcggctttcgccgaatatcaccgccgttccccgtattcctccgatcgcttccgaacgcatattttcacagagtagtaatccgtgcatctttctgccggacatcagcccgaaatggtgcgagagatttttccgccggctgtactctgacccagaaacttatctgcagtcagtagcgctgccgctttttttgttctctgctctcttggaatctgtacagtctgtattctggctgtacgtgctggacataccggaagtttttccggaagtggaaggatctccgtacttagaagatgcggaattctgtgtcttgctggacatagaattgcttgccttggagctcattttgctctgtgccttagaagaagctttctgcgaaggggaattgccgccgcagtctgtcatcttctgatcggcggaataagtgaaaccgccttctctgagtgttggaatttccttaccctttgtcgtgtaactgtctttatcttttctcatttctgcctccttgtagctctcgtcggctacagttttattttgttctgtgtcagcttttctatgagcggaaaaatctgaaaattgaaaagatcgaattttttttaatttttaaaataatatgttgacaggttctttgattattggtattatagtcaaggtcgttgataagagacgaggacatgcaccattagctcagttggtagagcacctgactcttaatcagggtgtccacagttcgagcctgtgatggtgtaccaatcgaaaccgctgtagatttttctgcagcggttttttatattttaaacgaagagatataatattatgtaccatattatattgcgttttaggcggaatgataacaccgtgccgaggaacattgtctctgcagacggtacttgaagttttttgttccgctttccaattgctgaaaaaacagaggtatcaatcacaacttttcgtatttagagggaaaaacagaaaagaattgtgcttttagaaaggagcggtatctgtgaagattacgatcaaaaacagcgatattcagcattataacgatagttcggttcccgattttccaaagtatacgtcacagctgatgaactgggcgaaccaaaatgctcaggggactcggccgagagtggtagggcagctctcggaactctttccgcagtaccgcaaagagtgcggcgacggtgaggaaatttccatcgggggatgggaacggtggtattcggaaagatatccggattccatcgacgaggcggcagataagatttttcatcagatggaacacctgaaggaagcgattcagctcatagacctcgatatgatccggcgctgggtctatgatctggtcataacgaagacgtacaacggtctttacatacagaaggccattctggccagactggcggaagaaaaagggacagactaccgtctggcctgcccggaggaagaatctcagggaatcgacggatatgtgggagagacggcttattctatcaagccggatacttatcgtgcgaaaaattttctgcccgaaacgatcggcgcgaagatgatctattatgcgaaaaccaaaaccggtctcactgtcgaggtggaggagtgatttcgaaccggagaaaccggtttttcagtgcagtggcatacctgaggcgcctcccgcagggaagcgccttatttttttttcgcggctttcgcgggaacggattcatagctgcacagaatacatccgtcctggaagtcgaaatctctgcatttcctgatgcacagctgtatttcctgccgggttttcaccggaaaatgatgtttttcgtttatataacattttttccttttatcatcactcaggctggaaataaatgatatatgacggtcgatgcgcttgtcgatgatctcgttgacagcatcagtcttttttctcagatttgctacggcatttttgcagatcgcttcgtcgatatcgacaccgatgctgtttctctcggaagccatgcaggccagatttgtcgtaccgagaccgcagaaaggatctaagacggtatctcctttgatagaatacatattgatcagccggtagggtatttcgaaagggaaggaagcgtttctcagccgggaggaggatttgcctattttctggtttgttcctttgatttcccacagatcggagaaccactcgttgcgttcttcccagaaatacgcgctctctcttctgagctgcgcggcttgagcgtcgaatttccgttttcctccttttcggaaaatcagaatatattcatgttcgtatgtgacataggcaccggcgggatacatgccggatcccatgaatttattgggtgcgttggtgggttttctccaatggatgtcgggcagcgcacagcatccctttttcaggaagaaatcgataatggcggcgtggttcggaaacaggcggaactctttgcccaaggttcttgtggcgtcgccgatgttgatgcagacaaagccgttgtccgacagaacccggtgacattcctcccaggcgcggttcagaatgtcgtgcattttacgataagctgcggtatagtcttctctttggaaatcttccctgatttcgggattctgggcaaaaaagatttcgtcccacatctcaatcataggatagggcggcgaggtgacgatgagctgcacggatccgtcgggaataaaggacagatccgccgaagaagaatttatgattttgtgaaaacacttcattattgagatctcccttccgttttccgtgctttttgtcatatctgcgggcggtctgttttgtctctctgctgcattgaagccggcagtcaggatcctcttcggattccggcaaaacgtaccggtatcttttgttctctgctctgccgcgggagaaagagtatcctgcggcagggcaaagaaggatttccgcctgtacgggcggcagacttcggcgttaaactataatatcatatcataataagatgaaaaagtctagtggaggcggctgaaaagtggaaatgaaaaaggagagcgttgtaattttttcggttgacacagatggagaccgtaatatataatcctattaattcagcgttgcgatacgctgaatgttacagattaagagagaagtgaaatgcgaagacggagatattgatttattctcctgtgtcacagagagccggcggcagctgaaagtccggtacacagtatagatcagtctcactcccgagcagcgttccggaaagcagaacagagatttttccgcggcagaagcggcgggattcggtgaaaggagtatggaacgacggccggccccgttatcttggtctcgggtttgtcagaaccttagagcgattgcgtatcgatgcagtaagcagggtggtaccgcggtaatcaaagataattatcgtccctggagtcacagaaagtggcttcagggacttttttattgtcctctctctttctattctgtcagcgatgagaaaacgatatcgtaagaaaaaatggaattataaatattatgtcaggcggatcgacaggaggaaaaaagatgaaacagattaaaatttttgacacgactcttcgtgacggcgagcagtccccgggctgcagcatgaacctgaaagaaaaaatcgagatggcgaagcagctggaacgtctcaatgtggatgtcatcgaagccggcttcgcggcttcttctccgggagatttcctctccgtaaaaacgattgcggagactctcaaaaactgtacggtggcgagtctggcccgggcgcttccggcggatatcgacagagcgtatgaagcggtaaaagaagcggtttctccgagaattcacacctttatcgccacatcgccgatccatatggaatacaagcttctcatgaagccggaggcagttctggagagcgcggaagctatggtaaaacatgcgaaaaagtatgtgtccgacatcgagttttccgcggaagacgcgacgcgaagcgacacggatttcctggcgaagatcttcgaccgggtgatcaaagcgggcgcgacgacgatcaatattcctgataccgtaggatataccactccggaggaatatttcgctttcctgacagagatcagagaaaaatgccctgcgctggataccgtggatatctccgtacactgccacaacgacctgggtctggcggtggcaaattctctggccgcggtgaaagcgggggctactcagctggaatgcactatcaacggaatcggcgaacgcgccggcaatgcttctctcgaagaaatcgccatggctatgaagacgagaaaagatctgtaccaggcggatacgagaatcgtcacacaggaaattatgcgttcttctaagatgctgtcccgtatcaccggtgtaaaagttcagccgaacaaagccatcgtcggcgaaaacgctttcgctcatgaagcgggaattcaccaggacggcgtattgaagaacaagcagacatacgagatcatgacgccggaatctatcggcattacggagaagaatctggtgctgggcaagcattccggaaaacacgcactccaggcgcgcatcaaagaactgggctacgaaattacagaagaagatctcaatacagctttcatcaagttcaaggaactggcggataaaaagaagcagatctacgacagcgatatcgaggctatcgtgacaaaagagaccgttaagattcctaaggtctacgctctcgaccgttttgcggtcaacagcggaaacaccattaccaatacggcggtagtgcgtctgagcaaagacgataagctggtggaaaaaatcggaagcggagacggtcctctggacgctgccttcaacagcatcgaaaagatcgtgggaaagaaactccatctggaaaacttccgcattctctcaaatactgagggaaaagacgcgctgggcgacgccacggttctcatcaaggatgaggagagcggccgcacgtctcagggcagaggcatcagcaccgacgttctcgaggccagcctgatggcatacgtcaacgcggtcaataagatgatctacgaggagagacatactgctgaagagaaataacagggaacagaaaaaaatacatcggtgaagccgagctattccgcgtttgtgtgataaaatagcggaggaggtcctccgtccttttggagggccaaagcggctttcggaaggaaagcccgcagagaaaaagaagaaaacgaaaagagcgaaaagagcgaagaaaaatggaatgttccggcttgtgggagagcgcggggcaggagccatcaatagatcgaagcagaaaggaagaagaaattatgggaatgaccatgacacagaagattctcgcggctcatgcgggactcgactcggttaaggcgggccagtttatcgaagcgaaactggacgctgttctggcaaatgacatcacaggtccggtagcgatcaagaacctcccggcgatgggtgcggaagaagtgttcgacaaggacagagtctatctgatcccggatcactttacgccgaataaggatatcaaggctgcggagcagtgcaaggtcctgagagagtttgcgagagatcagaaactgacgaactactttgaggtgggccgtgtgggtatcgagcacgctctgctgccggagcagggtctggtggtagcgggagatgtggtgatcggcgccgactctcacacctgtacttacggcgcgctgggggctttctccacgggtatggggtctacggatatcgccgcgggaatggccagagggatttcctggtttaaagtgccctccgctatgaaattcgaactcaaaggtcagccccagggctgggtcagcggcaaagatatcatccttcacatcatcggcatgatcggagtggaaggggcgagatacaagtctatggaattcacgggagaaggactgaagtatctgaagatgtctgatcgtctgactatggcaaacatggccatcgaagcaggtgcgaaaaacggtatcttcgaagtggatgaaatcaccatggaatatctgaaggacagagcgaaaagagaaccgcgggtcttcaaagcagacgacgatgcggaatacgatgaaaccttcgtcatcgacctctccgaaatcagaccgacggtggcattccctcaccttccggaaaatacgaagaccatcgatgaagtgggcgacatcaccatcgatcaggtcgtcatcggatcctgcacaaacggaaacatcgaagacatggaggctgccgcgaaagttctgtcaggcagaaaggtggcggatcatgtaagatgtatcatcttcccgggaacgcagaatgtatataaagaggcgattcagagaggctgggcggaaattttcatcgacgccggagccgtattctccacgccgacctgcggaccttgcctgggcggacacatgggtatcctcgcagccggtgaaaaggcggtggctaccacaaacagaaacttcgtcggccgtatgggtcacgtggagtcagaagtatatctggcgagtcccgcggtggcggcggcatccgcagtggcgggaaaaatcgcgggaccggaggaactgtagaggctcagcgcccgatcgagtaaaagaagaatacaggaaaaaagataaaaaagaaaggaatcgattatgggttttacatataaatacggagataacgtagacaccgatgttatcatccctgccagatatctgaatacatcggatcccgatgagttagcgaagcactgtatggaagatatcgacgcgcagtttgcaggaaaggtgatgaagggcgattttatcgtagccaataagaatttcggctgcggctcttcccgtgagcacgctcccatcgccatcaaggcctccggcgtgaaatgtgtcatcgccacttcttttgcccgcattttcttcagaaactgcatcaatatcggtcttccgatcatggaatgtccggaagccgcggctaaaatcgacgccggcgacgatatcgacgtggatttcgctacgggagtgatcaagaataatacaaagggcgagacctatcagtccgagcctcttcctgagtttctgagaaatctcatcgccgaagaaggactcgtcaactatacgaagagtaagcttcaggaaaaatagagagaaaaaggaaaacgcgaaaacggaccgtgtccgggcggctccataaaaacaggagaagaagttttttgaaaaaagaaacggaaaaagcgaaatgtgcccggattgaagcgaaagcaataggcagagcgttttccgggaaaaaagatagttttcttaaagatagaattgaattggatacggcggttttggaagccggcggccatgccggatttcaaaaccgccgcggcataaaaccgaaggaggttaaaatatggaatttaatatcgcagtgatcaaaggcgacggaatcggcccttctgtggtcgaccaagcgcttttgactctcgacagagtgggcgaaatttacggacataaatttaattatacggaagttctggcaggaggatgcgccatcgacgctacaggacgtcccctgcctcaagagactatcgacgtctgtaaaaacagcgacgcagtgctcctgggcgccgtaggcggtccgaaatgggacgaacagcccagcgacaatcgtccggagagagcccttctcggactgagaaaagaactgggtctgtttgccaatatccgccctgccatgatgtttgaagagctggcagacgcctgccctctgaagccggagctggtttccggcggtctggacatggtagtagtcagagaactcatcggcggcatctatttcggcgaacgcggcacgaagatgacggatatgggtcctgcggcttacgatgtggaacagtattccgaaggcgaagtaaagagaatcgccgaggtggctttcgatatggccatgaagagaaataaaaaggtcaccagcgtggataaggccaacgttttagacagctccagactctggagaagagtcgttacggagatggcggaaaagtatccggaggtggaactcaatcatttctatgtggacaatgccgcaatgcagatcgtgagaaatccgaagcagttcgacgtcatcctcaccagcaatatcttcggagatattctctccgatgaggcgagccaggtaaccggttccatcggtatgcttccgtccgcttctctggcggaaggcagcttcggcatgtatgaaccgattcacggcagcgcgcctgacatcgcaggccgggatatcgccaatccgatggctacgattctgtccgcggccatgatgctccgctataccttcggtctgggcaaagaagccgacgccgtcgaaaatgcggtaaagcaggtcctggcggacggcgtccgcacaggcgacatcgcaaaacccggcgaaaaagtttacggtactgtagagaccggaaaactcattgcagaggcgataaagtaaataaaaaaagatttactgataagtgaattgtaaatagaagtataaaagctgctggcgccgaaaccgttatctggtttcggcgctttttctaatcaacaatatttctctcaagagaaaaagttccggcaaaactttttcgaattttatttgaggatacagggtgtcagtgcaggaactttactttaaaaatcggctccttttttcggcagcttcaaccggctggtgtacgcaccttctaatttcagcagagcgatctttttctcgatgcctccggcgtatcctgtcaggctgccgtcgctgccaaccactctgtgacaggggatgaggatggaaatcggattgtgtcctaccgcgccgcctgccgcctgggcggacatgcggggaaggcctcttttggcggcgattttatcagcgatctctttgtaggtcagcagagagccccgggggatttgaagcagaatatcccacacttcctggcgaaagggtgagcccgcggggcgcagaggcggcataaaaccgggatcggtgctgctgaaataaagatcgagccagcgtttcgtctcatcgaaaacgggcagatttttttcttcgtgttcgccggaaagggtgtcggcaaaatatttctgtctttcgaaccacagtcctgtcaggtgagcgccgtcggatgccaataatatatcgcctatcggtgatacatattttgatgtatattgcatgttgtcagtctccttattatgatctgttttgtatgttgctttaca

SEQ ID NO: 2910 - DNA, 13166 bp, Unknown
  16S sequences of unknown bacteria
ttgaaatgaacacgcagtttttaatacttttttcatataaagaagaagtattgattgaaaagtgttcggaacaaacggttgaatactgtaaggacaggcttctaaattttgccgagcaatatacatatgattatcttgccgctgcaaaactattgcttaattataataagtagatgtttttttaaacaattattcaatctaaatcttatcgcagtaggggtttccaaaggggactttgcccctttggctgtttaggagggtctgggaacccaatctgaagggttcccagcggctctttcccctatttctgtccgcacagaaatagggtgcctgcgcggcacgagtgcataattccgaattaggttttatctcccggtttaaacagcgccgccattaaaaagcccgatacaacggcagttgcaatgcccgccgaggttgcggttagcccgcccatcagtatgcccataaagccgtattcctttaccgcctctttaacgccgcaggcaaggctgtaaccgaagcccgtaagcggaacggtggcacccgcgcccgcaaacttaacaataggctcataaacgccaattgcggtaagaattacccccgccacaacgtaagaaacaagtattcgcgcaggcgtaagcttagtgtaatcaattaaaacctgacctataaggcagataaacccgcccacaagaaacgcatataagcaatgtaaaaaaatatccataaggcaaccccctgtataatgtttcacgtgaaacattccttttatattataggttgccctatggattattatttatacctcaataccgtagctttccgaaatactttttttaacctcgccgtaatcgagcatacgcacctttacggtatcggcgctttccgaccgcacgcttattactaccttccaggtgttaagccgaatatcgggaattgtgcgtataattttaatctgccccacattttcgcgcgggcagtgcagctcgcaggcgttaaagccctttacggtctgcgcgtagatgtttcttccgattttcagcttacccaagcgaaactcgtaaatgctcaaatatgcgtaatacattataattgcgcagactaccatagttaaaaacaaggtaagcctgccgaatttcgggaaaataagggtcaacgctaccgaggctgctaccgtaattataaaatacagccccggcagatataaaaatcggtttttggttacaatatcccgccgcgcgtgcatcagcttgccgtcgggcgccaaaaacggaaaatacgcctgaaactggcgctttatctcgcctcgtctgcccgagggcactataaccgccgtctcgctttttgagccgccgtagccgcccacgctcaccttcatagcatagcgcttgaaaagccgcataagcggggtttggtctataataacatcgtttaccgaggactttttaaaggcggaacggctgcgcacgaaaaagcccgaccgcacctctaacttttctttttcaagaaagagcttaaaatttatatacttaaaaagcgaataaacaaaggctaccgcatagcttaaaagaaaaacaagggttattgcgtttacaataggcggaaagtaggatttaaagccgcttgaaacgttgtttatctcgtcaagcagaatattatttagcgcaatatcaagcagcttacctgttttatttattataggcacggcaataagcatacccataactgccgatgatgtggtagccgccataaccgccaccttaaagaccgaaaacttaacggcggtataattatcctcgccgtataaaaggcgggagacctcggtgctgtctttagtgctcagcttgaaatcaaaatccgccttgcctttaggtcctgcctcggtatttattcggtaggataccgcgcgaaagactgcgtcaatagggttttgcaccgtttgaacggacgatagcttattagtgcttataaaggcgctgcttttaaaaagcacccccattttaattgtcacgccgtttttgccgcaaataaggcggaaagagcggcagcgcagagcgcctataagggtaattgccataaagcctataagctcaagggttaaaacgcccgtaacgcggcgctttataatatattgtataacgccctttaaaacaggcagaaccagtacaaaaagaaagggcttaataaggcttacaagcataagcgggtgggcgcgaaactcctttttcaagcgttttcctcctttgtgaccgactttataaacagctcaacgtcagatacgggcagctcaggtataataacgctgctgcgcgccgctttaaggcttagcgccgcaagccccatactgtgggcaaggggcgtggaatagctttgaacgtaaataagccttgaaaagggcattatatgggtagtccttataaagataccgcggtttataataattgcccccttagggaacagtatttcatagcttgcaaaataggcgggaatataccacatcacaaatataagcagcgccgccgccaaaattactgcgggcaaaaggcaccatagcgttaccgagcagagaaatagcagcaccgcaaccggaataaagcctattaaggatatgcgcacctgccacaaaaagcgggtttttttcggtattccgttttctttcatactattccctccttcggtttacataacatatttatttaccttttacagcgtcccaatattccttatatttttgctctgttttattgtctccgtactcataataccgcttatttttaagcgcgtcgggtaaatactgttgatttacataatgatttttaaaatcgtgcggatatttatagttctgcccctttatttcggcttcctcgccgtcaaaatgcttgttttgcagctggcgcggaacaggtccgcctattcccttttcaatatcctccattgccgcgactatcgcgttatgccccgagtttgatttcgggcttgtggctaccaaaatcaccgcgtcggcaaggggcaggcgcgcctcgggcagacccaccgactgcgcaatatccaccgccgctttcacaatgggtattatttgcgggtaggcaagccccacgtcctcacaggcgcataccataagccgcctgcaggcgctcggcagatcccccgccgcaagcagcctgcctaaatagtacacggcggcatcggggtcagacccgcgcattgatttttggtaagccgatattatatcgtagtgctcatcgccctcgcggtcgtagcgaacggcgtttgccgccgcaatttcctccaccgtatcgtcggtaatatcaatttcggtttcattttcgcttgtcagcacgcatagctccagcatattaagcgaacggcgcacatcccccgccgccgcgcgggatatttttttcttatcgtcagccgaaattttaatttctttgcccttttcctcgcttaaaatgccgattgcgcggtctaaaacggctgaaatatcatcaggcgtcagctgcttgaactcaaacaccgttgagcggcttaaaatcgcgttgtatacataaaaatagggattttcggtggtggaggctataagagtaatatccccgttttcaatgtaggaaagcagaatttgctgctgttttttattgaaatactgtatttcgtcaagataaagcagtatgccgttttgggcgtcaattgtgcctattgagccgataatctccttaatatcggcggttgatgcgatggtcgcgttaaggtagcacagctttttaccgcttgtggcggcaattatgtttgcaaccgtggttttacccacgcccgagggtccgtaaaatataaggttgggtatattttttgagtcaattatgcgccgcagcacctttcccggcgctaaaagctgcttttgccccgcaacttcttcaattgttttcggtcttaatctgtccgctaacggtgagttcatttttttttacctgccttgatattaacattttccgcttttccgcttcatattataaattatacgggaatttggagtggaaaagcattgaaaaaaacaatttttattaaaaatgcccttattttaaccgtttcctcgctgatattgcgctttgtgggaataattttcaaggtctggttagcgcagcttatcggttctgagggaatagggctttatcagcttatattcagcgtatatatgctcgccgccacctttgccacaagcggtataagcaccgccgttacaaggcttgccgccgaagaattagccctcggcacaaagcggggcacgcttaaaatactgcgccgtgctattgaaattaccctgattgttgcggcggtaacggttgtaacggtatttttcggggcggaatttatagccgttcggtttttgaatgatattcgcgccgtgcccgcgcttaaaatactgccgctttcgctcccctttatggggatttcctcctgcctgcgcgggtattttattgcccgccgcaaaataacgccgaacgccgtttcgcagctgcttgagcaggcggtaagaataatacttatagtagtgcttgtaggtaaattctgtactaagggcctcggtgcgtgcgccgccgccgtgattttgggtgacagcgctgccgaaatattctcgtttttaatgctctggcttatatggctgcgagatacaagaaagctcgataacctcaccggcagaaatcgcccgcctttcggcatagtaaggcgcatactgcacatttccgttcccataacctcgggcagatatttaaacaccgcgctgcgcacgggcgagaatattttagtgccgaaaaaccttgcaaaatacccgttcgggggcgaaaacgccctttctcaattcggtatgataaagggtatggcgctgcctatacttttctttccctccaccctgttaaacgccgtttccacgcttttaattcccgaaatatccgaggcggaggcacgcaaccgccacgggcttgtgcgctcggcaacccgaaatattttaaaattaacaagcgttatagcctttattttcggcgcgatattctttgttgggggcagaaaaataggtctgcttatatataaaagccccgaggtgggcgagcttttgcgcgctctgtcgcccatagtgccgctgatgtatttagacagcatttccgacggcattttaaagggtcttgaccagcaagccttcacattccgcaccgccgtttccgattcggtgcttagaattattctgattcttatattactgccgattttcggactcaggggatttatttggataatgtatttttcaaacgttttaacctgctttttaaacgtcggcagactgctgcacgtaacaagggttaaaattcgctttataaatgaaattttactgccccttacctccgccgcggtaattgccatagcttgcgacagattactgggactttggggcggtattggtaatttggtttacataatacttttatgcgtaatttcgctgccgctgtacttcggggcaatgctgatgtttaaggtagtcagtcccgatgatcttcggtcatttctccgtaaataatttcgtagttcctttttatcaccttttccccgcgccactcataggctctgcccgaaatatcctcgccgtattcgtagcggtcgcggtagcctgcaataaactcgggaatataggtattcgccgcatttttattaagcgggcacacctcggcgcaaatatcgcagccccaaacggtattatactttttgagggctgctttttcggcaaaattaagctcttttttttgctgtgtgacagccgatagacatttcccctctaaatccccccttggacaagcctttttgcaattgccgcacacagggcattttttaaagtgattttcggcaggaatttcaaggtcggttacaatttcgcaaataaaacaccagctgccgtaggttttgtttattaaaagcccgttttcaccgtataccccaagccccgcggcagccgcggcggaaacctcgggtatgggcgaattatcggcaaagctttcaaatttatattcgggaaattcctttttcaaatcgtccgttatgtttaaaagatatttttgcgttatatcgtggtaatcgggcaccgatgcatatcggcaaatgttttcggggtgagcgtctctcaccttataggggaacaaaagcagaattaccgttttcgcgttttcgggcagccgccgcagcgcgcggcagggcaaaaggcgctcctttacaaggtcaaaagcgcaaaagcccgcgtcgcgtattccgtttttatttattatttcaagtatttttcgtttcatcttaaattaccgaaaaattcccgcaggagtgataaacattcgtcctcatatattccgccgtaaatttcgggcttgttatcaagcggtatgtcgcaaagccttaccacactgtcaatacagccggctttaaggtcatacgccccgaaaacaagagtggaaattcgcgcgtttataatagcgcccgcacacatagggcaaggctctaaggtgacatacatttcgcagccgtcaagccgccatgagcctaaatatttgcaggcggcgtttatcgcctcggtttcggcgtgggataacgcattttgcttttcttcgcgcctgtttctccctcttgctattatctccccatttttaacaataaccgcccccaccggaacctctccgccgcgtgcggcagagcgcgcctcggcaagagcggctttcataaactcactgttcatttttcaaccctgaaacgttcccgaaaaatacggcacattgttatgcgggtcaaactcgggcttacggtttcttataataaacagtattatcggcaccgaaattgtgaagataaccgacaacacgatatagagcgtagcgtttgatttatcaaaggaggaataaacgcgccacaaagctatgaagaaaaccaccgcataagcaaatgccaccgccataagcgcaaagtaaagaattattaccggaataagcgacataaactgctcaggtgccatttcagccgaggtattaaccgcgtcaagcgcatagcccgtaatttcctttattgaaattaccgtaaatattgtaagcgctattgcttctataagcactattccctctaaaacaggcaaaattatgccgaaacgggcggattttgtgccgtttttctttttatatttttcggcaagcgtaccgaatacccagtcgtttgccacgggaataaaggcaagccacgggtttttaatttcggcgctttttgccattttataaacgcctattgcctctaacaaataaatcactataccgatagatatggaaaccgcaaatacgcctataaaaactgttaaaaagaatgatacggcctcctccggtagacccaattccgttaaataatcaaacatatttataagctccttttaaaaatatacaagggattcggcaatacatataacaatgaatattataataaccgggcttgtgaaaaaccatttaaagcgctgcttgagctcgctttcacagttgcttttttcaaatttaaacagttcctttgaattttcgcttaaagcaagcgccaggatacccaatgtcaggcaaataaacaggaaaaccgaatatataatattctgcgccgtttgcggaatactgcccggcataaaatcaaatattaccgaaacaaaattatttgtagcgtgcaccgccattgctaaaagcagcgaatttgtttttaccactataaagcctaaggcaagccccaccaaaaaagcaaatggcatctgctcaaagttgccgtgcataaacccgaaaagaattgatgatacaatcaccgcaaagccgtcgccgtatcgtctgagtgagcctaaaataagcccgcggaacgcgaattcctctaccaatgcgggaactgccacggttgataaaaagcagagtaaaaagccgaaaaagcctttaggcgtttcgccggagtttacattgtaatcaatgccgaagaaactgaaaaactgacttgccgcagaggttgcaatatttgcaaaggcacaaaacgcaacgcctataaagtacattgcctgcctgtttccccgccgcggcttttcaagcggcactaaattgcttattctttcaccgtttgccttaaatattgcaataaacgggacggtgaacatcagcattgaaagtacaacctgcaaaacttgcattattgcggggtcttgcacaatttccattgccttttcagaggtaaagccaagcttacccattataaaaatgtaagccacgctccaaaaaatcaataccgccattgtaattataagtgaagtgcctattgcaagcgaactttttcttattccttttctttcctcataggttttaggcgtaaagccgtagggaataaacgttacatagctgtgcggtattgcgctcacccccggctgctcaaaagtcgggggattggtatttgccgcgtccgttttctgctcctcaaactgcggattatattcatccatagttttatacctgcctttttactcggaatattctcctctattcctctgcgccggtgctttcttcctctgtttccggctcgtcgggctctgccgcgcccgcgtcagcctcgggtgtttcgggtaaatcggtcggttcctcgtcgctgtgctctgtcaccgctaccgagagtatcttttcaccctcgcccaccttcattacgcgcacgccctttgcgggacgggtaaaggtggaaatatcgcccgagaatattcttattattataccgtttgaggctatcattataatatcctcttcgcccgttaccgcaagcgacgccgcaacatcgccgtatttttcaacgcggtagttggtaagacccttaccgccgcgggattgcaggcggtagtcgcttatcgggcttattctgccatagcctgtttcggtaatggttaaaagcttggtgtcgtcactcgtaatttccattgaaaccacatagtcctcgggcttcattgtaatcgccttaacacctctggctcctctgcccatggcgcgaacctgattttcattaaactgaattgccataccctttttggtagctataaacaggttattttccccgtttgtcattttaacaaaggtcagctcgtcgtcatcatctattgaaattgcaataataccgctctttcttgtgttcctgaattccgaaagcttggtacgctttattatacccttctttgttaccattgtgatataatgttcctcatcaagctcggaggcgggcaatattatcgtaattttctcattcggcataaggggcagaatatttataatattcattccctttgaggttcggctgccctcgggtatttcgtaagccttaatgcggtacattctgccgagatttgagaacagcataatgtaatcgtgcgatgagcatacgaacatattttcaaccgtatcgtcgtcgcgcgtggtcatacccgtaattcctctgccgccgcggtgctgaacgttataggtatcggcaggcaggcgcttaataaagccgttttcggttttggtaagcacgcactgctcttcgggaataaggtcctcaatatcaacatcacccacaacgtcggtaatttcagtgcggcgatcgtctgagaatttatcgcgaagatttaaagcctcggtctttacaatatcaagtatacgttcgtgacttgccaaaattgcctcgcactcttttataaagtctaacttttcctgcaattcgtcaagaattttctgtttttcaagacccgatagcttacctaactgcatctgaacgattgcggtggtctgaatatcgtcaagcccgaatcggtcggataacgcctgcttactttcgggtattgtcttgcttgagcggattattgctataacctcgtcaataaaatcaagcgctacctttaagccctctaaaatatgggcgcgctcctctgccttgcgcttgtcataagcagtgcggcggcggataatatcgcactggaagtctatgcagttttgcagcatatctttaagtgttaatatctgcggcttgccgtttacaattgcaagtaaaatagcgcctattgtggtttgtaaagcggtgtttttgtaaagcttgttaagaataacctgcgggttggcgtccttctttaaatcgacgattattcttataccgccgtcacgctttgaggagtagtctacaacgtcctctatcccctcaatttttttgtccgccgcctggtcgtatattgccttaacaaggtccttcttgcgcaccttgtagggtatttcggttataactatgcggtatttgccgtttttagtttcctcaatctcggctttaccgcgcagggttattttacccctgcccgtagcgtatgccgcgcgaataccgctgcgacccattataataccgcccgtcgggaaatcgggtccctttatatactggcaaatttcctgtaaatccgcctcggggttatcaataagggcacacataccgtcaattacttcgcctaagttgtgcggcggaatttcggttgccatacctacggctatacccgaagaaccgtttactaataactgcggaaatctgacgggcagaacttcgggttcgtttaagcggttatcgtagttaggctgaaaatctaccgtttccttgttaatatcatcgagcatatgaagcgatagcctgttcattctcgattctgtataacggtaggcagccgcggggtaaccgtctatgttaccgaagtttccgtgaccgtcaattaaaggataacggagggagaaatcctgcgccatacgcaccattgcgtcgtaaacgctggcgtcgccgtgcggatggtaacgaccgagcaccgaacctacggtatcggcgcacttacggtatgccttgtcgggcgttaagccattttcaaacattgtgtaaagtattcttctgtgaacgggctttaagccgtcgcgcacatcgggtatggcgcgccccaccagtaccgacattgagtactggagcatactgcccttaatttcgtctacaatttcaaccgggactattttggtttcttcgtcgctcggccagtaaacattttcctgctttgccattttttctcaccccttaaatatcaagatccgtcgcgaataccgcgttatcttcaatgaattttcttctcggctctacttcctcgcccataagcattgtaaaggtctggtcggcaatttccgcgtcctccatattcacccttaacattgttctgtgttcgggatcaagtgtggtttcccacagctgctcggggttcatctcaccgagacccttatagcgctgaacgtcggggtcgccgccgagttccgccacatatctgtccttttcctcgtctgtaaacgcgtcaaaatacctcttaccctttgcaacgcggtaaagcggcggctgcgctaaatatatatgccccgtttcaataagctgcggcatataacggaagaagaatgttaataacagcgttctgatgtgcgaaccgtcaacatcggcatccgccataataacaattttatcatagcgtaatttatttatatcaaaattttccgctattcccgtaccgagcgctactattacgggggtcagcttatcgttaccgtaaaccttatctacccttgctttttcaacgttgagcattttaccccaaagcggcagtattgcctggtaggtgctgtttctgccctctaccgccgagccgcctgccgaatcaccctctactatgaatatttcggtcttggtcgggtcatttgaaatacagtcggtcagcttttcgggcattctggtttttccgcctatgcccgatttatttctttgcagctcgcgcgccttttgtgccgcctcgcgcgcgttggaggaagcaatcgatttatcaagaattatcttagcctctgcggggtggtcttcaagataattcatcatcttttcggcaactatgttgtttacaagcgtgcctattgcggtgttgcctaatttcgccttggtctgcgattcaaactgcgcgtcggttaattttacgcttacaaccgccacaagaccctcgttaatatcctcgctctttaaattggcgtcgctttctttcaaaaacttaaaggtacgggcatatttgtttattacccttgcaaggcttgttttaaaggcgctttcgtgcgtaccgccgtccaccgtgtgaatggtgttcgcaaaggacattattttagtatcgtaccccgtgctccacaaaagcgctatttccgccatagagtcgcccgatgagccgcttaaataaataacgtcctgatttaatctatcctttttgctcttttcaagcaaaaattcaacgtatgattttataccgccctcaaagtgcaaatcttcttctctgtggggaatatccgcgtctgtccgctcgtcctttaacacaatgcgtatgcccgcgtttaagaaagcctgctcgcgaagtcttaaaagcagtgtatcaaaatcataccgtgtggtatctgtaaatatggtcgggtcgggcttaaaggtaacctttgtacccgttttatcggtatcgcctattattttaaggtcggtttttatgttgccgcactcatatctctgcaaataaatatgcttgccgtcacaaatttcaacttcgagccaagaagacagcgcgtttactaccgaggcgcccacgccgtgcagaccgcccgaaaccttatagccgctgccgccgaatttaccgcccgcgtgcagaattgtgaaaacgacgctgactgtcggtattcccttttgcggatgaataccaacgggtatgccgcgcccgttatcggtaacgcgaattatgccgtcatccagtatttccaccaaaatcttatcgcagtagcccgcaagcgcttcatctattgagttatccacaatttcatagaccaagtggtgcaaaccgcgctcgcccgtagagcctatatacataccggggcgctttcgcaccgcctcaagcccttcaagcacctgtatggaattttcgtcgtaattttccgttacaggggtagtaatgtcgttactcattttcaaaaaacattcctttcaattaggctgacgagagtcaaactcatcacgcctacaaacaataattttttgccttttcttgcctcatcacttgt

SEQ ID NO: 2911 - DNA, 5842 bp, Unknown
  16S sequences of unknown bacteria
agccatcgcaacccacgaaaagcaccgtctttacggcaaaacctataaaaagaccacgcgcttgaaagcacatgatgaaaacaatacctgtggcgtaggcgataaggtatccatcatggagacccgtcatctgtccaaggacaagaactggcgcgttgtggaaattatcgaaaaggccaagtaagagccagaaagggaggacaacgccatgattcaaccgcaaactaggctaaaagttgccgacaacagcggcgccaaagaaatcatgtgtatcaaagtgctgggcggttcgttccgcaagaccggcaacatcggcgacgtcatcatcgcctctgtgaaaagtgctgcgccgggcggggtcgtcaagaaaaaggatgttgtacgcgcggtcatcgttcgctcctcaaaaggggttaacagacctgacggttcctacatccgctttgacgataatgccgcggtcatcataaacgaccaaaaacagcctcgtggaacccgtattttcgggccagtggccagggagctccgtgaaagagactatatgaagatcgtctctcttgcgcccgaagtgctttaaggagggtggaagatatggtcaaaaagctgcatgtacggaaggacgacacggttgtcgtcgtatccggcaaagataaaggaaaacagggcaaggtgcttcgcgctctgcccaaagaaggaaaagtcgttgtagagggcgttaatgtggttgcacgccacaccaagccgaaaggccaaggggatccgggcgggatcattcgttctgaggctcctatctatgcgtccaaggtaatgctggtttgcgaaaagtgcaacaaagcaacccgtatttcctacaagattcttccggacggcaagaaggtccgcgtttgcaagaaatgcgcggctgaacttggctgagtgccacaaggagggtaagtaaatggccgaacaggcaatgcctcgtttgaggcagagataccaagaggaaatcgttccggcgctgatggctaagttcaaatatacgaacatcaatcaggtgccgaaactggagaagatcgttttgaacatgggtcttggcgatgtaaaagacaacgccaaaggactggaagcggccgtcaacgatatgatgatgatcgcaggccagcggcccgttgtgaccaaggctcgtaaatccgttgcaaacttccgccttcgtgaaggcatgaacgtcggcgcaaaggtaacgctgcgcagcaaccgcatgtatgagtttgcagatcgtctgctcaacattgctttgccgcgtgtacgtgacttccgcggcgtttcggataagtctttcgatggaagaggcaactatgcgctgggcatcaaggaacagctcatcttcccggaaatcgagtatgataaggtggacaaagtgcgcggtatggatatcgtatttgtcaccactgcgaaaaccgatgaggaagcgcgtgagctgatggcactccttggaatgccgtttgcccagaactaaaaggaggaacaaccttggctaaaaagagcatgatcaataagcaacagcgcgagccaaagttctcttctagggcgtacacccgctgccgcatctgcggccgcccgcacagtgtgctccgcaaatatggtgtatgccgtatctgctttagagaactggcctacaaaggacagattccaggcgtgcgcaaggcaagctggtaatcgcggagaggaggatacaacatgatcgtaacagatcccattgccgatatgctgacccgcatccgcaacgcattggtcgctcggcacgaaagcgtagaagtccccgcgtccaatatgaagaaagccatcgcgcagattctgctggatgaaggatatatcaaaacggtagagatcgaggaagagggcccgcagggcaaaattaagatcggtctgaagtatggtccgaacaacgaaagcgtcgttacgggattgcgccgtatcagcaagcctggcttgcgcgtatacgcccgcaaagaagaagttcctaaggtgttgggtggccttggcattgccatcatctccaccagcaaaggcgtaatgaccgataaaaaagcccgccagaacaacatcggcggagaggtattggcgtacatctggtaagatggcgcccacggaggtgtggttatgtccagaattggcaaaaagccgatcagcctgcccaatggggtaagcgtcacggtggagcagggcaacaccgtacacgtgaaaggtcccaagggcgagctttcgcaaaaaatccacgatgatatgaaagtatccgtggtcgacaacgtagtgacggtagagcgtcctacggatgaagcaaatcaccgtgcgctgcacggtttatcccgttccctgatccagaatatggtaattggcgtatccgaaggttacaaaaaagaattggagatcgtcggcgttggttaccgtgcgcaaaagcaagggaagaaactggtgctgaatatgggcttttctcatccggttgagatggaagagccgcaggggatcacctttgaggtgccgagcccgacgcagatcgtggtcaacggcattgacaagcagttggtaggcgaaaccgcagccaatgtgcgcaaggtgcgtccgccggaaccctacaagggcaagggcatcaagtatgtggatgaatacattcgccgcaaagtcggtaaagcaggtaagtaaggagggacgtgcagcatgattaacaaaccggataaaaataagattcgcgtcgcgcgtcaccgccgtactcgcaagaacatcatggggacggctgagtgcccgcggatggatgttttccgcagcaacagccatatctatgtgcaattgattgacgatgcagcaggcagaacgctggtagccagctctacgctggatcctgcgatccgcgaccaagtcaaggaaatgtccaaggtggaggccgccaagctggtaggcaaccaggcgggcaagaaagctttggaagctggcatcaagcaagtcgtgttcgatcgcggaggctatctctacacgggccgtgtggccaatgtggcagagggcgctcgcgaagccggactggacttctaaaacggagggatacaacagtgcgcattgacacaacaggcttagaactgaaagaaaaacttgttgccgtaaaccgcgtagccaaagtagtaaagggcggacgtaacttccgctttactgcgctgatcgtcgtcggcgacgaaaacggtctggtcggcattggcagcggcaaagcagctgagatcccggaagcgatccgtaaaggcaccgaggatgcaaagcgtaacctcgttcgcgtaccgatcgtaggtaccagcattccgcacgaggtcaaagggaaatttggcaaagggctggtactgctgcttccggctccggaaggtaccggcgttattgcgggcggtcctgtccgtgcggtattggagctggccggcatcaaagacattcgtacaaagagctatggttccaacaacccggcaaactgtgcaaaggcaacgctggaagggctgaaaatgcttcaaacggcggagcaggttgccaaactgcgtggcaaatccgtagctgagattttgggttgaggggggcaatgatcagatgaaacagctgaaagtgaccctgaaaaagagcactattggaagcaatcaatccatgaaagacacggttcgttcgctgggcttgaagaagattaactcttcggcggtccacgtcgacaatccttccattcgcgggatgatctttaaggtcaaacacctggtgagtgtagaagaagtggaagcgtaaggaggaaaccctatgaagctgcatgaaattaagcctgcacagggcgccactcgcgcacaaaagcgtgtgggcagaggcacgggtagcggccacggaaaaacctccacaagaggccataaagggcaatgggcccgcagcggcggcggagtacgccccggttttgaaggcggccagatgcccctgaccaggcgcttgcccaaacgtggttttaccaatatctttgccaaggagtacgctacggtcaatgtccgtgacttaaactgcttggaagatggaactgttgtgacggcggaatcgcttaaagagattggcctgatcaacaagatcggcgatggcctgaaggtgttgggccacggcgaattgaacaaaaagcttactgtgaaagcaaccaagcttacgaaaacagcccaagacaagatcaacgctgccggcggtagcgtagaggtgattggataatgcttgaaactttcaaaaatgcatggcgtatagaggatttgcgaaagaaaatcctctatacgttgctcatgctcttggtataccgaattggcacgtcgtttatcccgattgcagggatggatgtagccgccatcaaacaaacggtagagggttcggatattttaggattcctgaacatgataaccggtggttcgttggccggctttacgatttttgccgtcggtatttcgccgtatattactgctagtatcgtaatgcagttattgacctttgcgattccggcacttgaacgtctgagcaaagaaggcggcgaagagggacgcgaaaagctcaagcgtatcacccgttatgttggcattggcttggcgctgattatgagcatcggcatggtaatgagcctacgcagctatatgattacaacggatctgctttccaaaattacgatggttttgacactgaccgcaggggcatgtattgtcatgtggatgggggaaaagatcacggaaaaaggcattggaaacggcgtatccttgattatctttgttgggatcgtggcgcgccttcccgtgactgcatggagctttatgcagaatatctttgcgggtgaagtcaatgcttgggccttattgcccatcgttgtgatttacgtggctattgtagcgggcgttgtgtttatcgactgtggtgaacgccgtattccggttcaatatgccaagcgtgtggtgggccgcaaaatgtatggcggacagagcaccaacattcctatgaaggtgcacagcgccggtgttatgccgattatctttgcagttacactgctacaattcccgggtatgatcgctagcttttggccgcagagcggatttgcgctttggtggggccgttggatgaattcggccaccattccatacaacatcatttttgcaattttgattgttgcattgggatacttttacaatatggttacctttaacccggtggaagtgtctaaaaatatccagcaatacggtgggtttattccgggcattcgccctggcaagccgaccagtgattatttggcgaagatctccagccgtttaaccctgtttggcgggttattcctggcccttttggccacgttgcccggtttgattgcgggcctggtaggtaccaacatcatggctctgacggcgaccggcgttttgatttcggtatccgtagctttggagacttcaaaacaactggaatctcaaatgttgatgaggcattataaaggattcctaaaataagggaggcagcaagatgaacttagtatttcttggccctcccggtgcagggaaaggcacacaggccgtgggtgtctgtgaaaaatatggtttgccgcatatctctaccggggacatcctgagaagcgaaatcaaacagcagacgaagctggggctggaagcgaagaaatatatggatgcaggccaactggtgccggatgaagtcgttattggcatcgtagcatctaggttaacacaaccagactgcaagaatggatttttatttgatggatttccgcgcacgctgccccaagcggaagcgctggcagaaaaggtggatattgaaatagccatcaacatcgatg

SEQ ID NO: 2912 - DNA, 1635 bp, Unknown
  16S sequences of unknown bacteria
ccgcgctcgagaccgtcgcagcacaggcagagggtcaccggcgcgccggaccgcagcagctgctgcaagatctccagctccacgccggtaaaatcggaaaagccatcgagataaaacgccttgtcccgggcaaaatccgtctggcccaggcgcttggcgagataggccaggcggtcgcgggggtcctgctgcccggcggcgcagacggtatcgtagctctctaggatcaggctcagctcctccagctttccggcaagcaggccctcggtctgcccggcggcgcggcgcaggtcagcggctgtcacgccgtagctcttccactcgtccaccgctgccagcagctccggcaggagcgcggcccggcggctgccggcggcatagcgcttgagccgggagcggacctgctccagcgcctgggccatggccagcacgcgcccgccctggtccagcgtctgccgggccacaccgccggacgcggcaaaaacccggttggcaagccgggtgaagctcagcacctgggcatggcggcagatgccgctgccgcccttacggcacagctgctgctccgccgcgaaggacgcctgctccggcacgatccagatccgctggccatccccgggctggcagagcgccgccaggagcgcggcccggtttgcctgccagtcctccccccatataatctgcagcatcgccgcaccttctttcgattttgttatctcacattggtcgggcagcccgcgataaaaaagggcaggcggcccgacgccgtctgcctctattatacataattcgcagccctttgccaactcataggcgaggccgcagctgccaaaatgccacggcgctggccgctgcgacgttgagggaatccaccccgtgggccatggggatctggacggcgcagtcgcaggcggcaatggtcgccgggcgcaggccggtgccttcggttcccaggacgatggccaggcggtcatggcgggggagcgccgggtcgtccatggggcgggcgtcgggcgtcagagccatggcggcgcagtagaagcccgccgcctgcagctgcgaaagccatccttcccggggcaagaatgcccagggaagctggaacactgtccccatactcacgcggacggcgcggcggcacagagggtcgcagcagtcagctgtcagtaagacagcatcgatccccagcgcggcggcggagcgaaaaatcgcgccgagattcgtcgaatccacgatgctctccaggaccgccaggcgcttggtgcccgggagcagctgggaaagcggcggctggaccggtcggcgcatagcgcacaggacgccccgggtcagcgtatagcccgtcaaggccgccaggcaggcccgatcggccgtatagaccgggacgtcgccgcagcggtccagcagggcgctggcctggccggtgatcttctcccgctccatcaaaaacgagacgggctggcaaccggcgtccagcgccgtgccgatgaccttcgggctctcggcaatgaacagcgcccgctccggcgcgacgcggctgcgcagctgcgcctgggtcagctgggtatagaccgccagctccggcgcggtcagatcggtgatttctatgatattgaccatcgttttgccctccaa

SEQ ID NO: 2913 - DNA, 1693 bp, Unknown
  16S sequences of unknown bacteria
gcgccagccacgatttgccgatcttcggcgcgcctgccagcaggtgcagtccctgggggagcagatcgtcgaccacgaaggagaccggttcgtaagcggtgctttgcagcgtgtccgcgtcgatggtttgcagtcggttcataaaaatttctcctttctgagttggagtgtttatttctttcaggcctgtgcttgtatcgtaacatggggattgacttttgaaaataggtaatgtatcattttactacatacactatatcaagacgaatacattatctactgggagagggcttatgtctgttttgggaaaagacctgtttgattttcagcgttcgcacacgaacacaaaagtggaatttggcgcatccggctactgggtggagatggttccggagatgcagccctacggaactgtgctgacggagatcctaaatctggatgtcacaccttttcagaagctgttggacaggttgaacacggctgtccacgaaaagaattatgatgacgctccgcgtgcctatatggacatgcagaagggttttggatctctgccgctctaccgattgtatctgatggacttccgttatttcggagatatgaagatcgaggaatttgtgggtgaggaagcgcgggaggcatttgcggaatatgtgatcaatgaggagcgcgaaataccgtccttcatgcagcagcagatcaaggatattcagctcattcaggagcggtatgcgtggtttttggatcgggtttttgcaaacgctgtgtttgaaaagaaaaaaggccagagaaaagaatctctggcgcagttgatctattccagcggttatgaggcttttgtcagcggtgtcagtttggggaaggacccggaggtagacgcgccgctggtaagagcgcagtaccgcatccggggcgaaagagaaaatgccgaggtagtcgagaagatgtattttgaccggctgctggattttgtctatgtggaacttatgaagggactgcagaagggctttgtaccgaaacgctgtgccaactgcggacgctggttcttgcagatgccgggtatgacctacgcctattgcggcgaaccggcgccggggcaggacggcaagacctgccgggagatcggagccaccagcagcttccgcagcaaggtgcagaacaacgatgtttggaaggctcatcagcgggcctacaaaaaatattttgcccgtacccgaaaggggacgatgagcaagggcgtgtttgaagtgtggtcccggaaaatggagacgctgcgggacgatgcgctgaaggaatatgacagagcgaagagcgaagaggaacgtcagcgcattgtggatgaagtcacgcaaaaactgaataagctgtgagcgaaaaaacaggagggagctgcgtccgcaaatgcggatgcagttccctcctgtgccgcagtgccgaagcactgcgtagtcccattacggacagtggagcacttcgcagactgctctggatcatactgacaacggcttgtgcttgatttgcgatgcaaatcttgactttccatccaacaatctgtactcttaaatcgtattatgctgctgatattatcttttgagctgtaaagatgagaaaccacccaaaggaaacgatgttggtatttgaataacgagggagtgagatatatggagcaattactgattgttgaagatgatatcgg

SEQ ID NO: 2914 - DNA, 32759 bp, Unknown
  16S sequences of unknown bacteria
cgatctgagagaagttggtgccggcgccgctgcgaacgcgcagggaggaagcggtaacgatgtaggtcttgccgtccttgtcgtcgtcatcatcgtcggtcgcgccctgcgcggtaacggtgaccttcatggaagaagacttgtagaccttgccatcgttcgtagtgtaagtagcagtgacgtaagcggaaccctcgcgagtaccaatgatatcgctgccatcaatgtcaataacttgtgcattgacagcgctagaatcattgcctacagtcacggaaccgacgctgagaactgcattcgagatcttggcgttggtttctacacccaagataacaggggtgtaggtctcgccgattctgatggtcttagtagactcagcgaaataaataccctcaggatcgcgctctttgatattctcgcggataacgatgtcatactcctttgtctcatagatggaagaattatcctccatcttgaagacaacaccgctataataacccgcagtatcctgcgcgctagcagcattcacatcaaagatcgcaagagaataaaccgcggcccgcattctttttccgcaagagaagcaattcgccgtgtcattctttcgtaacttttttgaaatgttttgcgacacaaactcggtggatttgtgtgaaaaaaggcgtgcgcagggaaaactcctgcgcacgccgccggggatttacgcctcccagggcgtgggcacaaactccccgccgcgcgcccatttcaggtagtgcagcgcgtggagctggcccgtcatctcccactccccgcggtagcagttgtcatggtagccctcgatgctgacgtcgccctcgtaccccgcgcggtgcaggatgtagaacacgtcgcgccagttggtgtcgccaaagccggggaagcggtcgggcgtgaagtccaggccgcaggaaatgccctgctcccgaatgcccgtccagtccaccgtggtgtccttgccgtggacgctgaagaccttgccggcgtagcgccgaagctcgggcaggggatcgatgagctgcttgatggcgtgcgccggctcccattccaggccgatgttggtcagcggcacggcctcgaacatcatgtcccaggccctggggctgtaggcgatgttgcaggtgtttctcttccaggtgccgcccatcgggcagttttcaaacgccaggcgaacgccgcggtccgccgcgtatgcgcccagctctccaaagaccgccttgtatcccggcatggcggcctccacgctctccccctccagggcgccggcaaaggtgcagacaaggtccgtcccgaacaagtgcgcgctgtcgatgcactttttgaggttcgccttgtgctcctcgtactggatggggttgcagtacaggcccagcgccgtgatcttctgcccggtcggcgcgatgaggtccagcacccgcggcgcgaggtcccgaatctccacgccgtagaattccatgtggaagcagatctcaaagcgctcaaagcccttgtccaccatgtggggaagatactccagcgccttctgtcccggaatgcaggtgccgatggcaatctgtttcatgttccgatgctcctctcgattttgtcgaatttctctcctccattataccattttcttcccgctttgcaattccctacgcatggctgtgcgcgcacacgggcacgctatgcggagaagggagagaggaccatgaccattttgcgcattctcttggcgctcgcgctccttgccgccatcgcggcgtgcggatatgccgcgtacgtcctgctgagcagcctgatcggccgactcctgccgctcttttcctggctgctctgacccggccgcaaaatttcgtgtgaatccgttaacaatcgttgcgaaaagcggttgcaaatgcgcctcgtttcgggtatacttttgttgtagaaaaattccatacgcgcggacgccggttgccgcgcgcgcatctccctggaacccaagcgccggtcaacaaggtctatcaagcggataaggagtgtgtgttgttatgaacaagaagaccatcgaagatatcgatgtatccggcaagcgcgtactcgtgcgctgcgacttcaacgtccccctggacggcacgaagatcaccgacgacacccgcatcgtggcggcgctgcccaccatccagtacctcctggaccacaatgcggccgtcatcctctgctcgcacctgggccgtcccaagggcgaattcaacatgaagtattccctggcccccgttgcggagcgcctgagcgaaaagctcgataagaaggtcgtcctggccaaggacgtcatcggcgaggacgcccagaagtgcgtcgacgcgatgaagcccggcgacatcgttctgctggagaacgtccgcttccacaaggaagaggaaaagaacgatcctgagttcgccaaaaagctggcctcctttgcggagatctatgtcaacgacgcctttggcaccgcgcaccgcgcgcatgcctccaccgagggcgttgcccactacctgcccgcggtcgccggcttcctgatcggcaaggagctcgacgtcatgggcaaggcgctggagaaccccgcccgtccctttgtcgcgatcctgggcggcgccaaggtctccgacaagatcggcgtcatcaacaacctgctggacaaggtcgacaccctgatcatcggcggcggcatgtcctataccttccagaaggccctgggcggcagcgtcggcaactccctgtgcgagaacgacaagctcgacctggccaaggagatgctcgagaaggccaaggccaagggcgtgcgcatgctgctgcccgtggacaacgtctgcggccaggagttctccaacgacaccatgcgcatcaccgtgcactccaagcagatccccgacggctgggagggcatggacatcggcccgaacacccaggccctgttcgcggcggagatcgccaacgcggcgaccgtcgtctggaacggcccgatgggcgttttcgagttcccgaactttgccgccggcacccgcgccatcgcgcaggccctggccgacaaccagaactgcgtctccatcatcggcggcggcgactccgctgcggccgttgagcagatgggctacgccgacaagatgacccacatctccaccggcggcggcgcctccctggagttcctcgagggcaaggagctgcccggcgttgcggcgctgaacgacaagtaatccctttttcagatccaagcgctctgcggctcatccccccgcagggcgcttcgtctgaatatccccattttatcaaccatttacggaggtaaaaagtatgagaaagcccattattgccggcaactggaagatgaacaagctgccctgcgagggcgcggagctggtcgaggcgctcaagtccaaggtcgcggacgcccagtgcgaggtcgtcgtctgcgtgccgtttgtggaccttgtggcggtcgcggcggcggccaagggcagcaacatcaaggtcggcgcgcagaacatgcactgggagaagagcggcgccttcaccggcgagatctccgcggacatgctcaaggccgtgggcgcgcagtacgtcgtgctcggccactccgagcgccgccagtacttcgcggagacggacgagaccgtcaacaagaaggtcctggccgccgtcgcgaacggcctgacccccatcatctgcgtgggcgaatccctccagcagcgcgaaaacggcgagacggacggcctggtctccatgcagacggtcaaggcgctcgaaggcctgaccggcgagcaggtgcagaaccttatcatcgcctatgagcccatctgggccatcggcacgggcaagaccgcgacggacgagcaggccaacgagaccatcggcgtcatccgcaaggccatcgagggcgcgtacggcaaggcggtggccgacgccacccgcatccagtacggcggcagcatgaacgccaagaactgcgccggcctcatggcgcagcccgagatcgacggcggcctgatcggcggcgcgtcgctcaaggccgaggacttctccatcatcgtcgcggcggcgtccgcgaccgtcaagtaagagggcagacactatgaaaaacatgacggcactcatcatcatggacggcttcggcgagcgcgccgaaacgcagggcaacgccatccggcttgccggcacccccaacatcgacaagctcaaggccgagtatccccacacggtcatcggcgccagcggcatggacgtgggcctgccggacggccagatgggcaactccgaggtcggccacctgaacatcggcgcgggccgcatcgtctaccaggagctgacccgcatcaccaagtccatccaggacggcgacttcttcgccatccccgagttcgtggacgcgtgcgccaaggccaaggccaacggcggcaagctgcacctgatcggcctgctctccgacggcggcgtgcacagccacatcacccacctcttcgcgctgatcgacatggccaagcgccagggccttaacaacgtctacgtccactgcatcatggacggccgcgacaccccgccttccagcggcatcgagtacgtcaagcagctccaggactacatggacaagatcggcttcggcgccatcgccaccatctccggccgcttctgggccatggaccgcgacaagagatgggagcgcgtgcagaaggcctacgaggccatctcctgcggcgtgggcgacacggccgcctgccccatctgcgcgatggagaacagctataagaacgagaagacggacgagttcgtcgtgccctgcgtcatccagaaggacggcaagcccgtggccacggtcgaggccggcgactccatcatcttcttcaacttccgcccggaccgcgcgcgggagatcacgcgcgcattcatcgagccggactttgcggactttgcgcgcctgggcggctacaagcccgtcacctatgtgggcatgacccgctacgacgagaccttccagaacatcgagacggcctttaagcccgagacgctcaccaacaccctgggcgaatacctggccgccaacggcaagacccagctgcgcatcgcggagacggagaagtacgcgcacgtcaccttcttcttcaacggcggcgtcgaggccccgaacgccggcgaggaccgcgtgctcatcccctcgcccaaggtcacgacctatgacctcaagccggacatgagcgcaaacgaggtcacggagaaggccgtggagctcatcggcagcggcaagtacgacgtcatgatcctgaacttcgccaactgcgacatggtcggccacaccggcgtgctcgaggcggcggaggaggccgtgcgcacggtggacaagtgcgtggccaaggtcgtggaggcggttctggccaccggcggcgcggcgctcatcaccgcggaccacggcaatgccgacatgatgatcgatcccgagacgggcgagcccttcacggcgcacaccaccaacaaggtgcccttcatcctggtcgatccctcccgcaaggatgccaagctccgcgagggcggacgcctggcggacctcgcgcccacgatgctggagctcatgaacctgcccaagcccgccgaaatgaccggcgagagcctgatcgccaagtaagcaacggcataaagaaaaaagcccctgcgccccgtaaaaaagggggacgcaggggctttccttttgtccttttattccgcctcgacgtgcgtccagctctcgatgccgcggtagggctcgcccgcgtggatgacgttggggatggtcaggcactcgcccgcgatctgcgtgctcgtccgcatgcagagggtgtagacgggcaggtcctcgatgatgcggttgtagacctgctgcatggcgttgtaatacgcctcctcggtctgggccgtgtccaggctgtccagcgcggcgtccatggtcgcgttctggtatccgctccagttgttggtcccatccgagcgcaggagcgaggtcaggtttccgtcgtccggaagctgatagccgacgaggagcaggtcgtattcgcccgtctgccacgtctcggacaggtccgagaaggccacggtctccacctccacgcggatgcccaccacgctcagctgcgtggccaggcggtttgccgcgtcccggtgggacgaattgtcctcctcgttggtcaggagcctgagcacgaggttctccgtgagcgttccggtctgcgcttcctcctcgcggcccagcaggttctgcagcatctcgctgttggcggcggcggtctcgggatcgatcgtcgcctccggggcttcgctgggcgccggggtttcggtcggctcgggcgtggaggtggccaggcggtcgacgtacccgtccccatccatgtccgtccagccgagctccgtcaggagctcccgcgcgcgctcggcgtcgtattccaggcccacgacccgctcggccagccagctgtccgggaggacgggcacgtccacggccacgccgtggttctggtaggtgttggtgatgatgtcgtgcttctccagcgcgtgggcgacggcctggcggaggcgcaggtcgcccatctggcccgagaggttggggatgagcagctccgcctggccggtcaggtagtcctgccgggagacgttgctgcgctcggtcacggaggacacggtcagcatgtccaccgcgcagacgtccagcagccccgcctggaaggtgttgagcacggacgcatcgttctccagcgccgtggcgtggatggcggggatctgggcgggcgtgcgccaccagctctcccaccgctccaggtccagggaatccccctcgctgtaggcgctcacccggtagggccccgttccggcggggtacgtattcccctcctgggagctgacgatcgggaaggtcagcgcgtagagcgccgcatacccctcctccgtgtccacggacaggaggcgctccccctccgcgcgcatccccgtgatcggggcgacgacctccttccacgggctctcctccgccgcgaggatggcctcgtaggacgccacgacgtcctgcgcggtcaggccccttccatcgtggaagaggatgccctcgcgcagggtgatggagtagccggtctccgtccgggtgacgctgccggccagccagttctcgggctgatagcggtcgtccaggcgcatcaggccctcgtagcagagcttcatgagcccctgcatggccgaggaggggttcgtaaagggattgagctccccggaggccgagggcatggacaccgtcagtgccgtggattccgcctccggggcgggcgtggccgtggccgtcacggccgtcatctgcgaccagttgaaggactcctcactctggcaggcggatgtcgtcatcatcaagagtgcacacaagcacatcagggtaaatcgctttatatttctcatgggttctcattacctttgctgcgtattctttcacatccctgccgggaatgacgtccagcgtctttccgtcggaagagagctccgggtcctccagccagcggtcgacctgcccctgtccggcgatgtaggcggtcagcgcctcctgccactggccgttgtagcggtcgtgcaggaagttcaggtaccagcatcccaggcgcaggttcgtctccgggtcgtacagggactccgtggtatagggctcggagagctcgaccttggtggcgagccattccccggtgtccggcatgatctgcatcaggccgatggcgcccacggagctgaccgcgtcctcccggaagctactctcgcagtacacgagcgccgcgagcatgcaggggtcgatagaaaactcctccgacgcggcgagcagttccgtctcgtagcgcagcgggtagattatgcgctcgcgccggggctcccagacgcgcgcccacacaaacgtgaggacggccagcgccagcaggagcgcacagacgcaggaaacgctgacggccaggccgatcctcctcttcttcgtcacgccaattcctcccatagctgccgaattttcctctgcgtctcctcgatggagccggaggcgtcgatgcagcggtccgcgcggcgcatcttctcctccagggacatctggctgtcgatgcgcgccgcggccgcctgcgcgcccagcccgtcgcgcgcggcgatgcggcggatctgctcctcccgggagacgtagagcagccaggtcacgtcgcacatgcgctccatgcccgtctcaaagagcaggggcacgtccagcacgcaggccgaaaggccctgcgcccggcagcgctcgatctcccgggcgcacgccgcgatcacgatggggtgcaggagcgcgttgagcgcgcggcgctgctcctcgtccgcaaagacgagcgcgccaagcttccgccggtcgatctcgccgtccgggcggaggatctccggcccaaagcgcgcgacgactgcggcgtatcccgcctcccccttgcgcgtgcttgcccgggaaatggcgtccgcgtccacgatctgcgcgccgaggctgcgcaggtaggccgaggccgtggatttgccgctcgcgatgccgcccgtcagcccaatcaccttcatgccgtcccctccgtcattctgtctgtttctttacttggtttcgtaccagctgcgcccggtcttgacctcggccgtcagcggcacctgcatgtgcacggcgttctccatctcgcgcttgagcagcgcgccgacctgctcggcctcctcccggggcgcgtcgacgatgagctcgtcgtgcacctgcaggatgagctgcgcgcgcaggccctcccgcttcagggcctcggccgtgcggaccatggcgatcttgatgatgtcggccgccgtgccctggatgggcgtgttcatggcggcgcgctcgccaaaggagcgcgtctggtagtttgtggacgcgagctccggcaggttccgccggcggccgaggagcgtcgtgacgtagccctgctgccgccccacgcgcacgcagtcgtccatgtaggccttgatgcgcggatagcgcgcgaagtatttctcgataaaggcggcggcctccttgcgggtgacgccgatgttgcgcgccaggccaaagtcgctgatgccgtagacgatgccgaagttcaccgccttggccgaggagcgcatctgcggcgtgacctggtccaggggcacgtcgtagacctcggcggcggtgcgggcgtggatgtcctcgccccgcaggaaggcgtcgatcatgttctgctcgcccgccatgtgcgccaggacccgcagctcgatctgcgaatagtccgcgtccacgagcacgttcccctccgcgcgggggatgaacaccttgcgcatcacgcggcccaggtccgtgcgcacggggatgttctgcaggttgggctccgccgaggagatgcggcccgtcgccgtcacggtctggttgagcgtcgtgtggatgatgccctcgtcgtccgagagcttgagcagcccgtccacgtacgtggacttgagcttggaaaaggcgcggtactgcaaaaccagcggcaccaccgggtgcgcatgtaccagcccttcgagcacctcggcgtccgtggagtagccggacttcgtcttgcgcccggcgggcaggccgagcttctcaaagagcacggcgcccagctgcttgggcgagaggatgttgaacgtctcgcccgtgacgtcgaagatcgcctgctgcagctccgcgatcttgccgccgaattcctcctgcagctgccccaaggcctcgcggtccacgcggaagcccgcgcgctccatgtcaaagagcacggcggacagcggcgtctccacctcgtcaaagaggaccttcatgccctgctcgagcagcgtcttctcctgcacgtcggaaaggcggtagaggtttgccgccgtcgccggcgcgccgagctgccggtcgcagagcttttccacgctggcgcagtccgcgggctcgatcaggtaccccgcgatgcacacgtccatatagggcgcctccagggtgaggcccaggtccgcaaggtccgtccgccatctcttgacgtcgaacacgcgcttctgcgccccgcccgcgagcaggggctgcagggcctggagcgccgtgcgctcgtccagcccgggcgagagcaggtccccctgcagggggatgcgcgcctgccgcccgcggtcgtccgccaggcacagggcctccggcgtgcgcaggagcgctaccgcttgaatctctccctgaataaacgaggcgaccgcctccgccgtgcccagctcctcctccggcgcaaaggcgggacccgcctccccgccgtccgcggccgcgcgcgcctcctcgggcaggcgctcgagcagcgtgcggaagccgagcctgcggaaggccggcgcaaagcggtccgccgcgggcagcagcgcggtctgccggtcaaagcgcacgggcgcgtcgcggtcgatggtcgccagctccttgctcaggcgcgcggtctgcgcgcccgcgcgcacgcgctcgccgagcttgcccttgatggcgtccgcgttgtcgagcacgttttccagcttgtcgtattcgttgaggagctttagggcggtcttttcgcccacgcccgcgatgccggggatgttgtccgaggcgtcgcccatcaggcccttgaggtccgggacctggtcgggccggatgccgtagtttgccagcagcgcctccggcgtcaggtcctcgatctcggtcaggccctttttcgtgaaccagacgcgggtcttctccccgatgagttggaaggaatcgcggtccccggtcacgagcacggactcggtgccctgctcctgcgcgctgcgcgagagcgtgcccagcaggtcgtccgcctcatagccagccagttccacctggtggatgccgatctcgcccagcacctcgcgcagcatggccatctggggccgcagctcctccggcatgggcttgcgcccggccttgtagtccgcgaacttatcgtggcggaaggtcggcgcgtgcgcgtccagcgccacgatcaggtaatccggccgggcctcgccgatcaccttgagcagcatgctgaaaaagccgaagagcgcattggtgtacaccccgtccttggaaagggcggggatggcgtagaacgcgcggtgcatcagcgaatatccatcgatcaggaccagtctctccatcggttcagcctcccgtttcgaaatgctcttccctacagtataacacagattgcgcccggcaaggagatctgcgcgcaggcgtcgaatcattttacacacgaatccacttttcctaaggaggcaacgcgcaatgaaactcgccatcggttccgaccacgccggctatccgctgaaggttcagctcctggacgtccttcgccgcaagggccacgaaatccaggactacggcagctacgacgaaaagcccgtggactttcccgacatcgccaaaaaggtgaccgccgccatcctctccggggaggcggagcgcggcatcatgttctgcggcacgggcgtcggcgcggccatcgcctgcaacaaggtgcgcggcatccgcgcctcggtctgccacgacctgtacaccgcgcaccagtgcgtcgagcacgacgacgtgcagatcatcgcgctgggcgcgcagatcgtcggcccgacggtcgccgaggagctgatcgacctcttcctcgcggcgcgcttctccacctcggaggagttccgccgccgcgtcgccaagctcgacgacatggacgccgcccgctgaggcggacaaagcgccccgcccttcccccggctttgggggaggggcggggcgctgcttttcgcgcgttttggagttactttctgcggccctttcgcaccttgcggacgatgaggacggcgatcccgcccgcggcggcgaggacgacgatccaaaccacgatgtacggaatggcggcgtagaggttgacgacgaggtcctggcagccctgcgtgaagtcatcccaggagttggcaagggccgtgcgcatgcgctcgcccaggctcgggtttgcggagatcgcgcgccgcacctcgtccacgtagatatagaccgtggagtagttgacgcgggcgtcccagtagttgagcgttccctggcagctctcgatctccatctccaggcgcgagagctcggactcgatctggatgagctcctcgacggtcgtggcccggtccatcatctccagcacgcggtcgtactgcttctggtaggcctggagcctgcggtcggtatccgtgtactggtcggtcacgtccgtctcgctgatgctgctggaagtcacgatgccgacctgcttggcctgctccacaaaggcgtccagctggtccgaggggatgcgcagcgtcagcgagagggtgcgggggttctcgccggtctcggcgctctgctcgctgccccattcctcgcgggaggtgatgaatccgcccatggacgtcaccagctcctccagcgcggccatgtcctcgctgtagttctcggtctgcatctggatggtggcctcgcggatgatcttcaggccgtattccggcgtctccgcgctgcgcgccgcggtcccgtccgctgcggcgtcatctgccgcggcgccggcatccatggccgccaaggccgcgttgggggccggagcggccggcgcctcggccggcgcctccacagtttcctcggtctgggcgtaggactctccgccgccggcgctgtcccagcccatctccgtcgtggcggccatgttcatcagcgacgttttgggcgcggacgaggtggcgttcatggctccgcccaggaacgtgcccagggcgagcgtcaggcacagggcggccgcgatgcccccgccgatccagtacggccgcgtgcggcggcgcggctggcgctcgcggcggatgcgctccatcgtgcccgcgacgagcccctccggcgcgcgcacgccgtcgtcgaggtggcgcagctcttccaggagcagccgctgctcttcatatcgcttccggcacccggggcagttctgcatgtgctcctgcatcgcctgctgctccagctccgacaggctgccgtccaggtaaccgtctaaatagttttcaaacgtctcgcatttcatgccgttcttcccttccttccgcttcattagacgcgtttttttgcggaaagttccgtctttcccaggagaatctcgcgcagagcgctgcgcgcccgcgaaatccgcgatttgacggtgttgaggttcaaatcgagaatctgcgcgatctcctcgtagggcaagccctgcacgtcgcgcaggatgagcgcggcgcgctgctccgaaccaagctgagagatggcctccgcgaggtcgcggcgcagctccgcgcggtccagcgccatttccggcgtttccgcggggtccacgggttcgaagccattctcctccagggcctgcatggactccgtctccccccggcgcctgcggcgcagttcgtccaggcagacgttgctcgtgacgcggtagagccaggtggaaaaccgtgactgccctttataggaagaaagggagcgccaggcgcgcaaaaacgcctcctgcgccatatctgcggcatcctgctcgttgcccatcatgcgcaggcacaggcgataggtcgcgtcggcatagggctcgatgagcgcctcaaacgcgcgctcgtctccgcggaccgcccgctttaggttcagcatatcgaattccatgttctcctccccccatgcgccttgcgcggcgcgaaggtttcgggccgccgtcccggcagccgtttgctcttgcattttccagggtttcatggtatactcagttttgtacttatgccgaagtgatggaatggcagacgtgacggactcaaaatccgttggtagcgataccgtgtgggttcgagtcccaccttcggcaccacgtcggagcaaagtccgctttgctccggcgtcttttttctgcctgcggcaaaaaaagacgccatccgcacgctcccttgctcctcctttccaactgcgacccgctttgctggctcgcagttggcaggccgccctgcgggcggcattcttttccaatcggaggtctcaggggttcccccgttccttccaggccagagggaccgtccgctttgctccgatattttttgtccccggcaaaaaacgccatccgcacgcccggccggcaatcctccgctgcggtttcagtataccatattcccttcgctctctcaagacaaggcaggcgctgcgcccatttccattctctttagacgttctgcgcgcctggtttgtttcgaatctgcaaaaaaagtgcccggttttgcatttggggactttccttttcctgccgtcctgttatatactatgcatagagcggaacataccgcaataacgacagggggttactctcatggcaaaacagggagacgaggtactcaaccagtttcagcaaaccgtgatcgaagaagaagtcgaagtgcgcgatgaagacaagctcaagatcggcatcatcggcacgggctggattgcggaatcgcacatcgagtcctacaagcgcatgaaggacgtcaaggtcgtggccatggcggacctgattcccggcaaggccgagaagttcgccgcgcgctacggcatcgaaggctgccgcttctacccggaccacaagtccctgctcgacaacgaggagctggacgcggtcagcatctgcacctacaacacccagcacgcgccctgcgccatctacgcgctggagaagggcgtcaacgtcctgctggagaagcccatgtgcgtcaccaccgaggaagcggtggagatcatgcgcgcggagaagaagagcggcaaggtgctctccatcggcttccagccgcgctttgacgagaacatgcagatgatcaagaagatcgtcgacagcggcgtcctgggcaagatctactacatccagaccggcggcggccgccgtcgcggcatcccgaattccaccttcatcgagaagtccaccggcggcatcggcgccatgggcgacatcggctgctactctctggactgcgtgctcaacgccatcggctatcccaagcccctgacggtgacgggctacacctccaactatttcggcaccagcacggagtatcagtccgaggcggacgccaagcgctttaacgtggacgacttcgcggccgcgttcgtgcgcctggagggcggcatcatcctggacttccgcatcgcctgggccatgcacctggacactcccggcgacagcatcatcatgggcaccaagggcagcctgcgcatcccctccaccgactgctggaacggcacggtcggcggccccatgaccatctaccacgacgtcgccggcgcgcagacgcagaccaccatcccggtcatcgagtccaagggccccggcctgttcgaccgcaagatccgctccttcctggatgcggtcaagaacggcacgcccgcgcccgttcccaccagccagatcctgtacaaccaggccatcatcgaccacatcgtcaagtccgcggagctgggccacgaggtcgaggtcaagatcccggagatctaaaccgcacactgcaaaaaaagaatgcagaagcccatggcttctgcattctttttcgcttcttaaaatccgctattcgctctctcccgtaagcgccgcaagctcggggtgcgccttgcggacgcgctccaggccctggggcagccggtcgttgaccatgatgtgcgcgtcctcgccgttgtcctcgtagtacttcttgcgcaggcccgccttcttaaagccgaagttcttgtagagcgcgagcgccggctcgttgctcacgcgcacctcgagcgtcatgtactgcacgccgacgtcgatcgccgcctggatgagcgcgtagagcacgcgcgtgccgcagccccggccgcgccaatccgggtgcaccgcgacgttcgtgatgtgcccttcgtcgatgatgagccaggtgcccgcataggcgacgaccttctccccctccagcgcgacgaaatagcgcgccgccgtgttggagagctcgccgatcaggtcctgcttcgtccacggcgtggcgaaggagccgtgctcgatctccatgatgccgtcgatgtcctccaggcgcatttcgcgcacggcgatctcatccgccatgggattcctcctctcccgcgaggccgagcctcgcgtttcgcgcgcgctcggcctggggcgcgcgcaggtagagcggccggagcgcgtcggcggaaacgtaggtctccggccgcgcggccgcaaggcgcgccgcaaacgaggcgcgcaggccccgcagtggctccggcgcgatgcgcgcaaagggctcctgcgcaaggcgcgcaaggtttgccgttgcgccgtccccgaggaacaggcagggcttgccccgcccgcgcaggtcgtccaggagcgcctcgagcttgacgggcgcgtcgtcggtccggcgagcgccgccctcgaagaccgcggcgtagacctgccccgcgcgcgcgtccaggatcgggcagacgagtcccgggaagtccgcgccctgcgcggcgagcgcctcgagcgcgtccacgggcgcgcagggcttgtccccggcaagccccatgaccgtggccacgccgatgcgcacgcccgtaaaggaccccgggccgaccacgcaggcaaatccatccacgtccctaagctccagcccggcgcagcgcagcgcgtcctcgaccatgggcaggagcaccgcggcgtgcatccgcccgttgtgcagatagctctcgtagagcagcgcgtcatccctcgtcacgcacacggatgccgtgctggacgaggcgtccaacgtcaaaagtaccatgcattccctccagcaaaatcgtgcgctcgtcgccttcgccctgcagcgtcacgtcgatggcccgcgcgcccgcaaagatcgagcccgcgacctcgcaccactccaccgcgcagacgccctcgccgccgaagaagatctcgtcaaagccgaggtccaggacctcctcctccgagcccaggcggtagaggtcgaagtggaagaccggaatcctcccctcgtagcggttcatcagggcgaacgtggggctggagacctcattttcgtccccgcccaggccgcgcaccaggccgcgcacaaaggcggtcttccccgcgcccaggcccccgtgcaggagcaggaggtcccccgcctccagcgccggggccagggcggcggccgccgcctcggtctgctccgcagactgcgtccagatctccaccatcttacagctcgaccttctttgcgcccacggggcggatgtccagcaccgtgcaggcgcccgcgccaaagaccgcgttcatcttctcgacgtaggcggcgagcttgtagtgcggcacaaaggcgaggatcgtgcccgcaaagccgccgccgtgcacgcgccaggcgccgctgccgcgcagcatccgctcggacagggcgcaggccagggcgaggctctgctccgtgctgccgccgacgtagaggttctgcagcagcttccagctcgactccccgctgcggatcacgttgtccaggaaggcgtccaggtcgccgttctccagggccgtgtacatggcgcggacgcgctcgttttcgtcgtagtagtgcagggcgcgcagcaccgcgcggtccgaggtcttttggcgcacctcgggcaggcgctccaggagctgctcgaccttgacgtcgcgcaggaccttgccgcccagggcctcggccacggcccgcatctcgcgggggatggcggcgtattcgtccgtcaggtcgtcgtggctggaattggtggcaaggaccacgaggctgaagccccgcgcggcaaagtcgaaggaataggcgccgatcttgggatcggcgtgcttgaagtcgatgccgaccaggccgccgatggagcaggcgctctggtccatcaggcccgagggcttgccgaagtagttgttctccacccactggctgatcttggcgcgggtgacgccgtcgaggatggagccgttgtacagcccgtccaggatgcagaccaggagcacctcaaaggccgcggaggaggagagcccggacccggagagcacgcgcgaggtgaccgcggcgttgaatccgccgatggcgtagcccatgtcgtgcagcttgcggcacacgccgcggatgagggcgtcggtggtgttcttttccgcttccttcttttccaggtcgcgcgtgtccacgacaaagggcttgtcgtacccctgcgagtagagggtgatgatcccgtccccggtgggcgcggcggcggcgagcgtgtccagcgtcacggccgcggccagcacgaggccgttgttgtggtcggtgtggttgcccacgatctccgtgcgcccgggggaggagaagaacgcgggcgcttcgccctcgcagccgaagtgctccgcataggtggtgagcagggcctcgtagcggtcggcctgttcggcggccgtgcgctccgtccctccgtagagcaggtggaattccctctttgccgcctcggtgcgcaggcttgcagcgatggtgcgcttgtcaaacatgtccatgcctccgtttctttccgcgcatgcgggcgcggagacgtctttctccctttattatgaccgcagccggcccacccgtcaagcgcgcgtttcccctttcccatcatatttccatccggattcaacaaatttccttacacatttgccttcacacgcgctataatagaagtgacaggaaattacataaggaggtcatcggcatggcgaatcatccgctggaaggattgttggccttttcgctgcatcatcacttgatcgagcggcaggacgtaccgttttgccggaatctgctgctggatgtgctcaagctcgaggcgccctgcgcgccctatctcccctacgaagcggatgacgatcctctcccgccgacggtgacgccgtaccttgcggccctgacggaagacgcggtctcccgcggcgtctgcgcggacacgatcggcgagcgcgacgccttcggcgcgcgcctgatgggctgcgtcacccccaggccctcggaactttgcgcgcgctttctgcgtttgtacaatcaagaggggcctaaggcggcgacggactggttctaccgcctctgccgcgacaacaactacatccgcgtggacgacatcgcccgcaacattcagtacaaggccgataccatggtcgggccgctggacatcaccatcaacctctccaagcccgagaaggacccgcgcgacatcgccgcggcgcgcctgaagccgagcacggcctacccgccctgcatgctctgcgtggagaaccccggctacgcgggccggcccggcttccccgcccggcagaaccaccgctttgtggacctgacgctctgcggcgagccctggcacatgcagtattcgccctacctctactacaacgagcactgcatcgtgttcaacgaggtccacaagcccatgcacgtggaccgctcctcgtttgagaagctctttgcgtttgtggaccagttcccgcactacttcatcggctccaacgcggacctgccgatcgtgggcgggtccatcctctcgcacgaccacttccagggcggggcctacaccttccccatgacggtcgcgcccctgtccctctccctgcacagcccagacgacaaggtctctgccggcatcctcaactggcccatgagcaccatccgcctgcgcggcggcgacgcgggccgcatgatcgacgttgcgcaggccgtgcttgcggcctggcggcagtggagcgacccgagcctggacatcctgcactacacggacgcgccgcacaacaccatcacgcccatcctccgccgcgagggggaggaatacgtcttcgacctggtcctgcgcaacaaccgcaccacggccgagcacccgatgggcatcttccacccgcacgcggacctgcaccacatcaagatggagaacatcggcctgatcgaggtcatgggcctgttcatcctgcccggccgcctgaaggaggagctccgcgcgctggagcagctcctcgtcgggaaccgcgagatctgcgtggacccggacaccccgctctacaagcacattccctgggtcaacgcgctgcgcagcaacgtgcgcatcaccccggagaacgtgcgcgccgtgctgcagcagggcgttgcggacaagtgcgcgcgcgtgctgatggactgcggcgtctttaagcaggacgacgcgggccgcaagggcttcctgcgcttcctggaatccgtgggctttgcccgcacctaaggattccccctttgtccccgaagaaagaaggcatgcaccatgatgagaggtccaaggcccccgcgccgcggcgggcctggcgggcctggcaggcctggcgggttccgcggtcccggcggtccccggggcggccgtcccccctttggcggcggccggcgtccctttggcgggccgcgccggatgggcggcccgatggggggaggcggcatgccgcccccgccgccccccggccgtcccccgcgctaccggggcgggtgcctggggtgcctgctccccgtcctcggcctgagcttttcgctggttctggcccttgtgctgctgatttgcctgctctaaccgattccccccaagatggcagaccggaaaggaggtcttcgcatggcagtctacgcgtccaacggcatcacttctgtcgccgcatccctcgcgcgcctgatgggcttttccccgccgcacggcgccggcgaacccaaccttgtgctggagcggtatgcgcgcgccgcgctcggcgatcgccccgtccagcgcgcgctgctctaccatcccgacggcatcgcacactatctctttgcgcggcacacggacgccttcctgcccgtgctgcaggccgcgcccctggccctgccgatgcagtccgtctacccgccggtgacgccggtctgctttgcctccatgtacaccggcctgccgcccgaggggcacggcatctgcagctatgccaagcccatcctgcgggtggacacgctctttgacgccgccctgcgcgcaggggtgcgcccggccatcgtctccacctcgggcagcacgctctccaagatcttcttggaccggccgatggactactacatcctggactccgtggacgaggtcaacgcgcgcgcggagcagctcctccgggaggacgagcacgacctgctcctcgtctacaacgggaattacgacgccgccatgcaccgctacgcgccggagagcccggaggccctgcgcgcgctgcgcgccaacgcggaggcctttgcgcagctggcctccatcgcgcggcggcattggagcggatacgactcgctcctggcctttgcgccggaccacggctgccacgagatcgagggcggcctgggcacccacggcctggatgcggagacggacatgctcctcccgcacttctacggcgcctggccccgcacgcgctgagtccgcgcccgccaaaaaccccgcttccccaccgcctgcacaggcgttggggaagcggggctctttttttattcctcgcgcatctcgtagcgcgtgccgtgggagaagaggacgccatccgtcagccggatgcggaggatgcaggtattcacgtcctggaagtcgttgtgcccgttgtcgatccacgcggcgaacgcattccgcagcttctgcgcgatggcggcgttttccggcctgccgaagtacccgaggttttcgcccacgccgtggccggtgaaccaatcgccgcacagcgccacgacgggatgcgccgcgatctggcgcatcttgttcgaaaggccgtgcgtgaggacgtagaacgcgccgccgtcgtacagcgcgttgacgctgcgcacgtgcgggatgcccgcctcgaccgtcgccagcgcgaggacggaatcctttccaaagcgctcggcgaggaccgcctcggcctccgggctccaatccgccatggccgctcccacccctctacagcagcgccgcggcgtccgcgtccagcaggatggtcgcgtggcggtgcatctgcaggatggaggccgggaccatggggtccacggggccgtcgaccatgcgctttaccgcctgcgccttgttggggcccgtggcgaccagcacgatgcgccgggcctgcatgatggaggcgatgcccatggtcagcgcgtgcgtgggcacctgctcgccctcggcgaagaagcgccggttgtcgcggcgcgtctgctcgctcaggcgcacgcagtagctgttcgtcgtgaagtgcggcgcgggctcgttgaacccgatgtgcccgttggagcccaggcccagcagctgcaggtccagcccgcccgcggcggcgatggccgcgtcgtaggcgcggcactcggcgtccgggtcctccgcaaggccgttggggatgtggatctgctccgggcgcatctgcaggtgcgagaagaggttctcctgcatgaaccgccggtaggagcaggggtggtccggccccaggccggcgtattcgtccaggttgtacgtcgtcacgttttgaaagtccagaacgccccggtgcgccatggcgatcagttcccgatagatgggcaggggcgtcgatccggtcgccaggcccagcacgctgcgcggattgtccacaacctgtcccgcgatcaggaccgccgccgcaatggaagccagatccccgttgggatagacacgtacgttcatggtcacacttccttctgtctatcgatttgttaaaatcgcgtaagctacaatttgttcacaaacgcccccgcctgtccacgccttttcccggccttatccacagcggcggctgcttttccacaggcgttgtccacttttccacagattgccgtcagttttgtggaaaacgctccgcgcaggcggacaaagtgttttatccacaaaatctgtggataacctgtttatattcccttcgtgttgtggggatatcgtctatttttcgtcaagattgtggaaattccttcccctgcgcgggctatttgtggtatcgctcgccggactggatgcggcaggcgcggtagagctgctccaggaacaccacgcgcatcatctggtggggaaaggtcagcgtggaaaaggagaggcgctcgttggcgcgggcatagacctccggcgacaagccgagagagccgccgatgacgaagaccacgcgcccgcgctgggcgatctgctccaggtgcttggcaaagcccacggagtcgtaggtcttgccctcgatggccagggccacgaccacgtcgtccggccggatcctggagaggattcgctcgccctcggcgcgcagcacctgggcctgggcgccggcgccctcgtgcgcgggctcgggcgcgtcctgcacctccaggatctccagggaggcatagcgcgccaggcgcttttcgtattccgcgcaggcctcgcgccaatagcgctccttgagcttgcccacgcagaccagggccgcgcgcatcagaggcctcctcccgccatctgcacgccggagagcgcgtacaggcaggctgcgcacagcagcgcgacgagcaccggcgcccagacccaggccggggccctgccctccgcgcgcggcaggggcgcgctccggtggctgcgcgtggtgatccagagcagcgcgaggaagagcgccgtgcccacgctgaaggggatcaggagcagaacgccgcccaggaagaggaaggccggctcctgcgcggcggccgcgctctgcgccgtgcccagggcctccagcatcgccccggagaaataggtgatgagcacggcgatgccgttttgcaggaagtgccacacgaccacgtaccagatggagcgcgtccagtacgccacgaggcacaggccgatgccgagcaggacgtggccgggcagggcggagaggtccccgtggaccagcccgaacaggcagccgcccagcacgatggccgcgcccggccgcaggcggcgcagcaggctcggcagcagcaccccgcggaagaagaactcctcgcagagcgcgggcacggccgcgatcacgaacagcgccgcggcaagctgcgccgggccctgcggcgcggcgacgttcgaggcgaccgtcgaaagccccagcgcctgcaaaatcgccatccagcaggccgtgacgccgttgacgaagaaataggcgcaaaaggccaacggcaccatcagcaggatggcgctcgtcggcttttgcgaaaagacgtcctgggcagaggagtgccccaggggcgtcaggaagtacagcagcgcgggcacggcgatgatcccggcctccacgccgaccatgtacaggacgtatcccgggccgtaggcctccatctccaccccggaaaacagcagggggacgagcatcagcagcaggggaatgaccgcatacaggcagttgaccgccagcagcttctttgcctctcgattcatcgccttcacctcaaggccattatacccgattgcgcgcgcgctgtcgaccgcaagaaggggatgcggtcagatttcgtcgcctgcggcggtgagcttgggggtgaggtgcaaaatctccccgccccgctgcacctcgagctccagcgtctcccccaccttgtgggagaagaggacgtagcgcaggtccagcagggtcctgcactcccggccgtccgcgcgcaggaggatgtccccggtctggatgccggcgctctgcgcggcgctgcccggctcgacgtcgatgacgtagaggcccgtcgtcatggtgctgttggcgtcgtaatagcgggcgatctcgctgtcgaagaggtaggcgcccatcttgggcgtgacgtacgacccgtcggcgaggaagtgctcgacgatgggccgggcgatgtcgatggggatggcaaagccgatgcccgcggcctcctccacgcgcacggtgacgatgccgatcacctccccgcgctggttgagcagcggcccgccggagttgccggggttgatggccacgtccgtctggatgagctgctccatgaaggcggtgctgcggccggagggcacctgcagcgtccggttgagggcgctgacgatgccgccggtgacggtgtgctgaaactgcagcgcgagcggcgtgccgatggccacgacctgctcgcccacgcgcacgtcctccacgctgcccatggcggccgcgggatagctgccctccctggccttgacgatggccaggtccagggcctggctgctccagaccgcgctggccagctcctttgtgccgtcggcgaagatgagcgtgacctccgcgccctcggcggcgacgtggtggttggtgaggatgtagccgtcggcgctcacgatgacgccggagccgatgccctgctggccgttctgccgggtggcgatgccgacgacgctcggcgaaaggcgcgcgaccatgtcggccaggctctccgcctcgcctgcggcctgctggcggatggtcacgggttccggcgtcggggacggcgcggaattctcccttgtgcacgcaaaaagggccgccagcgcgcacagcacggccagcaaccccattgccttgtggacgttcttcacttggaccctctccctgtgcgaaaagattctcctctcacagggaaaaggcttccgccgcgcggttcgggtacgtcatgcggatctgcacgtcccgtcccacgtgcgcgccgaagtcctcgaccatccgcgcaaccgtcgaataggcgagctccggcacgttgttttcctcgctcaggtgcccgaggtatacgtttggcacgccgatgcccagcagctccgtcagcgcgcggccgcaggcgtcgttggacagatgccccttgcccgagagaatccggcgcttgagccgctcgggatacgagccgtcggtgagcatctgcacgtcgtggttggcctccagcaggagcacgtccgagccctccaccctggtcaggagttctttcgtagtatgccccaggtccgtcaggaccgatacctttctgccgccgcaggagagcgcaaagcccgtgggctgcgccgcgtcgtgcgggatggagaagggcagcacgttgacgcggtcgatgtaaaagtcctcgtccggcgtgaattcacaccgctggcgcgcggggatttcgcccaccttgtcggccatcgccgcccaggttccggggctggcgtagacctccatgccatatttgcgcgcaaggacgcccacgccgcggatgtggtcgatgtgctcgtgggtgacgaggatcgcgcggacgcgccgcatgtcaaacccctggctgcgcgccgcctcgtccaggatctttccggtccggcccgcgtcgatgagcagcagggtgtcgtcaaaggcggccaaggtgctgttccccgtcgatccgctgaacagcgagcgaaattccaagtgcatctctcgttcctctttttttcggggcgtcttagagctgcggcaggatctcctgccagacgcagtccaggatgccctgcagattcttctcctcgtgggaggtgatggcgatcaccgcgtcctggtccgggcagacgatgcagtactggccgtttgcgccgtccccgcggtagacgtgctcgggcacgcacatccagaactggaagccgtagccgcagctccagtccggcgtgccggcgttgtcgatctgcttgcgcgtggccatggcgaggtagtcctcgggcacgagctgcttgcccgcgtaccgcccgcggttcaggagcatctggccaaagcggctgatctccttggtgttcaggtgcagcccgccgccgccgagcgtgatgccgtcggggctggtgaaccactggggattgcggatgcccagcggcgcgaagatccggggctttaggtactccagcgcggtcatgccggcctgcttctgcaggatggcggagcagaggaaggtcgcgcccgtgtcgtaggcaaagcgcgtgccgggttcaaagtccatgggatagttgaggaagtagtggacccagtcggtgtcctccaggtcgtcgcgcaccgcgcccatgaggatgccctggctgtggcccggggacatggtcagcaggtggcgcacggtcagcgactgcagccaggggctgggcgccgcgtccagcttctccgggaagtaggagatcacctggtcgtccaggcccaggagcccttcggagatggcgatgcccacgccgcaggagaggaaggacttggacagggagtggatgttgatccgctcgtccgtgcgccagaaatgggagccgacctcctcgtcgtgctgccggacgaccacgccgtagaccgtaagaccgttcttctgaatcgcttccgcaaagctcttgagctgcatttcgctttcccccctggtaaaaattctatcaaaattatagaccaatttccgaaaacttacaagcgtccgcgcccgggggcgggaaatgggttttcgttgacaaagcgacccctggccgagtacaatgaaactgtatatggatcgccgcccttgacagacacagggagcgcggcagaacacaggggggaatcttttccatggaaaaaaagtcctttgacatgatgtcctttggggagatcatgcttcgcctttccccgccgcaaaacgagcgcatggtgcgcggcgaggtctttgaaaagcgcgcgggcggttcggagctgaacgtcgcctcgggcatctctctgctgggcctgcgcacgggcatcatctccaagctgccggccaatgaccttggcacctacatcaagaaccgcgtccgctttgtcggcgtctcggacgactacctgctctacgactcgacgcccggcgcgcgccttggcgtctactactacgagagcggcgcgcacccgcgcaagccctccatcgtctatgaccgcatgtactcctccatcaacaacatctccctggaggagatcccggaggaggtctacaccgacgcgcgcatcttccacaccagcggcatctcgctcgcgctgagcgccaacacgcgcgcggtggccatcgagctcatcaagaagttcaaggcgggcggcgcggccatctcctttgacatcaactaccgcgccaacctttggagcgaggacgaggcccgcgagacgatccagaccgtcctgccctatgtggacatcctcttcatctccgaggagaccagccggcgcatgttccgcaagaccggggaccttcgcgacatcatgaagagctactgcgcggagtacggcgtgcgcatcgtggcgaccacccagcgcacggtcatcagccccaagatccacaccttcggctccatcctctactcccgcgaggcggacgccttctacaccgagccaccctatgagaacatcgacgtggtcgaccgcctgggctcgggcgacgcctatgtcgcaggcgtgctcttcggccttctgcagtacaacgacccgcgcaaggccctggagttcggcaacgcgaccagctcggtcaagaacaccatccccggcgacctgccctcctccgacttcaaggagatcgcctccatcatcgcgagccacaagtccaccggcccccagagcgagctcaaccgctgaaaaaaaccgcaagaaaggcagtgcacatggattacatcgaatcccttcgccgcaaaatcggtcacgacgagatcatcgccgtgggcgccggcatcttccccgttcgggagggcaaggtcctgctccagcgccgccgggacaacggctgctggtccatgcacggcggctccctgaagatcggcgagacgccggaggaggcggcctgccgcgagttctacgaggagacgggcctgaccgccgaggacctgacgctcctgggcgcgttttccggcccggacacccgctacacctatcccaacggcgaccacgtcttcatcgtggggatcttctacatctgcacgcgcttttccggcgagccgctcatcgacccggacgaggtcacggagctgcgctggttccccgtggacgcgctcccggcgcgcgaggagatcagcccgcccgaccgccgcgcctttgccgcctttgccgagcacatgcgcgcgctttaaatccttggcgcaaaacgggcgccggcccctttaagagggtcggcgctcgttttttctgcctcttttcgcaagtccgtcaggaggccttttcaaactggctgttgtacaggtcggcgtagaacccgcccttggccaggagctgttcgtgcgtgccctgttcgaggatgtccccgtccttgagcaccaggatcaggtccgcgttcttgatggtggacagcctgtgcgcgatgacgaagctggtgcggctctcggtcaactggtccatggccctctgggtgatcagctccgtgcgggtatcgaccgaggaggtcgcttcgtccaggatcagcatggggttgccctggatcatggcgcgggcgatggtgagcagctgcttctggccggccgagatggcgatgctctcgtccaggaccgtgtccaggcccttgggcagcgtctcgatgaagtggtagatgccgcaggcccggcaggcctcttcgatctgcgcgtcggagatgccggtcttgttgtagaccaggttctcccggaccgtgccctcaaacagccaggtgtcctgcaggaccatgctgaacaggtcgtggacgctctcccgcgtcatgtccgcggtggagattccgtcgatccggatgcgcccgctgttgatctcaaagaagcgcatcagcaggttgaccagcgtggtcttgcccgcgccggtggggcccacgatggccaccttctgcccgggctggacgtgcgcggaaaagtccttgatgatggtcttgtccggggcgtccgggtagctgaagcggacgtgctcgaactccacctcgccccggacggacgcgggcgcgctgcgcttgccggtctccgcctccatctccggctcgtgcaggaagtcgaagatgtggtccccggccgcggcggcggtctgcatctgggtcatgccctgggccagggtgctcagcggcgaggtgaacaggcgcacataaaggatgaaggccacgatgacgccgaaggagatctgcccgctcatggccagggcggagcccagcacgcagacgaccacatagcccaggttgcccacgatgttcatcaggggctgcatgatgccggataaaaactggctgcgccattctgcgtcgtagagcgctgcgttcatcccgccaaaggtggtcttgatcttgcggttcgcccgggagaggcgcaccacgtcatggccggaatacatctcttcaatatagccgttgagggtactgagattttcctgccgggcggagaagtacttctgcgaccggagcatgaccgccgccatgacgaggaagcccaggaccgttacggccacggccgccagcgccatgcgccactcggtcacaaacatcatcaccaggcacccgaggaactgggcggcggcgctgatcatggagggcaggctgttggccagggcctgctgcagggtgctgacgtcgttggtcacgcggctgaggatgtcgccgtaggacaccttgctgaaatagcgcatcgggacccggttgatcttgcgggaaaggtcctgccgcatgtcccgggacagatccagggtcaccgtcgccatgatgtagtgctccacataggtgaatacggcgctgcacgggtagaggagcagcagcagcgcgccgatgcgcccgattgcggccaggtcgatctccgcctgcagggcgttggagatcaggtccgtgatctggctgaggagattgggaccgatgatcgtcaggatcgcgccaaggaccgcgaacagcagcgcgaccgccatgggaaccttgagtttattggaatagcggaacacctctttgagcacgccggcgatcccgcgcttgctctttccgggggcgctcattctgtttggcatcatgggcatatatgggtttcctcctctcttacgcgcccaactcttcgctggagagctgggagcgggcgatttcctgatagaccgggcaggtcttcaggagctcctcgtgggtgcccatgcccaccatcctgccctcgtccaggacgatgatcttatccgcgtcgcggatggtgccgatgcgctgggccacgatcaggcgggtggtgtccttcagctgccgggcgagccccgcgcgcagcttggcgtccgtgcggtagtccagcgcggagaaggaatcgtcaaagaccaggatctccggcttgcgggccagcgcgcgggcgatggacaggcgctgcttctggccgccggacacgttcgtgccgccctcggcgatgggcgcgtggatgccctcgggcagcttctggacgaattcgctggcctgggccaggtccagcgcctggcggacggcctcctccgacgcctcgccgcggctgtcgccgaacaggacgttctcgcagatgtcgccggagaagaggatcgccttctgcgtcacgtagccgatgcggtcgtacagggcgtcaaaggtgtagtccctgacgtttgccccgtcgaccaggacctcgcccgcggtcgcgtcgtaaaagcgcgcggccaggctgaccagggtggttttgccgctgccggttgcgccgatgaaggccacggtttcgccgcgcttggcggtaaaactgatgttttccaggacgttcttgtccgaggaggggtagtggaaggagacgttgcggaactccacggttccgacctccggggactcggtcctcgcgcccggcttgagggtggtcctggccttcagcacctcgttgatgcgctgggcggagacctgcgccgcgggcatgagcatgatgatcatcacgagcatcatgagggtcatgatgacataggtggcgtaggtgccaaagaccacgatgtcgctgaaggtcgtcagccgcagggccgcgtccgcggcgggcacgttgttgacgatggccgcgcccacccagtagatcgtcagggacagggcgttcatggccagcgtgacgctgggcatcaggaaggcgaaggcccgctggttgaagagctgggtcttcatcagggtctcgttggtcgttttgaatttttcgttctgatactcctcggcgttgtaggcgtggacgacgttgataccgttcaggttctcgcgcgccaccaggttcaggtggtccgtcagcttctgcacccggcggaagcgcggggccacgatgccgatgatgaccaccatcatcgccagcagcgccaggacgaagcccgcggtgatggccgagagcgtccagctcttgttcacgatcttgatgatggcccagaccgccatgaccggcgccttgatgaggatctgcaggcccatggacgtcagcgtctgcacctgcgtgatgtcgttggtggtgcggttgatgaggctcggcacggagaaggccatcatctcctgctggccaaagtccgcgatcttgttgaagaccgactcccggatggagtagctgaagccggcggccaccttggccgtcaggtatccgcagagcacgcagagcgcggcgctggccagcgtgcagcccagcatctccaggcccgtgcgcaggatttcgtccatcgtggtgccgggcgtcttgatgaggaccgtcaggctgctcatgtagtccggcagggagaggtcgaagtagatctgtcccaggatcagcagcgcgcagaccgccgccatgatccattcgtttcgccgcatgtaccgaagcaattttcgcatatgtacctcccgtctatgcattttgtgcgtatggaaaaagtacgagcgagcccgcacgcttctgcgagcccgctcccctggtcaggccgtcccttctttgcccggctgctgcaccaccccgaacagggccaggtccagcagct

SEQ ID NO: 2915 - DNA, 32759 bp, Unknown
  16S sequences of unknown bacteria
aatccaaatagattgaggggggtcttcgttggaaaaaaagcgtacacagttttcaagtaaaatcggctttattttggctgctgcaggttctgccgttggtctgggcaacatttggcgttttccatatttagctgcagaatatggcggcggtatatttttatttacctatattattctggcaattacattcggtttttgtctcactgtaactgaaattgcaattggccgaaaaaccggaaccagctttttgaacgcttacaaaaaattagataaacgatttgcattcattggcattattacactgtttatacctatcttaattttgccttattacagtgtaatcggcggctgggttgtacattttgcatatatgtttatatccggccaaggcatgcaaactgccaacccggattattttgcaggctttatctcacagcccggatggcctatcttgttcttagctattttccttggattaacagctattattgtcatgctgggtgtaaagcgcggcattgaattaacatgtaaaatttttatgcctatgttagtactgatgacagtaggcttagcaatttacattatgacattgcccggtgctatggagggcgtaaaacactatttgattccaaacttcagcgatttttcttttgaaaccgtgctggcagcattgggacagctattttactctatgtcattggctatgggtattaccattacatacggctcttatatgaaaaaagacaccaatatcgaaaaatccacatttacaatcggaatttttgataccggtattgcattcttctccggattgatgattattcctgcaatttttgctatttctccgggcggttccactgagtttggacaaggcagtaccctcatgtttactactatgcctcaagtatttgcaggtatgcctggcggacaagtggtaggcgccgtattctttgttctcgtgtttcttgcagcaattacttcttccataggacttatggaagcaattgttgcggccatccaagacaaattcggctggaaacgtatccctgtctgtattggtatactgctcttttccattgctttaggcatttgctcatctttaggctttggtatttgggatggcgttcaaatattcggaaaatccattctggattcctttgacttcctcaccaacaacattctaatgccaattgtagctttatgtacctgtatttttataggattcttcttaaaacccaaaagtatcattgatgaggtacaggaaactgctccgttccgcttgaaaggattatatgttgtcttcaccaaatggctggctcctgtctgcatcgttattatattggtaactgctttcttgcaggctgcaggcattcttgtcatttagtatattgaaaaaaggaaatgcttaaaacaggcatttccttttttcgttcaaatgaatttcagaaaaacagatgtttgggaatagtattgcaattttatgtctgaaacggtagaatagatttataagataagacaaaaatacaagaaagggcttctcatatgaaaaagaaaatttgcaaaccttgttatgctatcagtgcattatttttcgctcttccttttatggttcctggtgtatccgctgcttctgccgatgccgtttataacgttatgacaggagaccaaaccaactggcctatgattataggtatttctgttgctgctggtgttgctgcaattgcgattattgtggcgattatccttaccattgtatccaaagcgaaaaagaacaaaggttacaaaccaaaacactaatgccattcagcatatgatggaaaaatcaaatatgataaaaaaggacaactgaaagttgtccttttttattttttattcattaggtaccttgacattttttctcccaacaattacaattccaattataaggtacctaatgaattgggaggttgtataatgtcaaaaccgaatgataacttaacactactgcgtttgttgcatcaatgtgctcacagaatcaatatgtccagcaaatttccgggtcaaggaaggttgcttgttttattgcataaaaaaggtacactgacacaacgggaactaatcgagattacccaacgccgttccgctacactcagcgaacaattagccagcatggaaaagtcgggatatattaccagaacaaaaaactcactggataaccgtaatattgacgtctctttaaccgcattgggagaacaagcagccatagaggccgaacaggcacgcgcagaacttgccgaccgtgtatttggcacattacaaaaagaagaaaagatgcagttagaaactatactattaaagctatctcaaacgctccctccctcttgtcatgaaaaaggagtatagtgcatatgaaattaatctttcactatattcgaaaacatcttggttcttttattgcagctatgatatttctatgtatagaagcaactgctgacctgcttcagcctacatttatggggtatattgtagataacggtgtaaaagatgccaacattggtcaaattatgtattatggcgctattatgcttggcattgcagctgtcggcgccttcagcgccgttatgcgtaatattttttcatgtcgtacttcacaatatatcggcaaagaattacgtggtgatatttatcgtaaagtacaaacactttcctttgaaaatatagaccgtttgcaaccatcctccattattacgcgcattacgaatgacgttacacaaatacaggattttacaagcagcagtatgagaattatgattaaaatgcctattacttgtattggagctattgcattaatcataatcaaaacgccgcagcaaattcctgttatgattgtcacgctgattttagcggcaattatcattatggcaaatatgaaactgggttatccccgttttagcaatttacagaaaaaactggataagctcaacaatgtaagccgtgaatttttaacctctattcgcgtggtaaaagcatttaatgcagaaggacaagaacaggaaaaatttgaagctgcttctgaaaacctttccaaggcaagcatctccaccatgcgtattatggcaattttcccggcattgattaatctggttgtaaatttaggtattgttgtactgctatggattacgcaaagccaggcctcaagtgaaattggccagattatggctgcagtgaattatatgacgcaggtattattcgcattgagcatggtatcctctatttttaacaccgcagttcgcgcaatggcctcctccaagcgagtaagtgaaatcatggaagaggttcctgcacaactttctcccaaaaccccaatttttcctaacatcaaaggagaaatttcttttgaacatgtacacttttcttatgcaggttccagcagagaatctttaaatcaaattgattttcacattatgccgggagaaactttgggaatcattggtcccaccggctccggcaaaactacattggtcaatctggttccccgtttctatgatgcaaccaaaggaaaagtgttaattgacggtcacaacattaacacaattgatgaacaaacattaagaaccgctgtagctgtggtcccccaaaaagccttattatttacaggtaccattttagataatctgcgctggggaaaaagagatgcgacagaagaagaaattacacgcgctgccaaaattgcctgtgcagacacgtttgtaaccgctatgaaagacggctacaacacacaattggggcaaggaggagtcaatctatccgggggacaaaagcaacgcctttcccttgcaagagcattgatacgaaatcctcgcattttaatcttagacgactgcaccagcgctctcgacgcttccaccgaagcaactgtgttaactgggttacggaaacaagccaaagatatgacagtactgctgattagccaaaggatttctaccgtaatgcgcgccgaccgtattttatgtatggaaaacggtactgtacaagggcttggaactcaccaagaactattagctcaatgccctacataccaggcaatctatgcctcacagataggaggcggtaccaatggctgataaaaatatgactccaccccctatcaaccgaaatggcagaggccctatgtttcgtccaagagaaaagccgaaaaacctaaaaggtacactactccgtttatggagcctgaccaaaggccaacgaaaaggattgggttggattttgcttctatctgctttgacatctgcttctgctattctatctccctttgtcattggccaggcagtaacagcattggatgcaggtaatcccgcacaaatcattttgttgttattgcttgcattatatgtaagcgactggcttgtccgttttttacaacaattttttatggcttctattgggcaaagaatgatacgctatatcagaaacagtctgtttgactgtatgaaaaagttacctctagccttttttgacagcaagcagcatggcgaacttatgagccgccttactaatgatgttgataatattagttctaccatatccaattccatgacacagctattaacagctgtttttactatcataggtattctttgtattatgatttctctcaatttgctgctgactgctgtttctcttctgtccgttctgattatctttctgtttacccgtgtgattacaaagcgtactcgcaaaatgttttcttctcagcaaaagatattaggaaaactaaatggtcacattgaagaaagtgtttcgggagccaacgtagtaaaggcattttgccaagaagatgaaatgatagcgcaatttgatactagtaacgaggaacttcgtcaagtatcaacccgcgccttaatctggtcaggatttttaatgccgattacaaacgtattgaataatttaacctatgtatttctttctattttcagtggaattctggcagtaaacggttccatcgaaattggtatgatatccagctttttgctatactccaaacaatttgcacgtcccttcatcagcattgcggatatttataataactttcaaacagctgttgcaggtgcggaacgcatgtttgaaattatggatgaagaaccggaaccaaaggatatggaacaagcactatccattcaaaacccaaaaggagatattgaattacaacacgttgtatttggttattcttctgacagacctattttaaaggatatttcactttccattcccgcaggaacaaaagtagcaattgtaggaccgaccggtgcaggaaaaactacaattattaatttactcacccgcttatatgatgtaaatgaagggagtatattgttagacggccacgatttacgtgattatcgtttaaaagacttgcgtcgctgttttagtattgtactgcaagacaccgcactttttgcagaaaccataagaaataatatcagttacggacgagaaaatattcctttggaaaaaattgaggaagccgctaaaatagcaggagccgatgcctttatccaacggcttccaatgggttatgatactgtgctggtgcaaggaggagcagagctaagccaaggcgaaagacagcttcttaccattgcccgtgccgttcttgccgatgctcctattttaattctggatgaggctaccagctctgtggataccgtaaccgaacaaaaaatccgtcgcgctatgctaacaattactcaagggcgcacttcattcatcattgcgcatcgtctctctaccattcgagattccgatttgataattttattaaaagacggaacaattgccgaacaaggaacacatgacgaacttatggcattaaatggacaatatgccgctatgtatcgtacacaaatcggtgaaaatatataagatgagaaaaaggacagccttttagctgtcctttttctcatctacacctgccatataaatgaactcaagacatatttggtatccctatccttttggtctttccaaatatatttctattttgattttgggaattgatttgtaagcagtacaaccgtctcattaaatttctctttggacaggaaatctttttgcttttactcttttctactcaaaaggacaaccgtctccacatgtgctgtccttggaaacatatccacaggagtaacttcttgcggcatatacccttcttccgtaaaccatttcaaatctcttgccagtgtagccggatcgcatgacacatatactactctgtcaggtgccatacgtgaaatagtttttattaaagactggtcacatcctttacgaggagggtcaattacaatgacattagggcgtaatccctgttgctcgagcatttctgcagcattggcagcatctccacaaataaactctgcgttttctatgccattaacctgtgcatttttccttgcattgtccactgccgcctcaattacttctacaccaatcaatttttttgcttgatgtgccatagaaagcccaatggttcctgtcccacaatataaatcaagcaatatttcttctcctgtcaaacctgcatattcttttgcaatggcatataatttttctgtctgcacacggttcacctgataaaaagaaagcggagatatatgaaatgttaatccgcacaatgtatcttttatggtatcgcttccccaaactgtacggcatttttttcctaatatgacgttggtattttcacgattgctattgataatcacgctttttaaaccacgtacacactctcttaattgtttgactaacgtatcttcgtggtataatccgtttccgtttactaccacacacgccattacttctcctgttgcaccggcttctcttaaataaagatgacgcatgcgccctttgcccgtttgttccctatatatatcatttccgcttgtatctgcccattttcggaatgcatccatcgcttgtgtaaacgattgcggttgcaatgcacaagattcgcagtctataatacgatggcttctattggagtaaaaccccataatcatagattgattatcatctataccaataggcaactgtgctttatttctataatgatcaggctgctttgctcctacaatcggtttcatcggtaaatcagaaaatccgccaattcggttcaacgcatctttcacacgctgttcttttactgccaattccgcttcatatgtcatatgtctatatgtacagccgccacattttgtaaaatacttacagtcaatttctattctatcttgtgatgctgtcatcaaagaaatcattttaccaaacgcatatgtttttgctacctttaaaattttagcttcaatgatatcaccaatcgcagtgtaaggaacaaatactgcaatttcttcgcagcgtcctaccccacaaccctctgctgtcattcctgtaatttccaattgaactacatcatttttcttaataggaaagtgaattttatgtttcaactatatttcgtcctctatattttttatttttattgtatcatcgcagttgtcaaaatacaacagtatgcttttcaaaacaactgaacaatcaggataaaaacaaatatacattaaaaaattacctgccttttaacacttaccaagtcaactgacgaaaggcatttccgaatatctccaaaagggcaccttaacataacctaagagagacagaagaaagaataaaaaagactcagtatagaacttgaacaggctctgtaccgggtcttttttgatttatataaggtgtaaaaatggcgtgtttccggctctttcagggaatgcacttggctcgtaatggactcagaaggagctatggggaattgcagtaaggacaaactcggtacgatacgggagtttgcccttttttggatatattaggctgcccactaacatcaactatggcataaataaaaatagtagttcccttaaaccagcataaaaaggaaaaccctctaatgaaactttaatctaaggcagataaaataaagtacaagaaataaaaaggaggaaagagaaatgtatattgtaaaagaaggagacagtcttttaagcattgcaaaaaataaatttggatgccacaaaaaatattttgacttaatccgtatgaatcaactggaaagcacaattatttatcccggacagattttaagatgttctgaataaaaacaactgttagttttattgttttattacgattcatatgactttttacacatattttcctagatatcttttctgatagtagctttatgtgtaaaatttatatctgttatttgataaaaagtaccattgctttacataaacaatctggttatacttatggacatgaagcaagcatatgtgaaaatatgtatatagttttaaacaacatcatatatgataatacaaataaaacatataataataaaatttctttcagaaatgtattctgcattcctgttttttgttatataaaattattatgtatacgtgtgataaatacaaatattcatattgcttaatatgcggttgcttcttacaggttgaatacaaaatataaaaaatctctggaataaatgtgtaaacatgtaaatcaaactaactgtaacatcatcttaggctatatttttaaatctttaaaaatattcacctataattcgcgtttttttttgcaccaaatcacttatactgtagccattgaaggacgtccaaaatcttgtataaacaaggaaataatgggaaaaatacatcatattgagaatgtattttaaatctcaaaaagaaaggtatgttaaatatgaaaaaggttcttattgcaattttagcatgtagtgcattactggtaggaacaactgcatgcggtacaacaaacaacaccacgtcttctaccaactctactacagaaactacttcctcagtagtttcccaagtaacaaatccggactatcaaaaaccggaaaatatttctacagcagatgatgcgaaaaaagctcttgaagccggaaacaaagcttacaaagatggtaacattgatatcactgctactaatgcagacagaacagatctgtctgaaaacggccaaaaaccttatgctgtcgttattacatgctctgattcccgcgttccacccgaattgatttttaacagcggtcttggagaactattcaccattcgtactgcaggcaatgtagttgcagattttgaaacaggcagtgttgagtatggcgttgaccaccttggcgcaccattggtagtggtaatgggtcatacaaaatgcggtgctgttgccggtgcaattgaaggacatgcggaaggacacgttgaagatattattcacgatattcttccatctgtggaacaagcaagacaaaatgcaaaaggtgaagatgagattgctactttagcagaaacttataatgttcaaaacagcattaaccaactaagagaaagcgaaattttatccaaagcagagcaagagggtaaaattcaaattgttggagctatctacgatattacaacaggtgaagttaaattcctataaggtaaaatatcaatcactattttgtgagttctctctaatataaaaagaagacctgccatctcatatgagatggcaggtcttttatctgttttacatattggggggaatataaaacaatttgtattaaagggtagtataaaatttttaagatagaaaaatgagatagaaataagctctatattgttaaaaatgtatatcaaagaatgatatatcgttattaaatttaaataggatgatactactatccttaaatatcaaatgctataataatgaaattaagagcgatttgaaacagaagatagtatgatattcgacaaaaatatggcttttatttcatgcaaacaccaattaaaacatgtaataaagctgggacaatggcaatttgtccactggttcagaagtaattttgattccgtctgctgtgacttcgcaggtctttggatcaatttcaatttttggaacagtattgtttagaatcatatcctttttaccaacgctacgacagttggaaacaggaagtactattttttctagacccaattcgctcttaattcctttttcgtaagctgcctttgatacaaatgtaatgcaagttctggctcttgctttaccaagtgcaccaaacatcggcttcataattaccggttgtggagttggaatagaagcatttgcatcacccattttagcagcaatcatcataccacctttgattacaacttcaggttttacaccaaaaagagccggtttccaaattaccaaatctgcaaattttccaacttccaaagaaccgatgacatcagaggtacctgttgccaaagcagggttaattgtatatttagctatatatctttttgcgcggaaattatcgttgtcagcgttttgctcctccggtaatttaccgcgctgttttttatttttatctgctaattgccatgtacgtgtaattacctctgcaggccgtcccatggcttgggagtcagagttaataatagaaattgcaccaatatcatgaagcacatcttccgccgcaatggtctgtttacgaatacgagatttgccgaacgcaatatcttccggaatatcagaatccatatgatggcaaaccattaacatatccaaatgttcatcatatgtattaatggtgtaaggaattgtaggagttgttgtagatggcagtacattggtttcaccaaccactctcataacgtccggtgcatgaccgccgcctgcaccttcactatgaaacgtatgaatagtgcggccatcaaatgcattgattgtattttctacattaccagcctcattgatagagtctgtatgaatggcaatagaaatatccattttatctgcaacagttaatgccgtatcaatacatgccggtgttgtaccccagtcctcatgtaatttcaaaccgcaggcacctgcttcaatttgttctaccagcgcttcttcctgagaagagtttgctttacctaagaacatgtagttcattggaagctcttccacagattccagcatctttttcatattccaaggccccggtgtacatgtggttgcataagagccgtctgccggaccatctcctccaccatacatagtagttacgcctgaaaacaatgcagtttcggtctgttgtggacaaatgtagtgtacatgtgtatcaattgcgccggctgttacaattaatccttcagctgacaacacttctgtaccggttccaacaaccaatctagggttgaccccgtccattgtgtcaggattacccgcttttccgatacctgcaatttttccatctttaataccaatatcggcttttacaatgccccaataatccaacacaattgcattggttaagcaaaaatccaatgcaccttcatgattggtcataccagacttttgtcccataccgtcacgaatggatttgctgcctccaaatttgagttcgtcaccgtaaactgtgaaatctttttcaatttcaacccacaaatcggtgtcacccaatcttactttatctcctacagtcggaccgaacatggaactgtagttttttctgtcaattttatgactcatatgatatacactccttttttatatccgcttgaacaatttggcttagataaatcctttggttcttgcattcagcattgctttccctttggttaaatcattaatttggccatttgttaaattgttcaaaccgtaaatcacacggtttcctccaaatgggaccaattgtactgtttttgtttcttttgcctcgaagcggatacttgtaccggaaggaatatcaagatgatatccaaacgttgcctctctgtcaaaagacataaacttatttacttcaaagaaatgatagtgggaaccaaccgcaatcggtctgtcatctgtattggtaacctttacagtaatggactctttcccttgattacattccaaatcctctttttttaatttgtattctcctggaatcataataaaacaccccttcttctcattgtaccggatcgtggattgtgagcagcttggttccgtcagggaaagttgcttcaatttgaacgtttgaaatcatctcaggcacaccttccataacgtcattgcgggttagcaagtgtttgccctcctccattaaagatgccaccgtttttccttctctggcactttcatagagttcagcggtgatgtaggctatagtctcaacatagttgagttttaagcctttttctttacgttttcttgctaaatcccctgctgtgtgtaacatcagtctctcgatttctcttggagtaagatgcataatgttcagcctcctttaatattttgggatgtttttattatattatcgtaattataataagacaacttttttctgcataaatattctcaataaagaaattgcattaaatctcgagcattattaaaaacgattaacaattaccctatgctaacattagacccgcaataacacttattatttcttatccaaaaaattaatccggataaatcatattaaatcagtatttgtatatttattattttattgaatatttattcttaattattgagaatcagtaattattatcattatcaataagagatattactgttaatttcatacaataattcatgtataagctcatacagctttcataattatttttaataggaaccaaaatttaaagtatatagtgaattaaaataaatacatttttattcaaaatacaaattctatataaaaaaggaagagctgtgatatcacaactcttccttttttatataaaatattcatttatcagttctttttgttctttttacctgttctccaaaaagcttcctcatcgtgtaatggttcttttggataggccttaccaccaatctccaatagatgattcatttcagcttctacatcttcccttaatttgcgtactgttttacggtgtgaaccgcagtcttcaggatatacaggatctccaactgtaatggtaatgcaggaaccacgttttagcagcttccataacccctttctctcccttggcgtaattaccacaggaagtaccggggcattggcatctactgcaattgtaaatgccccatcgctgaatttgcgcaaatggtcacaatacatctcgatactgccttccggatacattccaacaaccctgcctctttttactgcatcagtcatttcattcatgaaattacgcaagcctttaattgtagtgctgattggaacacagtcaaaaaaacgaataaatggacctacaacaggaattttaaaatttccttccatagacgtatataccatttttctgggtgttgtcagtacacctaaccatgtacagtccatagggtgtacatggttacaagtaagcacaaaccctttgttctttttgcttaattcttgtatttttccttttccctcttgttttagtccaaatacaaatgtattcataatcgtcaaaataggaataacaaggccaaaatacattaaaaagcttagtgctctgcgcaaaaaattggtaggaagcagttttttcatttccgctacatttttagccgcaaatttaccagctgcttcttttacatttcccgcaacttccttcacattttcggcagcttcctttacgttgattaattcttttttgggaacttccataaactctgggtctactgcagacttttcctgctttacctgagttttatcttcatttatcacagtatctgcgttatgtagctgttcggaattggaaacaggagcgtttaaggtctcctgattttcaaatgccggatctgatagtgttgcattcatactatctgccataaccaccattctccttgaaatcgttaatcgcatcgttaaacataagctctgcttgttttacagattctgaaacacgatatgtattgccttgcatggcgtatttggtagacataattgctttcatttcaggattttcaatccaataatcaatcttacgtgctaaatcatccggattatctgcttcaaataaacttctgtcatccaaagcaaactgtacggttgcagatttcggcgaattactgataacaggtaccaaaccgcaggcaaaagcttccatacaagcaatcgcttcactttcaatatatgccgcatgtacatacaaatcacaagaattaatcagtctgattaattcttctttggtgtaaaaaccaaaaataggcggatttttcattgtctcaccttgtttacgcaaggctttttcacatggaccgtgtccggccaaataaacttgtattttatccgcatatttagagcattccacagcctttaacagtatgtcttgttttttctcataagacagcctgccaatcatcaaaatattaaatttttcggggtctgttaccttttccacttccatcggacggaactcatcgtctacaccattactaattacatatagcttttgtttataaccgtttttacgcaattctcccgcaataaattttgacggacagtgaatatggttaaaatctttgtaaaagtatctgtgggcaaaccgataaaatcctacggaaagaagctcaactttttcacaatgaatattataggtaatattctccggctgcaaatgaaacgccgccgatgtaggaattcccatctgtctcgcaattttagccgctttgcgttcaaatggaaatggaaggaaaaagtgaacgatatctgctcccttaaacgcctttctgaacaccttttcatcaggagtggcaaaacaaaaaccttgtttatgactaattctggttacaagtttataatgtgcttccggtacaccgaacttatcttttccggactcaccaatagaaacaactcttacctgatgccctctttgccttagcatatcggcaaagcgacgggcagtcatagtggttccgttattctcctcatcaaacatgtcaactacaagaacaattctcaagttaaacctccaactactccaatcaatcgaatgcctgttacgaaagctaacaaaaaacaggtatccttatctcaatctttctatatatcaaaacaataaacactttcaaaatactattaaataatcatacataattattcatcattcgtcaacatctgagtaaaaacgtcctttattttccataaagaacacaatctttttctaaattaccagctattttgctacattattctgtacgcttccgttgacaaaagcagtaatattgtccgcagcaattctaatcaatctgcttctggcgtctttagatgcccatgcaatgtgcggcgtaatcacacaattttttgccgtcaataacggattatcttcttttggcggctcctgagacaatacatctaaagcagctgcgtataacttatcctgatttaacgcatctgccaacgcctgctcatctatcacctgaccgcgtgaggtattgattagaatggccgttggtttcatcaatgccaaagcttctcgatttatcatacgctctgtatcaggagtcaaagggcaatgaatggttacaacatcactttcgcgaagcagttcctctctgcttacctgacggcagccttccggcatatcctttgcagagcgactgttcaccagtacgttcatttccaaagcgcgggcaattctagcaaccgcacgcccaatattaccaaagccgataatacccaatgtactgcctgcaacgtcaattaagtctgaattccagtaacaaaagtgacggctgttaacccaatcccctttatgaacactttgattatgtaactccactttatttgtaatgttaaataacatagcaaatgtaaactgcgcaactgcagtggtacagtaagttggaacattacatacaggtattcctctttgttttgccgcctgacaatcaatcacattaaaacctgtagacagcgtaccaatatactgtaacttgggcaaagcatttatggtttcagccgataataccgttttgtttgtaattaaaatctcagcatcttttgctctttccacaatttcatccggttttgtaaattcataaattgtaacattccccagcgcctccagaggagcccagctaacatctcccggattcgtggtatagccgtctaaaatacatatattcaaaggaatacctccctatttgtaaattaaattagattttctactaattgtattttattgtaccataaggatagtggttttgcaatttctaatgtgtgacaaaacaactgagaacttttgcccatatccgccaaataattgcatatacatcatattataaaagaaaatacaacacttaaattccaaatttttcaattgatactttcagcagaaaaatatagtttacaaatgctaaacgattgaccattgtcctatttcaaaatataatatataaataatattcagtagagcgctttatacccaaaaataaaaataattgtctggaaaggaaatgatattaatgaaacaaaccattcagaccaaacatcttttgaatttaaatgaaacttgcgcagcttctttgcttgaacaatttgaatatccatggcaggcacttcctcatatttccgactttgttatatctcttggaaaaacactttctccggacgaatatgaacaaaaggaagaacatgtttggattgcacggtccgctactgtattcccttcagcctatattacaggtccaaccatcataggtccaaatacagaagtacgtcattgtgcatttatcagaggaaatgctttggttggcgccaattgtgttgtaggcaattccaccgaattgaaaaacgtgattctgttcaaccatgtacaagtgccccactataactatgttggagattctattttaggttataaagcgcatatgggtgccggttccattacgtccaacgtaaaatccaacaaatctttggtagaagtaaactgtgacggagaaaaaatagccacaggattaaaaaaattcggtgctattttaggggaccacactgaaattggatgtaattctgtattaaatcccggctgcgtcattggaaaaggctctcaaatttatcctgtttccacggtgcggggagttgtaccggaatatcatatttataaacaaccaaatgaaattgtagccataaaagactgatatgcaaaatcagaggtttttcccttccattttcttttgattttttgtataatagaaacaatatatcagttgtatacgaaacaggaaagcagggaatttcatgccaaaacaaaaaaaggttgccattatcggcaacatatccagctttgataaatgttctattacaaccgctttgcctatttttgcggccagcggaggaattgaaacctatccgcttttaactgccattgtagcctcccgtgataatgacattgatagtcctgattattgtgatttaaccaataatatgcctacggttgcagagtattggcgttcacagcaactgaaactggacggtcttatcagcggatttttaggctctcccgaacaggcaaatgtggtttccgatattttaacccattgtaaagctcaggattcactggcattggtcgacccaatcatgggagaccacgggcaaatgtatgggtcaagctcccccaaaatggtagatgccatgcgcaatttatgtaaacatgcagacattatcgttccaaacataacagaagcatgtttaatgttggacgaaccttatcagccggggccgtataccagagaatatattcaagatttattggtacgattaagccaattgggaccgagcatggtggtcatttcaggcgtttggttcagcaaatttttatcaggtgctgccggttatgatactgtagacggaagttttacatatgcattttcaaagcatatcaaaggtgaatacaaaggtgtgggagatgtttttgacagtgtactgttaagcgctttgttgcataatatgaagtttagaaacgctttacagtttgctgtagattttacccacaaaagtattttaacccaaacaaatgcagaaaagaaaaatattgatatgtttcaatatggtattgactttgaaatgaatttaccttggattattaaaacatttaaatcagacagaacataaaaaggagcggagtattctgctcctttttctaacaaaattcgtcacaaaaaatggagagaaagtgaagaattatttacatacatcacaaattacgatataatgttacaaagtcttctgaaaagtgataaaatgttcatatatttatggtacgttaacatatggaaccgaaacaatatgaaaaatcaacagaaagggggcttttccatctatgttcagcagccaggtgtttgaaagcgcattgagtattactatgtttgtgctgagaatcttggtacctttattatctacagtagtgctggtacggtgtttcgtttctctaaaacggggccgacgaaaagaagagcccgttgttttattagaggatttggccagcggcctttccattcccgttttatattgggaaaactcgattggacgaagcaaaagctgcgacatcgttttacctgacagtacctgcagccgcgatcacgctgttctatacagacgagccagcggttggatgattacagacaccaactccaaagcaggtacgtatgtaaatgataaaaaaattaaagaagccacacagattattcccggcgatgtgattaccatgggaacatcacggtttgcattacgccgtgtaagcgaaggcacagtgattcagcagaagaaaaaaataaaacagcccaaaatttccaataaaaaagcgccatcccctgccgggttattgggtttaacgaatgttatccatttactgcttacggtacagtgctgttttgtaggcggagaatttaacgctatgccattcataccatttgctttattattggcaatgtcatggggcttatacctgatttcccgaaaactgctgggtcgcgtcagttttgagattgaaacattcggtttcttgttaagcggcgttggtattatgctgctttgcgcagaagacttttctctcatttacgttcaaatgggaagtatgcttctcggtctgtgcctatttggatttttaatttggtttatgggcgatttaaaacgtgttatgaaggcacgattatggatagccattgccgcaattgtattgtttgctgtaaacttagtcatcggtacagaagcaaacggttctaaaaactggattaacctcggccctatcagtattcagccttcggaatttattaaaattgcttttatctttgtaggcgcctctacattggataaattgcaaacagcaaaaaacttatggggattcttgggatttaccgctgtttgtctcggcgctttgatgttaatgaaggatttcggtactgcttgtattttctttattacatttattatcattgcattcatgcgctcaggcagtatccgtaccatattattgactgtatccggttccgcgctcggtgtattcctgattttacggtttaaaccatatattgcagagcgttttaaggcatggcggcatgtttgggaatatgccgatactaccggttatcagcaaacaaaggtgttgatgtatgccgccagcggaggactattcggtgttggacttggcaacggatatttaaaagatatttttgcaggtgacagcgaccttgtattcggtatgctttgtgaagaaatgggtcttgttatgggtgttattgttgtagttgcaattgcaatgctgattttatttgcacgtaatgatgcaacaagaagccgttctacattttactctatttcagcatgtgcagccgcaggattactgctgttccaaacctgtttgaatgtattcggcgctaccgacgtgttacctcttacaggcgttacactaccttttatcagtcttggcggttccagtatgatggctgtttggggattgttggcctttattaaagcttccgacgaacgcacttatgcagtaaggaggaaaggcaaatgaaaacaacaggctggcgctctttaatcttgtatatcataggcgcaggttttttggtaggaattatattctttatctgtagttattttatacaaggcggttcttgggcaattcgtccctccaatgcgcatattaccaacaatggtcagttaacctattccggtgaaattacagaccgtgacagcaatttgctttcttacagcaaagacggggtacagcagtataatgacaatgcattaatccgcaaagcaaccttgcatgtagtgggtgaccccaacggatatatttcaacaggagcacaatatgcattccgcactcaattatccggctttaatccgattacaggcgtagtatcaccattcggcagttcggttacaggcagtaatattaaacttaccatcagttcagatgtttctgccgcggcattacaagcgttaaatggtaagaaaggcgcggttgctgtatataactataaaaccggagaggtactatgtatggttagcagccctacatttgaccctctgaatatccccagcgatattgaaactaacagtacatatgaaggcgtttacttaaacaatgcattatcttctacctatactcccggttctatctttaaagtaattactgcagctgctgctattgaaaacatcccagatttagacagccgtacatttcattgttccggctctaccataatcaatggtgagaaaattacttgtgattctgtccatggagatatcagcttccaaaatggtctggcacagtcttgtaacgtagtgttcgccgaattagctgtagaactaggcaaagatactatgacaaaatatgccgaccagttgggctgcaacaccaatttctatttagatggcaatccaaataaaatgagttcttataatgttgagcaggcagatgacaactccttggcttggtcaggcatcggccaatataccgataccgttaatccatatcacatgatgatattaatgggtgccattgcaaacggaggtacccctgtgaatccatacatcatccaaagtgttaccaacagcattggtttacaaaccaaaacaggtaaaacctcaaacggagataacatgctgaaacaatctacagcagaagaacttcaacgtcttatgagatataccgtaagcaattattacggagattctatgttcccgaatttacaggtagctgcaaaaacaggtacagcagaagttggtgacaataagattccaaccggctggattgtaggatactctgaacgcgatgatttacctttggctttcgccgttgttgtagaagaaggtaactacggaagaaattccgcaggtgtcgttgccaatacagtgctgcaaaaagctgcagcgctttatacataaaaatatcaagaaatgaaaaactaaacttactatgaatcaaaggagaatgaaaaatggcagttattgaattaacaacacaaaattttaacgaagaagtattacagtccgatgtacctgttatggttgacttttgggcatcatggtgcggtccatgccgcatggtttctccaattgtggatgaaattgcagaagaagtacaaggtaaggcaaaagtaggcaaagtaaacgtagatgagcaaggtgacttggcttctcaatttggtgttatgagcattccaaccattatggtatttaaaaatggagaagctgttgcaacttctgttggtgcgaaatcaaaagcagaattgcttgcattgttagattaaagaacatagaaaagcctgcgagaagcaatttcgcaggcttttttgtttgctataaaatttccggggtgatagaatgtctacttccaaagaatttgtagagtacgtatgtgaacaaatacatgaggtcggctttctccgttacaaaaaaatgttcggagaatatatgatatatgtaaatgataaacctattttattggtgtgcgacaatactgtctatataaaaaaattagactgcttggcagaacttatgaaagaagcaccgatagcaattccatatcccggtgccaaagagcgttacattcttgatattgaaaatcatcagcttaccaaagaaattatttccattttagagccaatcacgcctttacctaaccctaaaaagaaaaaataaaattttttgtctgaaaaatgtttcctatcaggagttatttatattattctatatcagaactataataagtacaatataccctataatgggaacaattcgtaaaggagagatgaaaatgaaatcaaaatttatgatattgtttgcctctgttttggctgtaagtacaattgggttagccggatgcgcgagcgatggaaatgcaacatcatctactgatataaattctgctgcagtatcagaaactgcatctgaagcaaccagtcttactccaacagaagacgccgtttcttctaccgcttctgacaatgaacatcgtggtgaaattataaacggtgtctttacctctactgatgggatttacaaaataactgtgccggaaggagttactttgcttaccgcagcagacactactaccgtatttactgcaaacgaaggaaacactactattacaatatcctccgaagtcaataacggaccctatcaagatttaaaacaggaaacatttgaaaccatttacagtcaattatatacagaatatgctactactggctttgaatcgaaagtaatagatgaaaaacgaactgactatcgcctttcttttaccggaaagaacaaagaaaccccgctgcaagtgaacgtatttaaagctatgaccaatcaaagagcaattacaattcaaatttcttcaccgcaggacaatcaaccggacagcactatgatggataccttgattcgctctttaaaattttaacacaaaacggccgataacatatcatcggccgttttttataaaaatttttattcactatattaaagtgtatatcctttagtcctcatcaatatcatattcaagaattgcgccgcttactgcgtcaattacatactcatactctgtttcctctatatgaaattctatttcatactcaacacggtcattgtctttctcaaatttggctttagaaaaacgaacttgatttattgttaatccagcatgactcaccgcaatattttttgcttcatccacacttataaaccgaaccttatcagatacattctcgtttacatctgttgcagaggaactttctgtttgtggttcttcttttatctgtacatcaaccgtaggattctcggttggttgatgattgttcgtgagaggctccgaactttttttgataatttcaccagtaacttcattcatttgataatcgtagtgatgtgttaacgtcgagaatgcaatgtgatatatagaatttccattttctgttataagttcttccttataaaaaacggcttctggtatattgacctgtgcatcagttaaagcaacttgtttagccatatccagtgtaatcacagagggtttctcttctatttgtcccgtactctgagattgattttcattaggaactgtaattatggtatttgacgattcggattgttctgctactgtatctggggctgtatgatacataaaagcgttcacaagcaagatagaagatacaagtatactacacaatatgaatactataaaaataaaaacccattttttattttttagaatatttctcatttttctcacaaccataaaatacatcttttcgtacatgtctctttcatctacaaaagcgcattcattgcagtgaatgcgcttttgttattaatcagaacattttaatacttgtcccggataaataattgtactttgaagttgattcctacgaaccaactctacatattttgtatgacaacccagttcttttcttgcaatgctcaataggttatcgccttcttttacaatgtacataattttacctcctttttgattgtatctatatgatatctatcatttattaaaactttattagaagtctgactttgtaaatcttaacacttggccgggataaataatggtgctttccaatttatttgcgcgaaccagctccgcatattttgtatggcagcccagctcttttcttgcaatgcttaatagattatctcctgtttttacaatatacatatttatattatctcctttttctttttaattttatcttcaatctatctttatgatatccattgtttattaaaactttattagaagtctgactttgtaaatctcaacacttggccgggataaataatggtgctttccaatttatttgcgcgaaccagctccgcatattttgtatggcagcccagctcttttcttgcaatgcttaatagattatctcctgtttttacaatatacatatttatattatctcctttttcttttttatcttatcttcaatctatctttatgatatccattgtttattaaagctctattagaagtctcattttgtatatctcaacacttggccgggataaataacagtgctttccaatttgtttacttcaaccagctctgcatattttatatggcagtccatctcttttcttgcaatgctcaatagattatctcctgcttttacaatatacatttatttcacctccttttgtttgattatatttttattatattcactattaattaaagcctgattagaacttataaaaataaaaaaagcatatctacaataaatgtagagtatgctttttctttttattatttaatgaggagattttgaaatgataaacaagaatgtgctaccttctcccaaaatactattgacagatatagtacctttatggagttcggcaatttcattcaccatagccaaaccaatacctgttcccttgcttgctctggacttatccgccctataaaaacgttggaatatatttttttgatcttcgcttgaaataccaatgccattatctttcacggaaagaaccacttgttccggagattctgataattctacgaaaatatatccattgttttttccataacgatatgcatttccaatcaagttgctaagcaatctggttaacaaatgttcattacctgctataaaaacatcatcatcagttttccaagtaagtgtaatgtttttatcttgtatttgtgccatatcttcacatacagcagaaaccaactttgtaaggttaactttatgcatttcaaaactatctatttgaaattccaaacgtgcaaaagccaacatatcggtaattaagttcgtcatctttttactttgacgttgaattagtttaatagcgtcttcatattcttctgtacttctctgtttttccaataaatattcacattgcgccataataacagccattggggttcttaattcatgtgaaacatcggaagtaaattggcgttctgcctcaaatgaagaatctaaacgctcaaacatagcattgaatgtatctgcaagttgatgaatttcatctgttccttctcccaactcaatacgtttttttaggtcccgcccctgaccgatttgggacgcggtagtagcaattttacgtataggagccaaagaacgtcgggcaataaaatatccgcccaaaatagccaatattagaaaaatagggataaatatcaacgaaaaatttatgatagacgcaaaatgtgtatctccttgctgagcagaaacaacgcccctgagccacaaaccgtctaatccgttacctactaattttcggtcatagatataccatgtaactccgtttacgtttttggtttggatttgtaaatccgaaaatttcatatctgaaagttcttgagagaggggattttctccatatagtaaggaaccgttttcctgatataccgcaacggaaacttcgtttacttttcctaagaaatcatcgtctatttctaagtaaccgtttctaaaagacagatacacatccaaatcataatcattttctttgtcttgaatagaagggaaatattctatttcatctacgtcattttctacaatttcaattaaattgtcttgaatgactttttgaatcataaaatcattgatatacaatattactccgcaagttaatgcaaccagtataatcaaaactgtactgaaccataatgttatttttagtctaagtgggaaacggttcatatttcctcacgtatcacatatcctcttcctctgactgtatgaattaacttattattgtagtcatcatccagctttttacggaggtaacgaatataaacatctacaacattggttcctccttcataatcgaaatcccatatatggtcttcaattttttcccttgatagtacaattcctttgttttgaagtaaatattccagtaatgcatactcttttgcggaaagagaaatttcttgtcctgctcgtgtgactgtatgggcagcacaatccatggttaaatcggccacagtgattgtattgtcggtcataccaaatgaattgcgaatgatagcgcggagtcttgccatgagttcatcaaacgaaaagggtttgactaaataatcatttgctccactatcaagaccttttacccggtcaggaactgcgtcttttgctgtgagaaataaaacgggggttgttttacctgtctgacgaaatgaacgcaatacttccagtccatcgattttcggcatcataatatctaaaatgattgcatcgtagtctactacagccaatgcgtccaatgcttcctctccgtcataacagctgtctacactgtatccttctgatcttaacttttgtgtaatgataaaatttaaatcttcttcgtcttctgccagtaaaactctcatgacaaacacctccttatacagagtaaagctattatattaaaataccattagaatcaaatactatgtattacatgcacgcaatttgttttagtctgtctataattggaagcttttgtgtacaaagtgtctcacattttccacatgccacacaacgtgctgctgtgctgttgtccatactccactgcacttttagacgctccttaacagctccactgtctccccctgtcaaaacaaattcattatatgcatccattaatttagggattgcaatgtctaccggacattcatcacaataactgcagcctgtacataaggcatccaattcctgtgttagatgctttcccatgttctccagtaaatccggtgttgcaggaataatatgttctcccgcaattacactttcttctacatccttcacggaattcattcctactaaggcaattgtaatttcaggttgagccaaaatgaattttaaggcagaaacagcaatgggttcctctgtattttgacgaataaaagaaaagcggtccggatgctgtgggataattcctccacccaacggattcatcgtcgtaatacccattcctgcctttgcacaggcttctacccctttacggcggtatgcaaagtttacggcattatatcctaatgttacaccttcaaaaacgccctcctgtgcaacttttgcaatatcgtcaccgtttaaatgcgtagaaaaacagatatggtcaaccagaccctcttcttttgctttcagtattccttcataaatgccgccttttttcatatatgctgcgtaatcttccattgttttaatcgcccagatatgaaaaaaatctattttttgcaatcccattttggtaagggatttttccaaaacttttcttgcctcatcgccatcagcagcattccacagtccacatttagtagaaacataaaatgtactgcggtccattgtttgaaatgcttgtccaaaaatatcctcgctgtgttcatcgcaataatcaggagctgtatcaaaataattcacacccaactcatgggcacgatgaattattttgacactgttttcatagtttcctgactgataatcttcttttggaaaacgcaaaccgccaaaaccaattgcggaaactttcttgccggttctgccgtattctctataatccatgttcattcatccttcatttcatttttctgtcagctaaaaaatgtttaattgcataagctacgccatccgcttcattggacagggtaataaaatcagctgcttgttttacttcattcacaccgttttccattgctacagagtatcctgcctgttgaagcaacataacatcatttaaactgtctcctattgccataacctcgttcatggtaactcctaatactttgcatagatgtacaatggcctgagcctttcctgtattgacagcgcttacctcaatattcatggaggaagatgaggtaatggaaacagtctgcatcaatgctaactcatgccataatcttttccgcaaagcgctatccgctgtttttaaattgatattttctatattttgaggcgactgctctacgagtgaacgaatgtcgttcaccggattccgggtactgagcacatatggaatataatctttcgaggtgccgtaatggggcaaattttctaaaaacctttgttccgtatatgcctttccctgtatgaatacttccaccattatatcctgagaagataatgtatccagaatagacaaagatgtccctttatccagtaaattacaataaattctctgtcccagtgataaattctcaatcgccgccccattagaagttactgcataagtgattccagggattgctgtcacttcaggagataaggaacctaacgctctgcctgtacaaggcaccacaaagatatcttgttgtatggcatactccagtgccttttttacatttgacgataaagaggcatcattacgcaacgtggttccatccaagtcaattgccagtaattgaatttttgtattatcattcataccactgtttcaccctttttcggtgttttcttacactctcgcaacccctgtttttcttgcagcttcttttactgcgtttgcaactgcaggtgcaacttctttatttagcggatttggaataataaattccggacatagttcatcttctttcaccaaaccggcaatggcatatgcagccgcaattttcatttcgtcattgatttcttttgcccgcacatccaatgctccacggaaaattccagggaataccaatacattgttaatttgatttggaaaatcggaacgtccggttcctacaactttggcacctgcttcaattgcttcgtcagggaaaatttcaggcacaggatttgccatagcaaaaataataggatcttttgccatagaacgaaccatatcttttgtcacacagcccggtgccgaaactccaagcagcatatccgcaccctgaataatttcagccaaggaaccttttttgtgctctcggtttgtaaccgcggccattgctttttggccttcgttcaggccttctttcccttcatagatagccccgtcacggtcacataaaataacatgtttcaatcccattgccataaacagtttagtacaagcaatacctgcagaacctgcaccatttaccacaacacggatatcttctatttttttatccacaattttcaaagcgttcaccatagctgctgcagctacaatggcagtaccgtgctggtcatcatgaaatacaggaatatccaattcttcttttaagcgtttttcaatttcaaagcagcgaggagctgcaatatcttccaaattaataccgccaaaggtaggggcaatcatttttactgcctgtacaatttcttctacatccttagaagccaaacaaatcgggaacgcatccacatctccaaaggctttaaacagaactgattttccctccataacaggcatacctgcttcaggaccaatatcgcccaatcccaacacagcggttccgtctgttacaaccgcaaccaaattccatttgcggcagtattcatatgcatcatttacatctttattaatctgtatacatggtgcagctacgcccggtgtataagcaatagaaaggtcatcctttgtctctacgggacaagttggtacaatttctatttttcctttccattgtaaatgtttttctaaagcaacttttgcataatccataataaaatacctctttctatatctataaacatatacgaaataagaatcattctttaaaatgaccattttcagtataacaataatcatttaaaaccgcaataggaaacgcctgtgcgatttcaattcacaaaaagtctttacaatagcatgatatatccgtataataaataagaaggtggaaacgaaaaatgataaaagcatgtatttttgatttagacggtactttatgcaatacgttggattccattgcatatttttgtaatcaaacattaaaacaattaggatattcaaatataccaacagataaatacagaagtcttgtcggtaatggtgccgagcaattaatacataacatgtttcatatcgttcatcctacttatactccggaagatgtacacacagcgaaacaaatgtttatggacttatatcaggaaaatccattaaaatgtgtaacattatatgatggcatcttaccattgctttatacactaaaaagcaatggaattcttttggcaattctctccaataaaccacatgttttgaccagactatccgttccaaaattatttggtgagcatctgtttgatatatggtatggtcaaagagatgaaattccccgcaaacctgcacccgacggagcacttatgattgcaaaagaattatcggtacaaccaagtcaatgtttattcatcggggacagtgatgtagatatgcacaccggtaacagtgcaggtatgaaaaccgcaggtgtgctgtggggatatcgcagcagagaagaactgcttcatgcaggtgcacaaatgattgcttctactccgtcggatattcaaaattttatttttcaatagttttcccaattctcagcaaacttatgaataatcatcacatagttatcacaatcaagagacataatataggcatagtcaatcaatttatgatatcttgaaggagagataaccactatgaatcgtgatcattcatattatccatataataacaatgaacaaccgttagaagtagaatggcaagcacctgaacaaaatgatattgctgggaatacccaatggaatggcagtacttatcacggctcttatcaaaaccataatcgttattccggtggttccggagagccgccaaaacaaaagccacctaaaaaaccaatcaaactttgggtgaaaattgtctgtggtgcagcagcatgtttggtaatatcagcaggctccattggtggattcataggtttggtaaatatgggagcaatcccattttccgcttccggtacaaacagttccaattctattgtgaatactaccaaagtagaaaataacaataccagcgaaacatctactattaccggaaaactatcaacagaagaagctgcacagaaagtaatcccttctgttgtgtgtatacaggcttacagcaataccaatggatatttaggcacttcttctgaaacgggagaaggttccggtattattgcatcatctgatgggtatattattacaaatgctcatgttattgagggagcatctgctttaaaagtaattttatctgacggtaccagttatgaggcaacggtagtaggctccgacactgcaactgacttagcattaattaaaattgatgctaccggtttacaagctgctgaattcggttcatctgaagatttacaggttggagaacaagtcattgcaatcggtaatcccggaggtattcaatttaattcttccgttacagtcggttatgtatctgcattaaaccgttccattacttataatggttacgatatggagtgtatccaaaccgatgctgcaattaacccaggcaattccggcggtgcgcttgtaaacatgtatggccaagtaatcggcattaactctgcaaagattactgcaaccggatatgaaggtttgggttttgcaattccgattaataccgttcaacctattatcaataatttaaaacaatatggttatgtaaaagaccgtgctatgctaggcataaccggtcagtatatagatgcaactactgcacgtttttatggtttaacgcaaggatacagcattgtaaaattaaacagtaatgtatctgatgccggactgcaaaaaagcgacatcattactaaaattgatggaaacaatgtaagttccgaaactacagtgcagaatgtaattgcaaagaaaaaaccgggagatactgtagaattggaagtataccgcccaactacgggagaaagcttcacagctacagttactctgacagagtactcccctatgagttagcttacgacaaactttttcatatatcttctttcccgaacagagcagtattcctgctctgttcccttttttacaaacaatctaaaaagaggcatgcccctgaataggcatgcctctttttctatatttatcattcttctgctaaccaattaattttaccctgtgccagcgcttcctcaaaagtagccggatgctgtggttttgttccacccttggcactataccaaccgtcaggatataaaacagttgaattccaagtaaccttgcttgtatccactgttgtatcttcaccctcacgtaccttacgtgctgcaatgaccgttctgaaaccatccatctcatacgaacaagtagacagaagcacaatctgg

SEQ ID NO: 2916 - DNA, 32759 bp, Unknown
  16S sequences of unknown bacteria
tttgggttagacccataattaggggctaaccctgtaacttaactaaatgacattgggctctgaacagttaccattttataatgaaaaacgggaaaataagaaaaaggaataacagaagacagtggaaagaaggaaaaaagatgcagcaggaaaaaaagacagcgatcgatgcaattgagcaaaaggcgtccctggtttgtgaggtggcggatcacatttgggattatgcggaattgtcacttcaggaggtacgctcggcagcattgtactgtgaggtgcttgaaaaagaggggttccatgtggaaaagggaatctgcgggattgagacggcgttttcggcgtcgtatggaagcggccgtccgctgatcggaatcctggcggagtacgatgcactttccggcctgtcccaggaggccgggagtctggtacggaaagaacggatatctggtggaagcggtcacgggtgcggccacaatttgctcggagccggcgcatttgcagcggcactcggtataaaagcatttctggaacgaagcagctgcccgggaacggtgatactgtatggctgtccgggcgaagaaggcggagcggccaaggcatttatggcacgcgatggcgtatggcgcgatctggatgcagcgctgacgtggcatccggaggatgtcaacgaggtggagaccggttcttccaactcctgtattcaggtgcaatataaatttacaggtatggcatcccatgcgtcaggtgctccggaaaagggaaggagcgcactggatgcggtggaactgatgaatatcggcgttcagtttctgcgggagcacatgagtgaccgtgcgcggattcattatgcaattacagacgcgggcggatgcagtccgaatgttgttcagccgcgtgccagtgttctgtatatggtacggtcgaatcatgtttcggaggcggtggagcttcaggcaagggttgaccggatcgccgagggagcagcactgatgactgacacgacgtttgaacgcaagtttatcgacggactggctgatactgtaacgaaccatacgctggagcgtgtgctgtatgacaatttcagtgcacttggcgtgccgcagtatacaaaagaagagctggagtatgcagatgcgctggcgaagacgtatccgggcagtgaagggcttcctggcgtggcggcggaaaacgatgaaaagctgcgggaagaagtggcggtgcttcggaaggaatacggccatgcgatgaatgcatttctggcacccttttatcagggtgaggcgtttaaagcaggatctacggacgttggcgatgtcagctggctgacaccgacggctcagatccacgtggccgcctggccgaatggctgcccgggccatagctggcagaatgtttcatgtgactgcacggagattggccataaggcggcggtacatgcaggtaaagtgctggctgcgtctgcagtggaacttttcctgcacccggaaatcctggaagaggcaagaaaagagtttgaaaagcgcacggcggaaggctatacctgtccgattccggcagatgcggtgccggtgatcccggactgatgcagccggcattggaaagctttttacatttttacagaagaacagataaaatgtatggcagctgttccatgtggggttatggagcgaaacggatcgtttcagtccgttttggctccggggcatgctgagaaatgttccgagagtgaataaagagaaaaaggagagagaaatgaaaaaggtaaggcagacatttgtgcgtttgttttctgcactgtttttgctggcagtgatctgcatcctgccatctgatcatgcagatgcggcgacgcggatcaaaggaattgatgtgtcacggtatcagggcacgatcaactggaaagcagtaaagcaggacggcattaaatttacaatgatcggcgtcggatacgtcatcaatggaaaagagcagagtgatccaagatttgaatacaacatccgcaatgcgatccagaataatgtaaatgtcggcgtttatatttattcccatgcacacaatgtaaaagaagcggaaaaagaggctgcatttgtactaaagcagatcaaaggctacaagatcgcttatccggtggcctttgatatcgaagatgaaattcatatgaagttgacgacaaaacagcgcacggatattacgctggcctttcttcgcaagattgaagcggccggctattatccgatgatctatgcgagtcagaactggctgtatgagcgcatggatttaagccgcctgacaaagtatgacaaatgggtggcaagatgggcatcgtcctgttctttcagtccgacttccatgtggcagtacagcagtacaggccgtgtgaaaggaatcagcacagtggtagatctcgattatgatctgagagactacacaaaaattatccggccgcggacacagccgggtccgaatgaaaaagaaacgccgggctggcacagcgacgagtacggcacatggtatgtgaaagcagacggcagccgcgtgacaaatacaaaaatgacaattaatgggaaaacctattattttgattcccttggctaccggaagagcggctggcagaagcttggaaagaactattattatttcagccgtcagacaggtgcgatgagaaagacgccgggctggttccaaattaacggaaaaacgtattatctggacaagaacggcgcgagacagaccggctggcttaaggtgggagcagatacgtattatctgaatgcagacggtgcgaaagcgtttggctggctgaaattaaacggcagaaaatatttcctgaagctgaagaccggaaagctgcagaaaggctggctgaaataccagggcaagaccttttattttgcacagcaggacggacggatgcgcacgggctggctgacgttcggcacgaaaaaatattacatcgcaaaagatggcaaccgcgcagccggctggacacagattggcggaaaatggtattactttaataaaaaagacggcgtgatgaagcgaaactgtaaggtaggaagatacatctttggggcggacggcgtatgcccgaattataagtagtacccgttgcgtttcaaaacagcgcgtgctataatacattgccgggacacctcgtaaggagggacccgtttacgggaggatcccttacgagtccggattccttacgatcctgttggattgtacagataatttttcaaacacaaaccggcagcaaaaagaaaaattcaaccccagacgggacccgcatgcaggcatttacctgacccggggtgataaacaaaaatggcgcacagccagagtacagaacagataaggagaagaaagatgagtaaaattccagtagttttaatgattcttgatggatatggactgaacgaaaggacagagggcaacgcaattgcgcttgcaaaaactccggtgatggatgaactgatggcagattacccgtttgtaaaaggatatgcgagcggacttgccgtaggtcttccggacggacagatgggaaactccgaggtaggacatctgaatatgggcgcaggccgcattgtatatcaggacctgaccagaatcacaaaagagatcgaggacggagatttctttgagaatgcagagctgaagcgtgcgatggaaaacgcaaaagagaataatacagcacttcatatgtacggcctgctctccgacggcggtgtgcacagccacattacacacgtttatgcactgcttgagatggcgaagcgttatggtctgacgaaggtatacgtacactgcttccttgacggaagagacacaccgccatcatcaggaaaagattatgtacagcagctttccgataaaatgcaggagatcggtgttggtgagatcgcaacggtgatgggacgttactacgcaatggaccgcgacaaccgctgggatcgtgttgagaaggcttaccgtgccattgcatacggcgagggtgatcaggcagcttccggtgtagaagcagttgcacagtcctatgcgaaagaagtaacagatgagtttgtagttccgactgtagtaatgaaagacggaaagccggttgcaaccgttcaggacggcgattcgatcatcttcttcaacttccgtccggaccgtgcaagagagatcacccgtaccttctgctgtgatgagtttgacggctttgaccgcggcgcacgcagaaatgtcgtatacgtatgcttcacagagtatgatgtgacgatcccgaacaagagcgttgcatttaaaaagatttctctgaccaacacattcggagagtatctggcagcgcatcacatgacacaggcaagaatcgctgagacggagaaatacgcacatgttaccttcttcttcaacggcggtgtagaggctccgaacgagggtgaagaccgtattcttgtaaaatctccgaaggtagcgacctatgacctgcagccggaaatgagcgtttatgaggtttgcgataaagtaacggccgcaattacttccggaaaatacgatgtaatcatcacaaactttgcaaatccggatatggtaggccataccggtgtgatcccggcagctatcaaggcgattgaagctgtggatgagtgtgtcggcaaggtagtagcagcagtgaaagagaccggcgcgaagctcttcatctgcgcagaccacggaaatgcagagcagatgatcgattatgagactggcgcaccgtttaccgcacatacgacgaatccggttccgtttatccttgtaaactgcgatccgaaatatactctgcgtgagggtgggcgtctggctgatatcattccgacgcttatcgagctgatgggcatggagaagccggctgagatgacaggagagtccctgctcattgaaaaataaaaaacacagatttcctatattcttttcacatttccgtcacaaagattgcgtatagtggaagaaaccaaacgagaacaggaaaggggatttttccatgacaggccataaagaaaaccgtgaaaagaaattcgataagaaaaacagaaagcagaatgcgtggaaacgatatggagtgattatgatggcaggcgtgctgatcgcaggcacgtctgcagtatcagcatccgtatatgccggaaatgtgcaggcggaggaagagacggaagccgagacagagaagcgcgtgactttaaatattgcaggcggcaaaaaggatgatgcttctgcagaggaagcgacagattctgagacagagacggaaactgaaacagagactgagaccgaaacggagaccgagacaaaagaaacgtacgagccgatcggggaggcatcctcatcagatggcagtgggatcgttacgaccgatgtctctgaagttgtagaaaacgctatgccgtcgattgttgcaattacccgtaaatccgtgcaggagattgaaacatactactatggtacacaggagtatgaagtcagcggtgcagcgtccggtattatcattgcacagaacgacgaagaacttctggtcgcgaccaacagccatgtggtaaaggattcgactgaattaaatgtctgcttttccgtagatgcggagaataccgatgatcttgttgcaccggcaaagatcaagggaatggatacgggaaatgaactggtagttgtagcggttcagctttctgacattccggaagaagtaagatcccagctgcggattgcaaagcttggcagttcggatgatctgaaagtcggccaggcggcagttgcaatcggaaatgcacttggatatggccagaatgtaacgagcggtatcatcagtgcgctgaaccgtccgatcacaatcgacaatttttcaaaagaggttattgtgacggatgcagcgattaacttcggcaacagcggcggagcactgctgaatgcaaagggagaagtaatcggtatcaatgtggcaaaagaggccggtgagggcagtgacagcatcggctatgcgattccgatcgacaccgcgatcccgatcctgaatgaactggtcaatcgtgagacgagagatcagctctccaacagtgagagaggttacatgggtgcaacggtagtcaatgtttccgatgatgcaaaagatctttacaacatgccggagggagcgttcgtgtatgaagtagctgagggttctgcagctgaagccgcaggcattaagaaaggcgatatcatcacgaagttcgatggaatgagtgtatccagttcttccgatctgattgataagatgagctattacaaggtcggtgagactgtgacggtggaagtgcagactgcaaatggcggtgactatgaaatacgcgaagtagaagttaccctgcaggagggcggaaatgatgtacaggatgagacggatgcgcaggaagcaccgtcagacggacaggatgatgagttcggaacggatggaaatatgtttcggatgattccggactgggattcatcgaatgaggagaacggggtgttctgactaagaatactcaagagactcaataaagttgaaatcagtaactgttcagagccaacctccaaaatgctacgcatttcgtcggtgtggcgatccgccaaataaaatttcaaaaacaggcttaaaaatgcaagcattttccgcctgttttatgaaattttgcctggctctgaacagttactgaaatcattcgttttaggccatattgtgaaaatcaggaatttaaacacaagcagagtgaaaaaactttcgcaggacatactgttcatagagaactgatggatcattgcgaaatagtgatagtatacctggacttatcactatttacggaatgaaagatgagatatgatgcaggaggttttttatgtgcagctatatggcaattacggatgtgtttgcgcgggagatcctggattcaagaggaaacccgacagtggaagtggaacttatgacggaggatggcagcgtcgggagagcggcggttccgtccggtgcttcgacaggggaacatgaggcggcggaactgcgggacagggaagcccgttatggggggcttggtgtcacgcaggcgtgccattatgtcaatacacagcttgcggatgcggtgatcggggaaaacgtatatgcgcagcggacaatcgatcggattttgtgcagggaggatggaacgcgcacgaaagaaaaacttggtgcaaacgggatgcttggcgtgtcgatggcaacggcggcagcggcagcgaattctctggaactgccattgtttcgttatcttggtggtgcctgtgcaaaccgcctgccggtaccgatgatgaatattttaaatgggggctgtcatgccgataatacagtagatctgcaggagtttatgattatgccggtcggagcgacaggatatgcggatggactgcggatggggacggaaatttatcatgttttaaagacatcgctgaaagaacgggggcttgcgacaggagtcggggacgaaggcgggtttgcgccggatcttccggatgcggatgcggtgctttccttaatctgtgaggcagtgcagcgtgcaggatatgagctggagaaggatgttgtgcttgcgcttgacgtagcagccagcgagctgtatcagaaagaaagcgggcgttattattttccgggagagagccgtctgagagggcaggaagtaagcagagataccggacagatgattacttacctggagcagctctgcagccgtttcccaatccggtcgattgaggatgggctggatgaaaatgactgggagggctggaaagaactgacagaccggctcggagcacgtgtgcagctggtcggtgacgatctgtttgtgacaaacaaggagcggctttcagaaggaattgtacgcggtgctgcaaatgcggtactggtcaaagtaaatcagatcgggactctgacagaagcgtttgatacgatggatctggcaggacagaatggttatcgttgtatcgtttcccaccgatcgggcgagacagaggatacggcgattgcggatatcgcggtggcagttggagccggtcagatcaaaaccggagcaccgtgtcgtaccgaacgcgtggcaaagtacaatcagctgttgcggatcgaggatgcgatcggatatggagctgtgtatgaatctccgttttaccgcagataagtatttaattcagtatttaattcatagaaaaaacagttgaaatattaaatggcctgtgatacactgaacatgtttgacgtaggaggtgtagtgtaccgtgagaacttttattaccattatttttgtgctggtatgcattgcattgacggtggttgttctggctcagcagggaaaagacgcaggactgggcgcgatcggtggtatcggagatacttactggagcaagaataaatcacgttccatggaaggaaagctggttcagtttacgacggttttggccgtattatttatcgtgcttgccgttattctgaatttgaatttctaaatcacaggttggctttgttaagctggcaggcagagcatttttgatctgccggtttgaacctgtgtttccaaagaagcggaggactgatgcagatgcaccggtccttttctttttaaccgagtcaagcaagtcacctgcggggttgcgcggagcaataagcagtgggtggggacttgcttgtatcaggagtggtacaagccactcctgataagctgcggagcgaattgtgaacatccgctttgatatcagaatcagtcgggctgtaagagaagaaaaagaaaagtagagagaaagatatgaaacagacagaagaacagtttgaacgccggaaaaaggtgattcatgatatgttatgtgacaaacagtacgtgccgatgaagctaaaagagatggcaatgctgcttcagataccgaaagaaaaccgccaggagttgaaggatgtgctggatgcattgatcctggagggaaaggcggaggtatctgtaaaaggaaaatatcgcaaatctactgcgaaatatgttgtcgggcgttttattgcgcatccgcgtggatttggatttgtggaggtggaggaccgcgaggaggatatttttatcgcggaagaacatattggcggtgcgctgcatgaagatacggtgcgggtactgctgcttccgccgtctttgggaaaaaggcaggaaggtgcggttgtgcagattctggagcatggcatccgtgagctgatcggtatgtatcagaagggacgcggcggttatggctttgtgattccggataatcagcgcatcacgaccgatgtttttgtggcagaagaacgcagtaaaggcgcagtgagcggccataaagtgaaagtggagattctttcctatggggataaagatcataagccggagggaaaggtgacggagatcatcggccacatccaggatccgggcaccgatatcttgtcggtcgtatatgcgtacgatctcccgaatgaattcccggaaaaggtaatgcgccaggcggagcgcgttccggataaggtgcaggagagtgacctggaaggcagaacggatctgcgcggcatacagatggtgacgattgacggggaggatgcaaaagatctggacgatgccgtttcccttacgtttgacggaacacattatcatctgggcgtgcatatcgcagatgtggcaaattatgtacaggagaaaagtgcactggaccgggaggcatttgcgcgcggaacgagcgtgtatcttgcagaacgcgtgatcccgatgctgcccatgcggctctcaaacggcatttgttcgttaaatgcgggagaagaccggctggcaatgagtgtgctcatggagattgacgaaaaaggaaccgttctttcccatgaaatcgtggaatctgtgattcgcgttgaccggagaatgtcgtacacggaagtgaaaaagatcctggaggatcatgacgggaagctgtgtgaaacgtgtgcggagcttgtgccgatgtttgaacagatggcagtgctttccggagttttgcgggaaaagaggagaaaacgcggagccatcgacttcgatttcccggaggcgaagattattcttgacgaaaaggggattccggtcgagatccgtgcttatgaccggaatgttgccacaaaaatgatcgaagattttatgctggcggcgaatgagacggtggcggaggatttttactggcagcaggttccgttcctttaccggactcatgatacgccagagccggaccgcatccggcagctgtccacatttactgccggctttgggtacgggctgaaaggtgtttcggatgaagtacatccgaaggagatccagaagctgcttgagaaaattgcggatacgccggaggagcggatggtcagccggctcgtgctgcgctcaatgaagcaggcacagtacacaccggagtgcagcggtcattttggacttgcagcgaaatattactgtcattttacttctccgatccgccgttatccggatctgcagatccaccgcattatgaaggaagtgctgcgggggcggatgaaagaagagcggatcacgcattatgcggagcttctgccgtcggtcgcggaacattgcagccaaacggaacgccgtgcggatgaggcggagcgtgaaacggtaaaaatgaagaaggctgagtatatggagcgtcacattggtgaggagtttgatgcagttgtctctggcattacatcctacggcatctatgcggaacttccgaacacggtggaggggttgatccatgtaagcaaaatgtacgatgaccgttattattacaaagaagaaacgtatgaaatgtacggaattgacacggggcgcgtcttccggctcggagatccggtccatgtgcgggtgatcgatgcaaataaagcgcagaaaaccgtggattttgaactggcggaggaaccggaaatctgagtgcaaagcgttaacactcgtcagtaagaaaggaaggcggattgtgaatgtccgcgttattgtcagctttacaaatatggtaactgttcagagccaagcaaaatttcataaaacaggcggaaaatgcttgcatttttaagcctgtttttgaaattttatttggcggatacgccacaccgacgaaatgcgtagcattttggaggttggctctgaacagttaccaaatatgtatgtgataagacgataaggcggaaaccagaaccgccagggagggggaacaggcatggcagatgcaggcaagctgattgcaaacaataaaaaggcctaccatgattattttattgaagaaaagtatgaggcaggcatctcacttcacggcacggaggtaaaatccctgcgtatgggaaaatgcagcatcaaagagtcctttatccgcatcgaaaacggggaggtgctgatctacggtatgcacatcagcccgtacgaaaagggtaatattttcaacaaagatccgctgcgtgtgaaaaaactgctgcttcacaaaaaagaaatcaacaagatgcttggcaagatcgcggagaaaggctatactcttgtgccgctgcgtgtttatttcaagggcagccttgccaaagtggagatcggcctggcaaaaggaaagaagctgtatgacaaacgtcaggatatcgcgaagaaagatcagagacgtgaggcagagaaagaatttaaggtgcggaatctgtactgaaaaagtgcttcggaggcagaaaacagaaaaatccagttgacaatcagatacgaagcctatatactgaaaaataggcgaaagaaccgggagcaaattttgctctgtcaggtccccggggctagtaaaggtttcgacgggggttatgaagctggagaagctatccgcaggttgatgcgtcaaatcacaaattaaaattaaacgctgaagataatttagcatacgctgcctaatggcagctgtctgacacagagcacctgcactttgtgacccaggcatcgatgatgcaggaaacgacatatgttaagctttgcgcatatgggcgtatcatgaagctactgaaagcagaaggctgtctgttgtcgcctgccggagggaatgtcaaataaccgactatgatagtagaaggacagtggactggctttcggacacgggttcgactcccgtctagtccaatattataaggaatctcataaggagggacccgcgtcagtgggaggatcccttatgagtagccctctgaaaattgggaggatcccttataatttgcagacgccaacgaacgaagttcgttttcaaatgagtctgctcccgtaataaggagaaatctacgcttttatgataaggagggacccgcgtcagtgggaggatcccttatgagtagccctctgaaaattgggaggatcccttataatttgcagacgccaacgaacgaagttcgttttcaaatgagtctgctcccgtaataaggagaaatctacgcttttatgataaggagggacccgcgtcagtgggaggatcccttatgagtagccctctgaaaattgggaggatcccttataatttgcagacgcatttaaatgcgtctgctcccgtaatgtaacatttttagaaaaacaacggcattgtatatgatgcaatatgcgatgccgttattttttgcgcggtttcgcagctttttcgtgcgcctgaaccagataattcttccaggaagcgtataagaccggtcgtttcccggaatgattataaaaaatgtattcgcgaaattcttctcgcaaaatcaggcgcaaaaggattccgggagtacataaaaaccacaagggaggaaaatcaagatgagtcttgaaaaattttttcatctgaaagaaaatcacacagatgcaaaaacagagatcatggcaggaatcacctcatttatgacgatggcgtatattcttgcagtaaatccgaacattctggccgcagccggaatggatcacggtgcggtatttaccgcgacagcagtggctgcttttattggtacactatgcatggcattgttcgcaaattatccgtttgcactggctccgggcatgggattgaatgcatactttgcgtataccgttgtacttggcatgggatattcctggcaggtagcgcttgcagctgtacttactgagggcatcatttttattctgctttcgctttttaacgtgcgcgaggcgattttcaatgccatcccgttcaatctgaaaaaggcagtcagcgtcggcatcggactttttattacattcatcggtctgcagaatgcaaaaattgttatcggaagctcgacactgttaagcctgttttctctggatggatataacgcaaccttgacaggcggcgtgcaggcaacgtggaatgatgccgggattacggtgcttcttgcgatcatcggtgttattatcaccgcagttctggttgccagaaatgtaaagggaaatattctctggggcatcctgatcacctggctgctcggaatcatctgtcagctgaccggtgtgtatgtgccgagcgcagaacttggtttctacagcctacttccggatttttcagcaggaatctcaattccaggcattgcaccgatctttgcaaaattcagtcttcagggtgtttccattctggagtttatcgttatcgtatttgcatttctgtttgtagacattttcgatacgctgggaactctgatcggtgtggcttccaaggcagatatgctggataaggatggaaagctcccgcgtatcaaaggtgcgctgatggcagatgcgatcggaacaacggccggagcagtacttggtacctccacggttacgacctttgttgagagtgcttctggtgtatctgagggcggccgtaccggtctgacttctctgacaaccggtattcttttcctgctctctttgttcctgtccccgatcttcctcgcaatcccgtcctttgcgacggctccggcgctgatcatcgttggcttctacatgctgggagcagtgactgagatcgatttcaaggatgcggcagaggggattccggcatttatctgtattatcgcaatgccgtttttctacagcatttccgagggaatcgcaatgggagttatctcttatgtggtaattaaccttgtaaccggaaagaagaaaaaagtcggaccggtgatggcagtgcttgccgtactgtttattttaaagtacattctgatgtaactgcggctgtctgcttcagagcgttcatttgacagaataattacgaaggatcggtttttccggcggtttgagccaggagaaaccgatccttttttaaccgagtcaggcaagtcccctgcttcaattgcgcggagcaataagcagtgggtagggacttgcttgtatcaggagtggtacaagccactcctgataagctgcgaagcagctgctcggttatgagcaagtagcgaagcggattgcgaatatccgctttgacccgagtcaggcaagattatggatatctgcagggcaaagccggaaaaggggaaaagggctggacagagccggatgggaatggtagaatagcggttggtatagagcctgcggaaataaaaacgaaagagggaatttttatgagtgaggcaaaaaaaacaggacatttccggctgacttctcaggaacattattcggaggcgttttgcacgagtgcgtttcttgcactgtcaggaggctttcaggatgcttatacgtataactgcagggacggtgttttttcaaatgcacagacgggaaatattgtgctgatgagtcagcatctgatgcagggagagtggggcaggtgcctgcattattttgtgccggtagtggcatttgcgcttggcgtcctgatttccgagcagatccagcatcgatataaatatgcaaagaagatgcactggagacaggggattctgctcgcggagatcgcaatcttatttgcagttggatttattccggcttcttttaatgtggcagcgacggtacttgtttcactgtcctgtgcaatgcaggtacagacgttccggaaggtcggcggttattcttatgcaagcacgatgtgcatcggaaacctgcgcggaggcatggaggcgctgtccgtttatttaagagaacataaaaaaggacagctgcggcaggcgtcttattattttggcgtgatttttttgtttgcgatcggagcaggcattggcggtgtcctttctgtaaattatggaatccgcgtgatctgggtctcctgcgtgctgctgctggtaagctttattttgatggctctggatcgatttaactgagtcgggaagtgaagtagattacgaatgtcgttttggcttaacttagccggattgcgaaaggatcaagccaggaatacaaggaaataccgcataaaaaacacagaatagacaaaaaaacagggtatgataaaaggcagaaaacgggaaaaagcggattgcgaatatccgttttgatgaaaaagagcggaggaaatgagtatggaacgactgaagattcttgtagtggacgacgagagcagaatgcggaagctggtgcgggatttcctggtgaagaaggattttgaagtgctggaagccggggatggcgcagaagcggtggatctgttttttgatacgaaggatgtcgcgcttgtgatcctggatgtgatgatgccgaaaatggacggctggcaggtatgccgcgagatccgagcctattcaaaagtgccgatcatcatgctgacagcaaagagcgatgaacgggacgagctgctcggcttcgagcttggtgtggatgaatatatttccaaaccattcagcccgaagatcttggtggcgcgcgtggaagcgatcctgcgcagaacgagcggacttgcagcggatgatgtgctgcgtgcaggcggaattgagatcaacaaggcagcgcatgaagtcacgatcgacggcagggcgatcgatttaagctacaaagaatttgaacttctgacttatttcatggaaaatcagggcattgcactttcaagagagaagatattaaacagtgtctggaattatgactatttcggagatgcgcgcaccattgatacacacgtcaaaaagctgcgcagcaaactcggagacaagggggattacattaagacaatctggggcatgggatataaattcgaagtggaagggtgacggaagatgaacatgtcgctgagaagacagctgactttatgctttacggcactgatcggtgcgctgtttctgattaattacttcgttacctctttttttctggagagctattactacatgcgcaagcagcaggtgcttgtggatgcctacaatatgctgaatgaaaatatcacggatgagggcggcctggaagaagagccgatgagagaactgacgacggtctgcgtaacgaacggtatttcgctggttgttgtggatcataataacaagattctgcttcggacgatgtggaccggcagcgatctgattaatctgatgctggccagattaaacggctaccagatcggagttgacgagggaaatgtactggagcacaacgatttctatacgatccagcggaaagaagattctgaggttgggcttgaatacctcgagatgtggggaagcctggataaagatttttattttatgatgcgttttaacgtagaaggcgtaacagaaaatgtgcgcgtctgctcggaatttattaaatatatctgtctggcaggtatcgtacttgctgttgtaattgtctggctgatctcgcggcgtgtcacgaagccgctgcatgagctgacggagctgtcgaaacggatggcagagcttgattttgatgcaaaatatacaagcggaggaagcaatgagatcggacagctgggcgagcatttcaaccggatgtcagagaatctggaaaaagcgtattcggagcttctgacggcaaataatgagctgcagcaggatatccagaaaaagcagaagatcgacgatatgcgcaaagagttcctctcgaacgtttctcatgagcttaaaacgccgatcgcgctgatccagggttatgcagaaggacttgccgaatgcatcaatgacgatgcggagagccgcgacttttactgtgaggtcattatggacgaggcgtctaagatgaatacgatggtccagaagctgctgacgttaaatcagctggagttcggcaatgacaagattgtgatggagcggtttgatcttgcgatgcttctgaaaaacaagatccagtcgatcgcgattctggcacagcagaaagaggcacagatttcctacagtggaaaggacagtgtgtatgcgtggggtgacgaatttaaaatcgaagaggtcatcacaaattatctgagcaatgcgctgaaccacgtaagcggagcgaaaaagattgaagtgcgtgtggagcaggatacagaacaggtacgtgtgtctgtatttaataccggagagcagatcccggaggctgatatcggccagatctgggataaattctataaggtggataaggcgagaacccgtgaatatggtggaagcggcgttggactttccattgtaaaggcaatcatggaatcgctgaatcaaaaatatggcgttgagaaccgcccggatggcgtggaattctggtttaccctgaaaaatggaagtgctcagaaggaagaggagacaggcgattcggacgctgtgaagagcagtgtgaaaaaggataaaaatgagatctgcaacggtgcatggcgaaaggtagagccggacgaaacacaggattctgaggagaaagtgtcagaaggacgaagtacggaggatcagggcggtgaatagaggctgcccggggaaaggaagagaaaaaggaaaagaagaaggaacagaagaaggaacagaagaatgagtaaagtaatcgtaatcggaggtggcgcagccggtatgatggctgccattgccgcggcggaggatggacatcaagtcactttgctggagaagaatgaaaaactgggcaaaaagatttatattaccggaaagggccgctgtaatctgacgaacaactgcgaggtggaagatctgctggaggcaacgtgtgtcaaccagaaatttctgtacagcgcattttatggttttaccagtcaggatacgatcgaattttttgaaaattcagggatgaaaacaaagacagagcgcggcaatcgtgtcttcccggtttctgatcactcatcagatgtcatcctggcactgaatcggagactgaaagagtgcggtgtgcgcatctgcctgcacacggaagcagcagggatcctgacgaaggagagttccggtgaaaaatccggggtatgtgtctgcggcgtgaggaaaaaggatggtatgcgtcttgaggcggatgcggtcattgtggcgaccggtggattgtcttatgcgtcgaccggttcgactggtgacggataccgatttgcaaaggagctggggcttcgtgtaacggaatgttctccatctctggtaccgattgaggcggcagaggaatgggttccgcgtttacaggggctttcccttcggaatgtggaagtgacgatcctcgatggaaagaaagaattgtaccgcgagttcggcgagatgctctttacgcattacggcgtgaccggcccactgatcctgacagcaagcagtgtgatccaaaaaaaacttgcgggacatccgcttgcaatgcggatcaatttaaaaccggcgctgagtgaagaacagctcgatgcacggattctgcgtgagtttgaggcggcaaaaaacaaacagttcaaaaatgtgatcggtacgctgtacccggcaaagctgatccctgtcatcatagaactttgtgggattccggaggagaaaccggtgcacgatatctcaaaggaagagcggaaacacctggttgaaattacaaagcagttcccattgacccttacccgtcttcgcggttataatgaggcagtagtgacacgtggaggtgtcagtgtaaaagaaattgatcctggtacgatggaatcgaagaagatatccggactgtattttgccggtgaagtgcttgatcttgacgcggtgaccggtggatttaacctgcagatcgcatgggcaacgggccatgcggccggaagaggaatccgctgaaaagatcgcccggatgataaaagacagtccggtgagcggtaagtatagaaagattctgaaagtacattagaaagaaaaagaggaagaaatgtatgagttttaatattgcaatcgatggaccggcgggggccggaaaaagtacgatcgcgaaacgtgcggcagaaaaactttcatttatttatgtagacaccggggcgatgtaccgggcgatcgcactcggacttctgcgcagtaataccgatatcgcggatgaggcggcgttaaacgcaaggctcgcggagatttctgtggagatcagctatgaaggcggcgtacagcaggtttacttaaacggagagaatgtatcgaatctgatccggacggaggaggtcagcgacatgacgagccgcagttcagcaatcgcacaggtacgcgcaaagctgaccgatctgcaaagagaccttgcggcaagagaaaatgtactgatggacgggcgagacatcggaacgacgattctgccgcatgcgcagctgaaaatatatctgaccgccagcgtagaggtacgggcgctgcgccgctacaaagagtatctggccaaaggacagaaggaccagacacttgcagaggtggaaaaggatgtagaaaacagagattatcgcgatatgcaccgggatgtctcgccgctttgccaggcagaagatgcagtttacctggattcatctgagatgacgattgaggaagtggtcgatcacattgtaatgcttgcgagggagcgtatggcatgaaagttatcgtagcaaagacggcagggttctgttttggcgtgaagcgcgcggtcgatcaggtataccgtcagatcgaagaaggaaaaaagccgatttatacgtatggaccgatcatccacaatgaggaggtggtccgggagcttgcggaaaagggagtacggatcgtagaaacagaggaggaactccgaaaactgaaagaaggaaccgtgatcatccgttcacatggagtgccggaaagaatttacaggctgatcgaagcacaggggctcgaaatgatagatgcgacctgtccgtttgtgaaaaaaattcaccggatcgtgcagagccacagtgctgaaggccgggagatcgtgatcatcggaaatgacggtcacccggaggtggagggcatcaaagggtggtgcagtactccggtgacggtgatcggagaggaagcagaagcagaagcgtttctgcgcgagccgcatccggcaatctgcgtcgtatcgcaaacgacatttaattacaagaaatttgataaattggttgaaattatctccaaaatgaggtatgataaattagatattttgaatacgatatgtagcgccacagaagaacggcagtctgaggccaggcagatcgcaggtcaggtcgacagtatgatcgtgatcggaggcagccacagctcaaatacgagaaagctattcgaaatatgcaagaaagaatgtgcaaatacttaccatatacaaacactgaaagatttggatattcggcgattgccatccaggggttgcgtaggtattacagcaggggcatcgaccccaaataatttaattgaggaggtttcaaaacaatgtcagatttaagttttgaacaaatgctggaagaatcattcaaaacaattcataatggagaggtagtcgaaggcactgttattgatgtcaaagaagatgaaatcatcttgaacattggatataaggctgacggtatcattaccagaagcgaatatacaaatgattctaatgcagaccttcgcgagcttgtccatactggtgacaagatggaagcaaaggttttaaaggtaaatgacggagatggtcaggtgcttcttacctataagcgtcttgctgctgaaaagggcaataagagactggaagaggcattcaacacacaggaagttctgaaagcaccggtcgtacaggtactgacaggcggtctgagcgttgttgttgacgaggcaagagtattcatcccggcaagccttgtttctgatacttacgagaagaatcttgagaagtatgcaggacaggagatcgaatttgtgatcacagagttcaatccgcgcagaagaagaatcatcggcgaccgcaagcagcttcttgtagcaaagaaagctgagatgcagaaagagctctttgagagaatccacgttggtgatgtggtagaaggtgttgtaaagaatgttactgatttcggtgcattcatcgaccttggcggtgcagatggactgcttcacatctctgagatgtcctggggtcatgttgagaacccgaagaaagtatttaaggtaggcgagaagctgaaagtcctgatcaaagatatcaatggcgacaagatcgctctgagcctgaaatttgaggatcagaatccgtggcttaccgcagcagacaagtatgcagcaggcagcgtagtagaaggccgtgtagcaagaatgaccgacttcggtgcattcgttgagcttgagccgggtgtagacgctctgcttcatgtatcccagatctcccgtgagcacgttgagaagccgtccgacatcctgaaagttggccaggtgatcactgctaaggtagtagatttcaacggcgaggataagaagatcagcctgagcatgaaggctcttgagaaccaggctccggcagaggacgaggagtaattctttctcctggtcagatccgagaataaaataatcaaaacatacagaagggcttccggaaaatttccggaagcccttttctgacactgtaaatgtttgttttgaacgacaggtcgcgaagcgactgcgttcatgaaatatcataagggtaacccgcttgcggaatcttgtaaggagggatccgtttacgggaggattccttacgagcctggattccttatgatcctacaagtagcgaagcggattggaatgtccgttttacatcaaagaagttgtctttggaaaatcagctcacatctttctttcggataacacccgccgggcatttctccgcacattttccacattttgtacatttctcataattgatatgagccacattattttcaacggtgattgcgccggattcgcactgtttttcacacagcttgcaggcgagacaaccggccttgcagactttcttaactgcggcaccgcggtcgtggctggagcagcgtaccgcatagacggcagattccgggacgagctcgatcaggtgccgcggacaggcagcaacacattttccacaggccttgcatttggaacggtccacgcttgcaacaccctgattgacggtaattgcaccgaacggacaagcggaagcacaggtgccaaagccgatacagccatagtcgcaggtccacggggaaagcccgctgctggcagcggaagcgcagtcgtggatgccgacgtaacggcatctggctgctgcattttcgcagtcgccggagcatttgacataagcggcgactttttctgttttttccatctgaaggccgagcagacggctgatcttttctgcgacaggatcaccgccgaccggacaggcatttaccggtgcttcctgatttgcaatagctgatgcaagcgcatcacatccggcataaccgcagccaccgcaattgttgcccggcaggcattcgcggatcgctacctgtttctcatctacttctactttaaattttttatcgactgtgaccagcagaatgccgatcagcatgccaatgacagccacagcaagtgtggcaacaatgattgatgacataagtacctcctatcctggatttcgcgttagtgagaacggaaatcagttccgccctcagccgcaaaccattcgcttacagtgacagtccggcaaatcccatgaatgcgatggacatcagggctgcggacagaagtacgacaggggcaccgcggaatggaagcggaacacttgcttcatcgattcgttcgcggatgccggcaagcagtacgatcgagatcgtgtagccgactgccgtaccgaaacctgcagtcacgctctgaatgaaattgtaaccgtcctgcacgttggtcagagcgacaccgagcacggcgcagttggtagtgatcagaggcagatagattccaagcgcattgtagatcgccggtgaagtctttttcaggaacatctcaacgatctgtacgagcgctgcaatgacgagaataaagacaatggtttccaggtattccaggtgcagcggaaccagcaggaaatcgtacagcaggctggctacgcctgaagaaagtgtgataacaaagataacggctactccaagacttaaggaagtcttgatctgtttggaaacgccgaggaaggagcagattccgagaaactgactcagtacgacgttgttgacgagagccgtggtaatgatgatcaggatcaatgatgtattcatatggctcatccctccttattctcattctggcagccggatttgctgcagtggttgcaacagccgtcacagcccttgacaaggtctgcagaattgttcttgatatgtaaggcattcatgactgcgataatcagcgcgatgacgagaaatgcgccgggagcctttacaaagattgcgatcggtgatacggattctggaaggatagaaagtccgaagagttttcctgagccgagcagttcacggatcatgccgatcagagtcagtgcaaccgtaaagccaagacccattccaagcccgtcgaaaagtgcaagtcccggtccgaccttgtttgcataagcttctgcacggccgagaatgatgcagtttacgacgatcagcgggatgtaaatgccaagcgaagcgtacagcccgggagcgtatgcctgaagcagcaggtcaacaactgtaacgagagaagctacaatgacgatgtaagccggaaggcgtacctgatccggaatgatcttccgcatcagagagatgatcaggttggaaaagatcagaaccgcaagggtggaaagccccatgccgattccgttgatggcggaggtggtgacagccagagtcggacacatgccgagcatcaggacaaggctgggattttccttcaccacgccgttgtaaagtcgttctacatatttattcatagtctgtcccctccttattggattgacgatgcatagaaagcaagcgcagtgttgactgcatttacaacagcaccggaagaggtcgatgcgccggagacggagtcgatctcattgtctgtggtggagccgccggccttgtttaaagtaaatgcgtcggtattgactcctgcaaactgactgcggaatgcatcctcgccgcagagcatacccataccggccgtctcatgcagctcagtgaaggagatgccgagtacggtgccttctgtgtcaagcccgacggagagtgtgatcgttccatcatatccgtcaccgctggagacgctgatgacgtatccgacggtcgcatccgaagcgtcttttccaaccatgacgctgttgatataggtcttgccgaatttctcgtcgtaaatgtcgcctccgagggcttcgatctttgcattgatcgtgtcgtcagtcacaaaggtttctgcatccgggcagacttctttgtaggaagctgcatttgcagcaagcttctgctcgtcgattttatccctggtcaggagataaacactgctgagtgcaagtccggcacacagggtgatgatcgtcaggttgacagcagcctttggaaactgtggctttccggatgcggcgcgatagccgagcggtttcgggacagaaatcttatcgataaacggaacgaccatatttgcgatgatgattgcatagctgacggaatcggcagagcttccatagacacggaagagcccggcaagaataccagtgatcgcgccgtaaagcagctggccgcgggaagtgaccgggctggtgaccggatcggtcgccataaagaaagctcccatcagtacaccgccgccgcagatatggatcagcagataattcggatcaaagccatgtccgccgaagagtcccataaatacagcaaacgcagccacaaaagcagccgggatctcgatcgtgatgcctccggtgatcagcaggaagatcccaccgatcagaagggcaactgcacttccgccgatcacgccggccgtgtaaccgagtgcagtctgggaaagacttacagcttcaccggcacgcagtgcggcaagcggggtagcagaactcatgccgtcgacagagaaatttgtcatggcacttccgaaggagatcagcaaaaagcagcgtccggtcagagccgggttcatgaagttcttgccgagtccgccgaaaaagcatttgacaaacagaattgcgaagacggatccaagacacggaaggtagagcggtacggccggggagagcgaaaggcccaggagcaggccggtaacaacagcgctgccgtccttgaccgtcattggctttctggctgctttgtcatagagaaattccgtagctactgcggaagcgacactgatcagcaggatcagaaaagcatggatgccgtagcggtaaatgccgaacacggcagccggaagcaaagccagtaccacatcggtcatcacagcgccggtggtcaggcgatgacggatgtgaggactggaagacatattcagtagtttttcattcattttccgttccctcactttctttttgcggccatgatcgaggctttcgtctgtttgaacagctgcatcagcgggcgcttggccgggcagatgtaggtgcaggaaccacaggcaatgcagtccagcccgtacagctttttctcgtatcgttcataatcctttcgctcggcggcctcagccatcatctgcggtacaagaccgatcggacagacgtggccgcagcggccgcagcgcaggcaggcagtcatctgattttcagcgagttcaacttcatcctccgcgagaaccgtcagtgcattgttgttcttggcgatcggaacatcgagtgtcgacatggcaattcccatcataggaccgccgcagagaatctttttggcggtacattccggtttgatgccgcctgctgcctcaagcagttccctgcaggaagtgccgatccgtacttccatcgtgtgtggtttgacaacggcgtcaccggatacggtaaagagacgggtcatcagaggttctgatttacagactgcgcggtagatggcgtttaaggaactgacgttgcagacgacacagcccagatctgccggaagctgtccgaaacgcagctgtcttccggtgacaacgccgatcaggtttcgttcgccgccttccgggtattttgctttcacttcaagtacagaaatattggaatcggaagcgcaggcctttgtcatggctgcgattgcctctggtttgttgtcttcgatggcgattacgccttttgcatttggaaagagccgcagtaccagccgcataccttccacgattccgtcgcttctggtgcgcatcagctggtcgtcgcaggtaatgtaaggttcacattcagagccgtttgcaatgacgtaatcaatttgctccggattacgcggggcaagttttacgtgggttggaaatccggcgccgccaagaccgacgataccggctgccttgatcgcatccagaatctgcgggccgctcattgaggtgtcatcatgttctgtgccgacacccggggcgagggtaaataatccgtcattctcgatgacaatgcaggtggctctgccgccgtttaccgtgtgccgttcctcaatggcttttactttgccggagcaggaactgatgatgtttgcggatacgaagccgtccgcctcggcgatcagctggccggcaagaacgggatcccccttttttacaactggctttgctggttttccaatgtgctggttgaccgggaagacaagctctcctttggggagaaattcttcgatcggacaatctttggagaggtctttgtgtccgtctggatggacgcctccccgaaacgttttgtgactcatacgatacctcctgtttgattgtcatatctcgtctgcaggggagcggagaacctcataatcagggtatccggcgactgcagagggcggttatttccctgcataaggagaaaccatcccttatgagcctgggtgggcttccttatgattttgcggataacggacatagatggtaaatatccggtcagcgcaaaatgaaataaataatcgattaagaaaatcatatcagatacgagcctgaaaatccagcttttttcacaaagaaatacgttaaaaaaataactgttttgttaattaatacacatacatatgagaagttagaaaaaagagattctggaaatgcaataaaaagagagattttttttatgaaaaaaatctctgaaaacagcactgcacaagtggatgaagaagatctggctgatgagaaaaattctcactgtactcaaaaaaatgagcttttgcatcaaaggaagcgcgaaaatcaggagagagaagtggctgcggctgccagtaaaaaatgtcggattttcgcgtatagcaggtcgctgcttttgcaggaacgcgatattccttatcaatataggaggcaacgcttttatggattgcctgatcttcgagcggaagatagcagtaatttttgtaatccgggaaaaaatacttcagttcacacgggaaaccggggaaacgaagcacagctgtagaatttttaacgatcatatcgcatacgcagctgcaggaaacggcaggatcgtcagaaaagtgcgaaagagagagtggagtgggcagtggagcccgcagctgaatcgttacctcaagagacgggacggcatttttttcatcggagcggagaaaacaagagcgcacaccgataaaatcgccgtccgcaagcatacagtaagctgcgagggggagaagatttgtcatgcccaccagatcgtcatggttgtggagcagcatcagctgaagcagctcctgatcctgcgtcttgtcgaaggaacggaacatggcagccatatgttttccgctcagggtatcggtgcgctgccatccggcaagcttttcaagtgcagactgtttcaaacttgtctgtccggggagatgccgcaggacggagagtgtgcggtagaggtcgagggagtttttttctgctgctgtaaagggatgtgtggaaaacggaacatgcgctgcaccagaagtttggcaggcggatttctcagcggattgcctgccggaagatttgccggagacaccatgcagagaaatccccgtcagttcataggcgtttgcttttgcgtttaaaaatggcacatcaaaggtagaaccattaaaatgaatgagcgtatcatacggcgctgcgtctgacaaaaaagtctcgagcagctgtttttcctcggaggcatgctctgcaagatactgggtgagctgccagctgccgttttcgagatgaatcgtcccgatcagaaagacacaggcggatttgtgggagaggcctgttgtctcgatatcaaaaaagagtgctttttccggcgtgtagccgtaaaattcatgaaagtccgggaaatccggaagtacagaggttgtttttatcataagaaatcctttctgccgaaatagtatgccagggaagcatttgcctgctgccgtttcaggaataagtgatgtagcatagagcaaagtcgaatatttgttttgcttttgcttcataagaaattgtgtcttgtaaaacagaaacgctttgtgatcaggattttttgtatcatcgctgttcagtataatagaaatagtagaaaaaatccagctattgaaatctggcgaggaggctgataaatcataaaaagcgatactttcgattttaaaaacttaaggttttcttccgttgtgcccgtgtaaaaggcagtgtaaaataacaggcagaatatattttggaacgtggtgacgaaagcgaattgcaaaggttcgctttactatgtgccaggaaaggaaggagcatacagatgctgcttgagtgcagaaatttaaaaaagaattatggaaagaagcaggcagtccggaatattacgctgaatctggagcgtgggaaaatttatggtctgctcggaccgaacggaagcggaaagacaacatggatgaaaatgacggccggactggtaaaaggctgggagggatcgatttcttttgagggtcatccgctttcttatcacgataaggcagaaattgcctatatgtcgacagagccattcttctattcttatatgaagatagcggatgtcggaaagtattaccgggacttttttaaggatttcgatgaagagcgctttggagaactgctggagcggatggatttaagcccgtcggataaggcacggacgctttcctctggtatggcggcgaaactgaagctcgcggccactctggcgaggaatgcaaagctgtatcttctggatgagccgctcaatggaattgatctggtcgcaagagatcatgtgatgcagaccatcatggagaccaggggagaaggaaatacgatcgtgatgtccacccatctggtcgatgagatcgatcaggtgattgacgatgcgatctttgtacgggaaggacagatcgagctgcagggaaatacaaggcagctttgcggggattatggcatgtcgattccggatctgtaccggaagatatacgggtaaaagtacagaaaaaatgtcaagctttaacagagccagctaggtcgtgaggaggattaggaatatcagcctgaatggctggcgatatatggtgaaaagcagaaaatagaaacgtaaataagctgcgcaggcggcgggtaccgcaaaaaacagatgggaatatgctgcggagaatcgaggaaaaatgggaaagatattgagatatgaatggaagaaacaattgttttcaaagctgataattggcggaatcctgattgttctgacggcggcttttgttgtcggaacgatgctggaaaaagaacgctggcagatgacggcgatggtgcttctcgtgtttgcagggcttttcggttccttatacgttgggattgagagccttctggtgctgaaccgggatcttcggacgaaggagagccatatgcttttcatggtgccgtattcagcatggagtatacttggcgcgaaggttctggcggcgtttctgcagatcgtgctgacatccgtgctgtttgctgtttcgttttttctctgctttaccgcttacgttggagcgagccaggggtttgcgcagttctttccgatgctgcagcgacttctgcgggagtggtttgacttccagcttgactggaaatggatcgtgctgattctctgtgaggtactgatcagctggatgaatatgattggggccgggtatgcgtcgattatcgcgtcccgtacggtactggtaaagagcaggcttgcaacacctctggcaatcattttgttcttatttttgaattgggggatgaaccagatcatccacttggtggcgaaagcacttcagctgtcaaatgaatcttacgcgtatgcactgacgaatcttggaatctcggcagtattcacggtcgtgctgcttttcgcgtcaggatggatggcagagaagaagctgagcgtataaaaacgacacatacacatatatgtatagaagagatacgaaagacctgctgggaaagtcatatcagcaggtctttcatatgtacttctttcggccggatcttttgggagtgcgccatttccgaaacaaactatcacagtcacgttgtggcatccggccatccagacgatggtttcatctccagatcatccgtcacaaacagtgcctcgataccgtccagtgattcgatgagcgccattcctttttcaggtccgagcacaaagcaggcggtgctgagtgcgtctccatcgacagagtgttctgagaagatcgtgacgctggcgagtccgttttcgacgggatggccatcgaaaggacttaaaatgtgatgatatcgttttccgttttcgataaagtagcgctcgtaagtacctgaggtgacgacggaagcatttcggcaggagattgtggtgagcggctgcgtggcatccggttttggcgtacggaccccaatgcggaaatcctggccatgcggtttgcttccgatggtaaggatgtttccgccaaggtcgatgataccgcttgtatatccggcggagacgagatcctcctttaacaggtcggcgatatagccctttgcgattccgccgagatcgatcgaggtgtcaggatccaggagcgtcacggttgtaccgtcgagctgtatgtttttgtagccaacgtgagaaagcgcatcgatcagatcgctttcatccggcactgttccggttttctggtccgcatcaaagttccacagcgtgagcacaggggcgatcgtgatgtcaaaggcgccgtctgagagacggcagtaagaaagcgctttttcaagcagatcggctgtttccgtggagacttcgaccggatttccatcactgtgattaattctccacacgtcgctgccctcctgcgtgcgggagaacagtttctcataggacgcaagacgggaaaaacactcctcaagaggggaggtattttcggtgtcataaagggtgatcgagacgacggtatcaaggaaaaatccggttttggatacggaggccgtctctttttcacagccggagagcgttccggctgcgaagaggagcagaaaaaccagcatggctgacgtgattttgcacctgcggtgattttttgaagaagttctgaaaaaaatcataagcgtcctttcttattttaacttttaaccggacagctgttcggttatgagcaagtagcaaagcggattgcgattgcgttcccttggataaactttgaggttcactgtaacatatttcgaacctcaccgcaagtatggaaaaatcaaacgagttcttaccggaaaagacagcatgcttgcctgaactgagagaggaatgatgaaattttcaagactttctttacaaaatccgcctttcttcgtataatgaacgtggcgcggaaagattatgcgcaatagatgtagaaacagaggtataggaggactggatatggcaattttagttacgggtggtgccggatatatcggcagccatacatgcgttgagctgttaaacagcggttacgatgtagtcgtaatggacaatctctataatgccagcgagaaagcactggagagggtagagcagatcacaggaaagaaagttaccttttataatgtagatatgttggataaagaggcaatgaatcagattttcgaaaaagaaaaaattgattcggttattcattttgcaggatacaaggcggttggcgagtctgtacagaagccgctggaatattatcacaataatattaccggtactttaaacctgtgcgatgtaatgcgcaatcacggtgtaaaaaatatcattttcagttcctctgcgacggtatatggcgatccggcatttattccgatcaccgaggagtgcccgaagggaaagattacaaacccctatggacagacaaagggtatgctggaacagattctgacagacctgaatgtttcggatccggagtggaatgttgtactgcttcgttacttcaatccgatcggtgcacataaatcc

SEQ ID NO: 2917 - DNA, 32759 bp, Unknown
  16S sequences of unknown bacteria
aaacttattgatgcaaagagaaacggcgtgaccgaagtcacgccgtactctccccaaaaatcgggacttttaattttttcctgttttacgggcaccgcccaagcgcgaagctttttcttttatctgctttttacatcatttcagcacgccaatagcatcacgaatcgttttttcataggcttcccggccgtatttgtccacctcggctttatttttctcttcgtgggtcaaacagccggcgccgccgatacagccgccaacacaggccatcccctcgataaaattctcgggcagaacatttttggaagctttcagcaatgccatccggcaggcctcgattccgtcgcaggctacggttttggcttcaaaatccagattctgttccttcagcgcctgcgccaccgcatcagacaatccgccagaccgggcaaaaatacgtccgtaataagaagcgttatccagcacattttcttccagttcggaaatttccatatcccggctgtcgaacagtgcctgcaattcttcaaaggtcaacacgctatcaatatacggcgaaacgctttctttttgaaattccatctttttggccgtacacggtccaataaacacaattttcgccgtaggatcaatgcccttgatatactggccaatggctcccatcggcgaaaggttgtgggatatatgctccaccatctgcgggaattttttgtggatataatctacaaaggccggacaacaggagctggtcaaaaaccctttttccgccagttccgccgcctcggagtaagcaaccatatctgcacccagcgcaacctccaccacgctgtggaagcccagctttttgatcgcggtaataacctgtcccagctttgcgtaagaaaactgaccggaaatggatggcgccaccacggcgtaaactttatatttctggttgttttcgctttctttcagcatttttaccacatcggtgataaaggatttatccacaatggcaccccaagggcacatataaacgcaggctccgcaggaaatgcacttgctgttgtcaatctgcgcggctttggactctgcgctggtggaaatcgcatccaccttacaggcgatttcgcaggggcggcgcttattgatgatggcgctgtacggacacgccttggcgcagcggccgcagttgacgcatttttccttatcaatatgagcccgctggtgctcatcaaaagtgatcgcatcacgagggcacacatcttcacagcggtgagccaagcagccgcggcaggactcggtcacctcatagccgcccatgggacattcatcacaggcaatgtcgataacctcaatcacgttggggttttccttaaagccgcccatggccatatggatgcgttcgttgacgatcgcccgttctttgtatacgcagcatcgcatggtcggctcgttgcccggcacgatggcataaggaatatcgatatacgcatctgccaaccggtcctcaaaggcatggcgggcaacttcccgcagaaccttatattttaagtactgcaccttggtatcaaatttcctcatacccatcccccttaaaaatagctgaccttaatgcgtttccccatctgtttcagggaatcagacaactcatccaccagccgcattttgatgctgaaattgattggcagatccggattttgatgtgctggatttaccgcccgtcccacatagaaattgatgtccgtagcctcttcaaacaacaggcgggcaatctgagaggcaccatcttgcttatagctccatttggagtattcctggttatcttccagatagctttgggcataggacaatacccggttgatggtaatgaccccttcggtgaccaaatctaccccctcgattgtagcggtgggagggatttccggatccagataccccagattcggctgcaccgttttatgcagaaaacgtgcggccacggttgaagtcgtgccgccgcatacaatgtgcttgccctctttggaaaagaacagtcccatcatcttttcgtcgtctgccgggtcggtaggcggcccaatcatcaaatttacctgccggcgctggcgtaccttcatcacgctgacggtggtatcgtcgcccggctgatagccgtaaagcttgttgcactcatccagcagaatcgttgccagcgttttagcagtaaactctttgtcgtagatcatctccataaactcgatgatattttcccgctgccagccgaagtttaacgacattcccaccccggcatggatggcgccgtcgctggtggtgatgaacgtatcgttttcctgcagttttattttcgatttataaatggtttttccgccgatctccatggcggttttttcatagtcatagtttttgccgtcccgcagcaggatcaccagcggattgtcatactggatcagctccgcatactcattgtgctccatgcggataatggtgaaagtggaataggccacctttcttacgtcgcacactggcagcgtatccgcaatggtctgcacacagttttccagcgtcatattgctggccatcatggtggaaatgatcttggaggtcagggtagaaagaatattggcctttaccccgctgcccagtccgtcagccaagaccatgaccaccgaatcggcagacggctccacaatctgcacccggtcgccgcacagctgctcgccgtacttgttgatgctgcgccaacctaggtctacgcaaagattattcatcgtttaagtactccttcagattggtcagtgcaatcttggtttctgcggtggtttcacctaaaagcgacgcaatctcctgcacgatccgcatctgcttcgcgacaacctggtcggtgatttccaccgtctgtttgcgtacgttttccttttgcgcccgctgatgttcttcttcggtgatatcccgcatcagcaccaaaagcacccggtagctcttatcataaataacggtcatttccacatatttttcgtattcagccaaaaacatccgcttatcgcgcacatcgcggccggtctggatcacctcgaaaaagatctgcggatccagcacccgcaccacctggtcgcccataatgtccgccggacgggacaggcgcagaatatcacaggcggcgctgttgatctgctgcacctccagcgactcgttcagcacaataatcccgttgggagaattgcggataatagtatcggagaaagtctcggctttctctttcaaaaacggcaggcacatggtcaagtccgccttgccccagtaaaccgccaccgctttttcccggcaggtatcatagccgcagctgccgcagttgagttcatccgccggggaggttttgcccatgcggcgcagaatttcctcaatggcgcggctgccgggcatctgccggttcaggcccagatacggaatctcttttgtcagggaattttcgggcgtttgcaccacaaaatctttttttcccgcataccggtccaccgccaaaaagtctctgaccggggagcgatgggtcttttccatgaccggaccgcctacacagctgccagcacaggcactcatttcaataaagcagttggacagcgttccatccataatctctttcagcgcatggatacagttttctgtgccgtcaatggtcaaacggctgtaaccgttgtcttctgtccagtccatggtgcgcaggataccgccggaagtcgggaacagacgggcacggctttcctcgtttttctcctgttccggctcgggtgttacctgctcgccgttcatccactcagtcaattcctcaaaggtcagcacacagtcaacgatgccggcataggtctccgcttccgcctttttggaaatacacgggccaataaataccgttttggccccggggtgctgttctttgatcaggcggcagtgggccagcatgggcgattcaaccttggcaagatacggcagtgcctcgggatagtatttctgaatcagcaaattgaccgaatgacagcaggaggaaatgatcacttcctgttctccctcttttaccaggcgctcatattcccgcttgaccagcgttgccccgatcgcagtctcctctactgcggcaaagcccagcttttgcaaagctttttccatcgcaccgattcccacgccgggataattggccacaaaggacggggccagacttacatacaccggcgcaccggacgcaatcagcgcccgggcagcttcggtgtcgtttcggatttctttggcgttctgcgggcagttgacaaagcactggccgcacaaaatacactcatcgtcgacaatattggcctggtgattggaaaatttaatagacttgaccggacaatgccggatacatttatagcagtttttacagttggatttttttaatttcaggtatctggtcatgcccgttttacccctttatcggcgtcagtacatatttttggaaaatctccgggaacgtctccggtgaaacgccggtaacgatctcgtcatccaccttgatggtcacgccatgggtgcatttgcccaggcagaaagcggcgctcaaatttacctgatcggtcaggccattgtcttccagtgctttcttcattagttcaatgatctgataagaaccctttagatggcaggaactgcctacacagacatagatgttcattttcagtctccttattctccgtagtacgctttgcggtagatctcttccagctcgctgaccagcggatatcggggatttgccgtggtgcactgatcctcgaacgcccgctcggacaggccgggaagcgctttgaggaaggtttcttcatccacgccgcactcgcgaatgctcatgggaacattcagttctttcatcaggctgcggatggctgctatcaggttggcaatctgctcttcctgggttttgccgcccaggcccagatagcgggaaatctgcgcataacgtttgtctgctacaaatttatcatatttcgggaaaattgtaaacttcgaaggtttttgagcattgtaagcaatgacgtacggcagcagcaccgcattggcccggccatggggaatatggaattcaccgcccagcttgtgcgccagcgaatggttaatgcccaaaaacgcgttggagaatgccatgccggcgatacaggaggcgttgtggactttctcccgggcctctgcatcgttggcgtcacgccaactgcggggcagataatcaaagatcagctcaatggccttaatggcaagaccgtcggtgtagtcggtggccataaccgaaacatatgcctcaatggcatgggtcagtacgtccatgcccgtatcagccgtgatggactggggcatggtggaaacaaactgcgggtcgatgatggcaacatccggggtcagctcatagtcggccagcggatatttgatgttgccattcttcttgtcggtgatgaccgagaaggaggtcacctcgctgccggtgccggaggtggtggggatggcgaccatctgggtctttttgcccaaattggggaaatggaatgcacgtttgcggatatccataaactttaagcgcaaaccatcaaagctggtttcgggattttcatagaacagccacatgcctttggccgcgtcgatggccgagccgccgcccagcgcaacgataacatccggctggaacgcattcatggcgcgcacaccgttttgaatggtctctaccgacgggtccggctctacctcggagaaaatctcacaatggcagtaattttcgcgctttctcaaataatacagaaccttatccacatatcccagtttaaccatcatggggtcggaaacgataaacgcccgggaaatattgggcattacctgcagatactggaccgaatctttttcaaaatagatcttcggcgggattttaaaccactgcatattgaccctcctttgtgcaatgcgctttttgttgatgagattgaccgaggacacattggaggtggtggagttgcgtccgaaagatccacagcccaacgtcagagacggcgtattggtgttgtaaatatcgccgatggcgccctgagaggacggagaattggcaattacgcggcctaccttcatctcctcgccatattttacgcacaggtcgtggttgtcggaatggatgactgccgaatggcccaggccgcccagttccagcatggctttggcgtactggaacccctgtttgtcatcttcgcagacgaagtaagccaacacgggagaaagcttctccaagctcagcggatactcgcgagacggctccggaagcggcgctaacaaaatcttagtgccggcgggcacgttcacaccggcatttttggcaatctcttccgccggatggcccacaatcgccggattgactgccattttatccagattgatcacatatttggtcaccagctgcgtttcctcgggattgaggaaatagcaattgttttctttcatgatcttttcaaactgatctttaatctctttgtctacgataaccgcctgttccgaagcgcagatcatgccgttgtcaaaggttttggagataatcagatcggtgcaggcccgctccaaatccacattcttgttgatgtagcagggcacgttgccggggcctacgcccagcgcaggtttgccggcgctgtacgccgctttgaccatgccggaaccgccggtagccaaaatcagcgaaacgccccgatggttcatcaaagcggaggtcgcatccagcgacggagtctcgatccactgaatgcagtgctccggcgcaccggctttgactgccgcatcccgcaggatccgcgccgcctgtgccgagcatttctgtgccgacgggtggaatccgaagatgatggggttacgggtcttggcgcagatgagggatttaaacatggtagtggaggtggggttggtcaccggagtaacgccggctactacacccaccggctcggccacttccacatatccttccatctcgttttcgtcgatcacgccgacggttttctgctttttaatgctgtgccagatatattcggtagagaaaatgtttttgataaccttatcttccattacgccgcggccagtttcttcgtaggccattttcgccaacagcatatgcttgtccagaccggccagcgtcatagcgtgaacgattttgtccacctgctcctgatccagttccatgtattcctttaaagcctgctgcgcattctgaaccagacgatcgaccatttcgaacgtatctatcgaaacggctttctcctgggtgttcgtttttttctcttctttcttctgcatacaaagtcctccttcacgttctgttttccgaaaatagcttccctttttccggatcttttctccgccaaacgggggtttccaacgacaggaccgctcgtttgacgaaagccccttggaaagaggttttcccttttgcaaaacgggtcccctttctttgttattattttaacaaagaaagattcttctgtgtaatctatatttgacatggcaagcatgtatttttttatatatcacttatgtcattttcgctatgggcctttctatcatataaaaccgtaaagcgataaaaaagcacgccttaaggcgtgcttttttatcgctttacggaggcttcttcccgatacgccggcaggaacggcctgccgggtcggctctctctctctcgggccaaggggccggcccatatttctatcataataaattttttctcaaatgcaaatataaaaaaggaataaccttattccttttccctcctttggacgatttcatcccgctcctgctctacctgccggacaaacgcttcatccagctcactcaagcgatatccttccggataaatcaaaatatcgcacatacataggtcaacgacatcgcaccttcgctgcactaagtcatgccgatccagcacttcctgcggcatgggcgacacccacataaaagtatccggtacctggcacagcaaatcgaactggctgccccgttcgtaaatccggattttctttttggcatgctgatcctcctgcggccgcgcccggcccatcaccgaaaggctgggaaccgttacatcgccatggaggatctccacataattttgcagatcgtccggcgtgaacgactcggcttttgccaacggatgatttttggaaaacagcacctgataggtaaactcccacagagaacagcaatgaatggatctatcttccagtaatttttgaaaatagctttcatggatcctttgatagcggataatccccaatttactttcccgctcagctacactgtgaatggcgtcggtagcgttggtttctttgaaattgatgtccagctgctgggactgatccaattcgccgagaaaccgggcaaacgcatgcgtgatatagctggcgcgaggcactgccgcagaaaaatgcagccgcccctctccgccggaacggtaaagatcttccatccgctctacctgatccagaatgctctttgcatagcgcaaaaattcctttccctgcacagtgggcagcacacctttggaggtgcgtttgaagatggcaacgcctaacgttccctccagctctttgatcgctttgctcaaattaggctgccccatgtaaagattttcagcagcctgggtaatggaaccggtcttttctacctctactgcgtattttaaatgctgcaggttcatgtgctgcccccttttccaaaatccatacagttttattataccctactgcctgcagcggaacaatctttttctcgctttttgctgtaaaatttgaaaattgtccactttttcccctatcaaaaaaccggactcttcgccatcggcgaaaggcccggttttcacttagaaagcttcttttccaaaagcattacagcgtctgtgcccgctgcgccaccgcacttttgaaatcgaccacctcatgattatattccgttttcatcagcgcagacgtaatcaaaaaatctgctgttgctttgttgttggcaatgggaatatcataaacctgcgcgattcttaaaagcgcttttacgtccgggtcatggggctgggctgtcagcggatccgaaaaaaagatgacgaaatcaattttcccctccacaattttggcgccgatctgcaggtcgccgcctaacgggccgctgttatatccccgcaccggcaggccggtacgatcggtaatcatccgggcagtagtcccggtaccgtgaagaaaatgctcctttaaaatatccttgtgctcttcacaccactgaataatgaccggcttctggctgtcatgagcgatcagggcaatatttttttgctttccgatggtccaggtaacgcttttctgcggcataccgcttccccctttttgacaattccaaccgcatcatagcataatttttgccggttcgcaaccaatagaggagcggcaccggaaaatttgtctttttaccgcatgaacagcggtccggaaaacaaaacactgttgttttaacgcataaacaagatgaacagtaagccactgcccagccaatctgtccagcggtctattgaaaaaggtgccggcattcttcatggcgttgccggtttataccagcacaaaacagcattgcggcagggccgaaagcctgctataataaagcggaaatcaaaggcccctgcccagcagaacgccgcccggcaaaaagaccggcagggggacaagctatttttgcaaaggagcgattccatgagctggcagccatctactattgccgccatttccacccccttaggaaccggggggatcggcgtcatccgtatttcggggccgaacgcaatccaaacagccgaggcggtgttcactcccgtcaatggacggagtttgtctgcttcccacggctatactgcccattatggccgcctgcgcgacaaagacggtgattttgacgaagcggtggccactgtatttcgcgcgccccacagctacaccggcgaggatgtggtggaactatcctgccacggcggactatatctggtacagcgggcgctgcgggcagcgctggatcgcggcgcggtactggccgagccgggcgaatttaccaaacgagcctatctcaatggtaaattctctctggctcaggccgaatcggtcatggatttgatcggggcctccggtcgccaggcagcccgggcggctctggcgggacgggacggcgtgctttcgcaaaaaatagatgatattgccgccggtctggtggatttagcggctcatttggccgcctggaatgactatccggacgaagatatggaatcggtagaacccggcccgctggcagaatcgctgcgccgcagcctcgaagaatgccagacgcttttggacagctacgacgccggccgcattctacgtgaaggcgtggacaccgctatcatcgggcgacccaatgtaggaaaatccaccttgatgaacctactggccggcgcgcaaaagagcattgttaccgctatccccggcaccacacgggatgtggtggaggaaacagtactggccggtgagatcatcctcaggctggcggatactgctggtatccgggacaccgacgacccggtagagcaggccggcgttcagctggccagaaaacgtctggaatcggcgcagctggtgctggtggtactggaccgttccgagcctttggcggagggtgacctatcactgctgactgggctggctgggcggcctgccattgcggtgctcaataaatccgacctgccgcctcggctggacgacaaggccttatcaggccttgtcagccaaaaagtggaaatttccgcccgtacaggcgaaggagccgaggcgctgacgcaggctattaccgaattgctgcatctgtccgatgtggacccggcggcaccccttttggccaatgaacgccagcgcggctgcctgaaaaaagcagcggcagctctgagggaagcggtacaggcagtacaagcgggcattacgctggacgcggtgaccgtctgcttggacgaagccattggcccacttttggaactcaccgggcaaaaagcctccgacgcggtcgtggacgcggtatttgcccagttctgcgtgggaaaataaagaaagctgtaatctctgacaggagggatttgatttggaaacctatgaggcccaaagttatgatttggctgtgatcggcgctggacacgcaggagtggaggcggcattggccgctgcccggctgggcgtatccactgtgttgttcaccatctcgctggatggcttggctaacatgccctgcaatccgtccattggcggcactgccaagggccatttggtacgggaaatcgacgcgctgggcggccagatgggcaaggcggcggacgctacctttattcagagccgtatgctcaaccgcggcaagggaccggcagtccactccctgcgggtgcaggcagaccggcagcgctatcatatttatatgaagcaggtgattgaacggcaggagaaccttgatctgaaacaagccgagattgtcgagatccgtgcaaaagatggccgtgtagaatcggtggttacccatttaggtgcggttcatcgaatcaaaacggcgattttatgcactggaacctttctgcgcggccggatttttgtaggagatgtttcctacgaaagcggcccggacggactgcatgcggcgacccgcttgagcgaatcattgcaggcgctgggtattccgctgcggcgctttaaaactggcacccctgcgcgggtccatcgtgccagcattgatttttctcagctggagccgcaggagggcgacgagcccatcactccgttctcctttgaaacggaacaggaactgcataatcaagctatctgccacattgcctataccaacgaggcgacccatcaggtcatccggcaaaacattcaccgctccccgctgtacggcggcaaaatcgaggggattggcccccggtattgccccagtatcgaggataaagtggttcgctttgcggataagcctcgccatcagattttcgtggagccgatggggctggatacggaggaaatttatttgcagggcatgagttcttccctgcctgaggacgtacagctggcattttaccgtacgatcaagggatttgaacaggtcaaagtcatgcgcaacgcttacgccattgaatacgattcggtggacccgctggcgctaaagccatcgctggaattcaaaacagtggcggggctgtacggtgccggacagtttaacggcacttccggctatgaggaagcggctgctcaagggttggcggcaggaatcaacgccgcccgcgcctgccaggggcaggaaccaattatttttgaccgctccaattcgtacatcggcactctgatcgacgatctggtgaccaaaggctgctccgacccctaccgtatgatgacctcccgctccgaatatcgcctgctgcttcggcaggataacgccgatgcccgactgacaccactgggatatgaaatcggcttaatttccaaagagcgatatcaaaaattcctgcacaaacagcagctaatcaaagaagaagtcgcacggctggaatccaccaccgtcgccccttcccccgctctcaacgacctgcttgtttcacgtgaaacatctcctatttccaccggctttaagctgggagaactgattcggcggccgcaggtttcttatcaagatctggccccctttgacccgcagcggccgacactgcccgccgccgtagcggaggaggcggagattttgctgaaatacgaaggatatatcaaaaagcagcagctggaagtggagcagatgcgccgactggaggcccgactgttgccggaagataccgattatgcttctattaccggcctgcggttggaagcagtggaaaaactgggaaaaatccgtccccgcagcgtaggacaggcatcgcggatatccggcgtttctccagcggatatttcggtgctcttcatctggctggaacaccggcaaaaaggaggaaccgcagatgattgatctgacccgagccaaagacatattcgcccaacataaaatagatctttccgacgagcagctgggacagctggaccactacgccgaattgctggtggaatggaaccagaaaatgaatctcaccaccatcaccgatccgcaaggcattttgatcaaacattttttagacagcattctccccttcacccttatcccgcttgcacagaacgcctcgcttatcgatgtgggcaccggcgccgggttcccggcgattccgcttttgatttggcggccggatttacagattactctgctggactctctgaaaaagcggctgtcctttttggaggttgtgctgtccgaatgcgctcttacggcaaaaaccatccacagccgcgcagaggacggcggcagacagccggcgctgcgggagcagtttgatctggccacggcgcgggcggtagcgaacctgcgggaactttctgaatactgtctgccttatgtgcgccccggcggtatgttttattctctcaagggcggcgacgcggtcgcggagaccgccggcgctgaaaaggccatccatctgctgggcggccagctgagtaatcgtatctcttactctctgcccgatggcagcagccgtactctgatctgcatcgaaaaaatatcgcaaacttcgacaaaatatccccgaaacgctgcaaaaatggcaaaatccccgttggcataatgtcgaatcctgccggtattctgggaataccggctttttttgcgatttttttcagtggaatcctgtgcataattgtgttatggtggtcatagagcacaggacaagccaaaacaaggagggaacggtatggcttttgcaaatctcgggaaagaccgagtacggtcactccccttaagtcagattatggtcaatccggcacagcctcgcacccgcttcgaggatgaggcgctgcagcagttggcgcaaagcattgccgccaacggacttttgcagccagtaaccgtacgggaagcagggccgggcaaatatcagttggtagccggtgagcggcgctgccgggcttgtatgctgctgggatatactcacgttcccgccattgtcaaaaactgcaccatgcaggaatcagcggtactggcgctgattgaaaacttacagcggcaggatctggacattttcgatcaagcagaggggatcagccgcctcattggctattggggtgtgactcaagaagaagcggctgctaaactggggctggcccaatccaccctggccaataaattgcgccttctgcggctatcagctcccgtccaggagctgatacgacaaaatgggcttacggaacggcatggccgcgctctgctgaagctgccggacgaagctgcgcagctggcggcagccaagacaatctgtaagaaaagcatgacagtttcccaggcggaacagtacatcaatactctactggcacggcaaaaaatgaaaaaacctacccggctgtttatctgcaaagatatccgactatttatgaacaccattgacaaagcggttaaaaccatgaccgaggcgggtctcgccgtccagtccgcccgggaggatcagggcgaattcattgaactgaccatccgcattccaaaagagcccggacagcggccaaccgccaagcctgcctgatatggtcaatcgcggcgactcgccgcttttgatagattcatcggggctttccctgccccgccatcacaaagctttcccaaaccgagaaaaagccccgctttcccctgttcacggccggtcagccgaaatggggttgtggggtctttttctttttgatatactgacaatatcttatacagaaaagaaggcagattgcatgaatgtttccttcatcaccgatcccgaattaaaagagtccatcacgctttctgttatgcaccagcttcctctgtggttttctccaccggaggatattgactataaggccaaaacacaccggagctacccttttttgctgtactggatcagggtcaaccagtggcttttgccgctgtaaagattcacaatccttatacggctgatatttataacatcggcgtattggagccttatcatcaccaaggcctcgggcatcagctgatgcaggccattctggattggtgcgccaaagaaaactttgtttttttaacagtaaaaaccctggatgaatctgccgactatccgccttatgacggcacccgcgctttttaccgtaaagaagggtttctccccttggaggtatttcccactttttgggacgagggcaatccctgtttgtttctggcccgcactgtaaaataactactgaaaagggaatgtttcacgtgaaacattccctttttggttgaaaggataactcttcagtgctataatatttctcgaatggaacgccggtttttccggcaagcatacaggagggctcttatgggcaaaattatttctatcgccaatcaaaagggcggcgtcggaaaaacgactaccactgtaaatctcgccgcctggatcggtgcaaaggggaaaaaagtccttctggcggacatcgacccacagggcaatgctaccagcggattcggcatcaacaagcgcagtctgatgcgttcttcctacgatctgctgatcggcactgccgaagcagaggatattattctttccacttcttttcagaacgtggatgtattgccgtccaatatcgctttggccggtgcggaaattgagatcgtggagatggaggatcgggccatgcgattaaaaaaagcgctggctccggtgaaaaaccgctatgattttatcttcattgactgtcccccctctctgggtttgattaccctcaacgccctagccgccagtgatacgctgatggttcccatccagtgcgagtactatgctctggaaggattaagccagctggtagccactattcgacaagtaaaaaggctttacaaccccaccctggatttggaaggggtgttgctgaccatgtatgacggacggttgaatctgaccatgcaggtagtggcggaagtgagaaaattttttccgcagaaagtctacaaaaccaccattccccgaaatgtccgtttgtccgaagcgccaagttacggacagcctgctctttattttgaccgaacctccaaaggctctgtcgcctatggccagctcgcggaagaatttttatccaaaaaccgcggttaacccgcagaaaggcggaaaatacttatggcagtcagaaaaggcggcctgggcaaaggcctggacgcgctgtttatcgacaataccaccgataatggaccagtcacgctgcgcatttctgaaatcgaacctaaccgcagccagcccagaaaagaatttgacgaagcagctttggctgatctggccgattctattcgggagcacggcgtaatccagccgcttttggtacgacctcttccctccggcggatatcagctggtggccggcgaacggcgctggcgcgcctcccgcatggccggattgagcgaagtgccggtggtcatccgggaattaagcgaccacgaaaccatggaactggcgctgatcgaaaatctgcagcggcaggacctgaatccgatggaggaggccctgggttaccggtcgctgatggacgaataccagatgacccaggaggaagttgccaaggtcatcggaaaatcccgtccagccattgccaacagcctgcggctgttggcattgccgcaaccggtagccgaatggattcaagaaggcaaattgtctgccggccacggtcgggcactgttggcactggaggatgaggccgctattctcgaagcggcacagaccgctcttaaaaagcacttgaatgtgcgggaaacagaaaaaatggcccagtccgctcaaaaccagccccaaaaacgtgtccagccggaaaaggaccattattacacggaattggaattggcactgacccaagtgttgggccgccaggtcactattaccgccaaaggcaaaaacaaaaaacttgcagtggaattttttgacaaagatgacctgtccgctctggccgcccgcctgtgcggcgatcaggagctgctttagcaggaggaaatcctatggcatttttcgaagacacctttaccctttctgcctccgaagcagatctgcaccggcggatgaaactctccgccgcactgcgccatatgcaagatgcagccagccgccatctggacgcattgggctacccttatgaaaaactgatggaaaaccgccaggtttttttgctgtccaaagtggaggtggtgttttccggcagtcctgcgctggaacaaaaggtgacggcctatacccgtccccatccttccaaaggcgcctttttcctacgggagacacagctggcagtagaaggccatcctatggttttgggcaaggctgcctggattttggccgactatgacactcatcaggtactgcgtccctctgcttttggttgggactatccgttcgatcaagtcgattttgacggagaaattgcccgccgccacatccgcgcaccggaagatgctttcccgctgggacagcggccaatccgttactcggatttggacggcaaccgccatgtgaataatgccgtgtatggcgatattctctgtgattttctgccgggggattggcagcgcagccattttctccgcagcgccgttttgctgtatgagcatgaagcccggttgggtgatacgctgcaaatcactgggtgccaaatcggcccggacagttggtacctggctggataccggtccgggcagcgatgctttgcggcacaggcggcatttgaccgcgcataaactgagggatccggcacatcctattgaggatgtgctcttttccaaaactctcactgcgatcggcacggccacctgttggcatactgatgtttttgattttcccctttgccacagaaaaaaatcgcaaaaactgttgacaaaccccgtcatattggatataatagtcttcgcctgatattgggcgcaaaaaatgtggcggtatagctcagttggctagagcatgcggttcatacccgcagtgtcggcggttcgaatccacctaccgctaccatgtgtattctatcctgtttgggattgaagataaatcggcccgttggtcaagcggttaagacacggccctttcacggctgtaacacgagttcgattctcgtacgggtcaccaaaagacgaaatcattccgatttcgtcttttttgttatccgcctgaaaatccgcgtcctttcgggacatactgttaaggagtttgtcaaaggacgggattgtaatggaacctttcattcagatgaccaatgtttccaaaatctatggtgtaggcgatgcccaggtcggcgctttaaaacggttgagtctttccattcaccgcggagaatttgctgcgatcatcggccattccgggtccgggaaatccacgctgatgaatttgctgggctgcctggactttcccacgcagggagaatatctgctggacggaaagcctgtggccggactcagcgaccggcagctttcccatatccgcaatgaacagatcggctttgtctttcaaagcttttacctgattccaagcctgagtgcactggaaaatgtggaactcccgcttctgtatcggggtgtgccccgctcccgccgccgggcccttgcggcgcaggcactggaacaggtaggtctggcccagcggattttacaccggccaggccagctttccggcggccagcagcagcgggttgcaatcgcccgggcaattgccggctcgccgcccattctgctggcagatgagcccaccggcaacctggatacggcgtccgggcaacaaattatggatatcctcaccagcctgtggcggcagggccgcacactgatcttaatcacccacgatccggatgtagcccgcgccgcaccgcgtattatccgcattcaggacggctgtattacacaggattcccagctgttatcatcttaaggaggatctcttatgaaaaaaactttctgttttctcttcaccgcattgctttttctcttgtcgctgactggctgcgagcagaccgtgtccgagcccttaccgcaggaattaccccctcaaaagggggaggatatcgccgtgatggaaacctctctggggaccatcaaactgcggtttttccctgaacaggcgcccatggcggtggaaaattttctcacactcgccaaagaaggatattatgacggcgtttcttttcaccgggtcatgtccgattttatgattcagggcggggatcccaccggcaccggtaccggcggcaagagcatttataccgatgtagccggcaaccgcggctattttcaggatgagttttccgaccggcttttccatttccgcggcgcgttgtccatggccaattccggctctgataccaacggcagccagttttttatcgtccaaacgtctcagctgcgggaggggcagaaagaatccatgaaaaacaatggcgttgacaagcaggccatcgccaagtatgaagcagaaggcggtaccccttggctggatggccagcatacggttttcggccaggtaatagagggaatggaggtggtagatgctattgcagcagttgccaccgacgagaacgatcggcctttggaagaggtctccatcctgtcggtgacggtagaaacttataccgcccagtaaccggggtgatacaacgcattattttcttgcagcgaagtgtcatccccgcagcaagcggcggctggaaaaagctttctcacggcagcagtaacaggattgcccgtcccaaggaaaatttttccacacccatagatttttctccaaaagagagcgctttgatccgctctctttttctatactgggagctttgtctattttcattaataaatctttcaaccggcgcgcttacatgcagcgctggtttttgctttttacgcctgccagattgccaaaaaaattttttctttttctccgtgcttccagaaccaatccctcaaaaggttccaaacccatagcaagatcctgcaataaaagaaaaaagtctattacaaagcccacaaaaaaatagaaattctttgtcatttctccataattgacagcccttttcctctataataagatgaagttagccctgatcttccaaaaattaggcataacgaaaacaggagggaaaacgatgaaaattgcaactgccggttttacctgtgttgacaactacgccaacctggacaaccgccattatcctgcgggcaacggctttgacgcactggtcaatctggccaaaatgggtgtggagtgtgccgtagtcagcgcggtcggcccagacaaatacggagaggaaatgtttgaggtactcaaaaaatatggggtagattcttcccatctgcatgtgctgcccggggagacctcctttatgattatggagatgaccgaaaacaacgaccgggttcacgtcaaaaatatccccggcgtcatggacgattttgagcttaccagagatgacgttgaatttttaaaaggctacgactatgtccatactgaattttccaaggtgctgtatccgtatctggccgagttgcaggaggccggatgcaaaatcatctttgacctgtcgacttcttatgaaagacacactgaaaccgaaaccctgcttcgaaatatcgactacgctttcatgtcttacccgcagcgggatgagcatgtcaaagagctgatgaaaaaatatcagagcctcggccccactctggtcgttgccaccttcggcgaagacggctctctggtttgggacggaaaagaattttacagcgcgggcattaccccagcggaaaaggtcgtcaacactgttggggcgggcgattccttcctggcaggctttatgcatggaattatgacaggaaaatccatccccgaatgccaaaaagaaggcgcagatctgtccgccaagatcgtcgctatgtttgatccgtactaatcggtaagcggaactttccgcaaaactcgccatgatttgtattggaaaggagcgattatacaaatggtaattgatgtacacgttcatcctaacggatatccacaggtcgcacaggatcccgcatcccgcgctttccgtgaccgggtgtttcagcggcgtccgcaggatgccctgtccgcccccattgccatgacaggcaaaccttccggcggcaatggcggcggaaacaaaaactttgacgttttgttcacccgcatggatcacgaggggatcgaccgctttgtgcttcttcccatggatcttaccacccgatatggcggctgggtggtttccaatgacgaaatagaacagattgtcgccgcagcgccaaaccggttcatcggctttgccagcgtggacccctatcgccccgacgcgttggaggtgctggatcacgcgtttaaaaatcagaagctggccgggttgaagcttcatccttccaagcaggctttttatccggacgatcccatgatggatcccatctatcaaaaatgcctggagtataataagcccatcatgttccatgccggcatgtcatgggaaccggattgtctgatcaaatattctcgtccggttaactttgaaggggttgcggtgaagtatccggagctgcgcatctgcctggcccacttcggctggccctgggcggtggaaacggccatgctgtgcttaaaataccccaacgtttacaccgacacggctattgtccccatggattctccggaagtattcttccgccatatctttacccgcgagtgggggcccacctggttcgagcataactttgcagataaggtgatgtatggctccgacaatccacgcaaccacacccatggcattgaaaagctggagatgcggccggacacccgcgccaaactcatgggcggcaacgcactcaaatggctgggaatggaggttaaatagtcatggtcaaaaccactaccattgaactgatcagcaaaaaagaatttgagctgatccgcattaccaaagacatcctcaaagcggttgaggaatccggcgttcaaaacggcgtcgtttacgctatcaccgcccacactaccaccggtattctggtcaacgagagtctggcctgcctggaagtggatatcgaaagaaaactcgaggagctggtccccaccttcgactcgtacaatcacaaccactttttgccctcctacggcgccatcggctgcaacgcgccgggccatctgaaatccatgatctgcggcaaccacgccgtgtttcccattgtggacggacacgtggtctgcggcaatgcgcaggatgtttacttcggtgaattcgacggcattcagcgccgcaaggtttacatcactgttatgggcgaataaatcatatatgaattggaacaattcatctatattatcctatttataatcaattttgactaaaatacttcattttagccgttttaccctctaacaaaaaaggctttgggaacattcccaaagccttttgttttcgttttctcgccgcgcctctttcctcccctaccgggaggcccacccgatttttcagcagcgcagcttatttttttccaaagagcttttgatcaagccccttcttttccagtatccaaaccagcagaactcccagcaccaggcaggggataatctgccctgccgccaccgagaccgcacaggtccaaaacacatcccactgaaaactgccggaaagccaggtccattccagaccgataatcagtccgttgattaaaatcggcggcagcgcggcgggaatcgccaaacgcttgatgcgcacatttcgtaaaagatagctcagcaccgcggcaattgcggttgccagtgtgccgaacaggatatccaccggcatggtaaggcccagcacagtgcccacaatattggtcaaaaggcagcctacggtaacgccgtagatccccagcggggacaataccggtaaaagggtcagacattccgccacccgaatctgcatcacgccgaacgagaacaaggacaaagccaggctcacagcggtgtagacggcggcgatcatcgccgatacggcgattgctctcccgtttaaatgtttcatattttctgtttcctctcgtagtttttatttatagtcaggttcttgcgactgactgccccgggtggattacggcacgctttttaaaagtggccggacacggccttttcattgtaatcatttccgacttgaaatgcaagaggaaaacaaagagcaaaaaacgccaaacaaaaaaggtccgctgccgtcagactacgggcctttcggatgagtataatccgaatctatttgctgcgcgttggtgtttacgctttctgccctgcttcctgcgccaggatttcccacagcgcttctaggttctgagggtcggtagcccagctggtgacaaaacgcaccgcagtgtggtcttcatccaatgtttcccaaaaactgaacgccactttcttggccagccgttccatctgccggttttccaaaattacaaactgctgattggtcggagacttgagataaaaggaaaagcctgcctcctccagcacctgcaccagccgcccggctgtttgaatggcattctcgctgatgcgccaatacagccggtcggtaaacagcgtgtcaaattggattcccagcagccagccttttgccagcaacgcgccatgctgcttgacctgcgtcagaaaatgcctgggcgcatcgccctgcggaaagaccaccgcctccccgcacaacgcgccgactttggtgccgccgatgtaaaacgcatcgcagcaagcggcaatgtccggcagtgttacatccgcttgggggctggccaggccgtaacccaaacgggccccatccaagtacagcggaatctcataggcccggcagatttttgagatggcctttaattcttctttggtatataaagttccatattccgtggggtgagacagataaaccatccccggaaagaccatgtgctcatggttcccatccttccagaaaacgcgcagatattcctccagttgtgtggcgttgattttccccgcgtgatgaggcaaggtcagtactttatgcccggtgcgctcaatggcgcctgcttcgtgcacgctaatatgaccggtgtctgccgctacacccccctcataagcgtccagcagtgcgtcaatgaccactgcgttggtctgggtcccgccagtcaggaaaaaacatctgccgccggactctcacaagccgcgcggatttttccttcgcactctcgcagtaatggtctgccccgtatcctctcgctatcgtctccggattgatctgcagcagccggttgaggatcgcttcgtgggcaccctgcgaatagtcatttacgaatgaaagcattggcattcccccctttttttcattttatcatcttttttcctcagcacaatccgccccagattctcccctttaccctacgcagaattatgtgtataataaaaggtactgtaaaagaggaaaggcggtatcggaaaatggaatggaccgaggcttccatctatacctccaccgaaggggtggagcttttgtgcggaaaactgctggaactgggcattaacggatttgcagtagaggacgctcaggattttgaggcatttctggaggaaacaaccccgcattgggattatgtggacgacagcctgatggcgttaaaggacgccgagacccgggtgatcgtctatctgccgaaaaacgtccagggcgctcaaacgctggcggcagtgtcttctgtggtgcgcgcgctgaaagccgacgatgccgagggtcgtatgggccggctggagatcagctgcggcagccttttggaagaagactgggaaaacaactggaaacaatattataaaccgattcgggtgggtaagcatttggtcgtcgtcccctcctgggaggagtatgaaaagcaggcggacgatatcatcctgcggctggacccgggcatggctttcggaaccggcacccatgccaccacccgcctttgcatggaacttctggagcaatcggtcacgtccggctgcactgtgctcgacgttggctgcggcagcggcatcctcgccgtctgcggcgtgctgctgggcgcgtcccacgccgacggggtagacatcgacgagctggccgccaaaatcgccggggaaaacgccgtcctcaatggggtagaagaccgcacccactttgtccagggcgatctgaccgataaaatcagcggacagtatgacgtcatctgcgccaatattgtggcggacgtcatcatccggctgtgcccgtccatccggcagtttttaaagccaaacggatacttcctagcttccggcattatcgatgagcggtcggtagaagtgcaaaaggccattctaaactgcggtatgcaaatcgtcgaccgccgggaagaggccggatgggtggcgctgcgctgccgttttgcggaggaatagtctatgcccagattttatatcgacccgcctgtcggagattttatcactctcaccggagaagatgccaggcatatctgccgctcgctgcgcatggccgtcggcgaagcgctcaccctatgcgacggagctggcatcgactacaacggcgttctgcggcaaactgacggacagattgccacggtggaaattctttcccgccaaccctcccaaacagaaccgaccgtttctattcggctgttccaggctctgcccaaaggagacaaaatggaatggattatccaaaaagcggtggaactggggataagtgaagtcgtgccggtgctcaccgagcggtgcatatctcgaccagatgaaaaatcaatggaaaaaaagctgctccgctggcaaaaaatcgctgtggaagccgccaaacagtgcggccgcagccgtattcctaccgtttgccccctgatgtcgttttcgcaggcggtgcaggcgctgggttccatggaaaagggattgtttctttacgaaaaaggcggcctgcctttaaaaaaggccctatgtgcgccggcagcacagatcggcatttttgttggtgccgaaggagggttctcttcggaagaagcccatctggcccaagaggttggcgctacctgtaccagcttgggcaatcggatccttcggtgcgaaacggcaccgctggctgccctttcggctattttgtacgaaaccgataacttttaactgcaccgtgagcccggcaagggggaaggaggaacttttcggtggcacaaaaaagaaaactgccttttctcctgcggatcctgttgccaccggtgctggccctggctgtgctttggggcggcagcttttgcgcaaatgctctgctggatagtcagggaggacccaaagccaaagaactccttttgcaaaccggtgaagaaattcgttctgccaaccagcttttgtttgaaaaaaaaacttaccaaattatctgcgattattccatcgcttttttggacagtgccattgcctttgactttttgcccaattatgatattggcggtttgtggggtctgattcagcatctgccccgcaatgtccaaattgaaaaaatatggttttcctataatgccgttagtttttccgtctctaccgattccccacagcagctgatggttcttttggaatatttacaaagcagtgaacaatattctactgtttttttctatccggattcccagtcttcttccccttatgccggggagttctgctgttatttttaaaaaagcatcaaaaaaaacgctgtttccctctcgagaatagcggtttaaaatagaaaatggcacgacttttgtcgtgccattttctttagatgtgctgtaattttaacaagtactcgattcattattataaagctcaatagattttaaatatcttccttctccgacatggaagtctggcatctgaacaaaccctctcgataccagttcctcattcagcataccaaagatcatatggtatacttcattggccacctcttctttcgggacaccatgccgccgacaatacagctggaacataatgggtgagtcactaagtaatttctttatatcaatgccaatacaatcaatgacaatattagatagtcgttgaataatggatttggcattctggcgaaaaacaggaaccgtatattgattgccagatatgtatccaaagtattcaaaaagctgcatacagtcccggtcacaaaatccagtctcatcgtagacccggagttcattcaaaacataggacttgaaattatgattacaggaagccttattccatatctggtttatttcctttggcgcaggaacagctactcctaattgtttttgacagttgaaacgatagaaatccaccctgctgccgtctgcatccccaaaagattgcaatgcccgtgtaccgtcacaaaaacgattgtaagagcataagagatggtttgaaaaaacacttaattccggacatttttcatatacggtaatgatataatcaacacctgatgtatgcaaacgagatgtggtaagcaattgattttcccttaaataatcaaaaaaatcaccgtcaaatacagcaccgcataacaaatgatacaggttcattttttcatcaaaaccattcttaatagaaccgacgcagcaatatatttctttttgcttacaaacaattttatcagccaaacatgtgatttctgcctctaagtaatctcgaatactctttatatcttcccgaacaataacggtagaatccaacaaaagcatatcattcaccgtccggaacaaaccaattttaattaagttatttatgcgttcagatgtatattgactgcacatatcctgatacctacaagtaaaagggacagcatttacaacatcggacaaaatccctgtaatggaatgattcagatatgtgcgaggattattttcagtaaggatatctgacgcatcaaaattttcaaacaggaaaaattcaaaatttttctgttccacattctcaccccaatatcaatcgccgaaaacagctgctgtgttcttcatgtgtctttcccatcgtggcaatatgaagtaaccccattctttcaagcccatgctttgctaagcatcccttacaaggagatacatacaattcttttcactaggttatagtgggtactacatttttacagagccccattatttccattttacgaacactcttcgtactgaaaatagcgatttttttacattgcgtaatacttttgcaaacaatttcggatttccacgctttccacaaaattttcaacaattcacaaacaaaagagaaaaattctccacataaaatacaaaaaagctgtaaaacgttgttcttccgcataaagctagccttttttctgtggaaatctatgtggagaaagtggaaattcgggcaaaaaaaatcgcaggcaacgggcctgcgggcaaataaaaaaagaagaaatgatgataaaggaggggggattgaccggaaacagtacaatacagtttcctgtcttttattatatcataagaggttataaaatggtgaacaaattatgaacaagccctttattccggaataaaaatgaagattatttcccaaaatattctttttgtaacaaaaaatcaatccattttgcaaaaaacactcataattattcttttatttttttcgccgctgggcaaagaaagactccagcagttcggcgcattcccggaccagcacaccgccttcataatcagggcggttgccataaggcaggtcaaacaggcgtagcatgccgcataccgctccttccttggggtctgccgcgccgtaaaatactcggctgatccggctgttgagaatagctccggcacacattgcgcagggctccagcgtcacatatagatcgcatccatccagccgccaatcaccgacaaaacggcaggcttcttccagcgccagcacttccgcatgggccaaagcactgtgtccggtttggcgcagattgtgcccacgacccaatatgtggccccgccggaccactaccgcacccacgggaatttcccccagccggtttgcttctttggcttcttccagcgccaaacgcatataccgttcgtgtattgtctccccgttcatgctaccctcacaaaattctgaaccatgaagaaaagaatcactaacaaaacaaaaatcattgccaccgatgagaaatatacacccaccttctggccgccacgcaaccaggtctgggcaggatacaaccgcagggggcctcgaacgcgtaaaatcaaaaacagtactgacgccacacctgtggtaatccagaacacaatataaaccagatttaccagaatgagtgtctcttcccccatcccgttcatgaaaatgctcatcacaccggcagaaaagttaacgcaggcgtgcagtaccatcgaaatccaaagcgagccggtacgcagcaccagatacccaaaccaaagccccagcaaaaaagcgtagggggcctgtatcatgttcagatgaaacaggccgaacagcaaagccgaaaccagcagagcaaatccatcgccaaaacggcgcagcgactgcatcagaattcctcggaatgcaatttcctcaaaaatcggcggtagcactgccagcaggataaaatacagtaccaaacccgtcagcgtcaccggcgtaacgacatcattggtcaccggttgatagccggttacagaaaacaacagagaaaaaagggaggtcaaaattgacccgatcaccgaaagagcaaatgttgcgggaatgctcaacaatacggttccggcccgcaccggtcttaatgggaccgcaacccgccatggcatcttcaaaaaaagcaggtatgccccaaaggcgacggaaaaagacaggacataaacgccgatattcaacaaataatacgcaacctccgaattgccaaacaactgccgcccggtaaactgataggacagttgaatcaaaaatcccagaaacagactggcggaaatgttgatgacaaaatacaaaatcgccgcaacgccaaaacaattggcagactgacgcagacacctcttttcctggacgtaggcggggttttgcagcgggagcggtaccactggcggctgatatccgggcggtgaacccgcaggcggcatattctgatatggggtcataaagcggttcctccttctctttatcgggcaagccgcttaaaaaagcggcaaatctatcgtcagacaggcacatgacagctgccttttgaagggccaaaagccgttcaggtagttattctcacagtctttcaacgcttcatcccgcaaatcggtattcccgtttccttcaggttttggttttgactgctgcttaaaacgcgttttttggctgctgtcatttcttaggccaccgggcaaacggtgaaaagtccactggaatcgcgtattcttctctgctttgcggttattataccacagtttcgctttcataggaatcgtccttttaaaaaatccctcttttccctcttttctcttttctcttttctttccggggaaaatatgctatattagtttctgtatgctgcatttcttcgatctcattgcttccgtttacagcaggcggaacaaagagccaaaaggaggttctcctgtgaagcgggaaaaatcctgcggtgcactggtctaccgcatcacgcaaaacggccagaaagaacttttattcatcaaacaccggcatggcacccactggtcctttcccaaagggcatatggaggaaggcgaaaacgaggtgcagaccgccttgcgggaggtgaaggaagagaccggcctggatatcgacttggaaggggatttccgccaaagcgtggaatattatccaaagccaaatgtcaaaaagcaggtggtctattttctgggacacgccagaaacgatcacgtggtccggcaggaggaggagatcggcgaaacccgttggattcctctggagcaggcccatacctgggtcacttttcgcaatgacaaaaatctgattagcaaagccaagaagattctgttgccggaatagcgttttccgggaaaggatgtctttattcatgcaaaaaaagcatttttccttgtctgccaatcccgcccgggtaattacaggcagctttctgggcgttatcatcactggcactctgcttttgatgcttcccctgtctgccaaaaacggagctgtcaccaatttttttgatgcgctgtttaccgccacttcggccacctgcgtaaccggcctgattgtggtggatacctatacccactggacctttttcgggcagggagttatcctgtctttaatccagatcgggggcctgggcttggtaacgctgacgttgttcttcaatctgttgattcggcggaagttgggacttcgcaccctgcagctggcacaggaatccaccagtgccagcaattttgaggatacgccccggcttctcagaggaatcgtcggtatctctttgatagtagaagccatcggagcagtgctgctactgcccgcttttgtaccgaagtatgggatggggggaattttcatttctgttttcacctctgtctctgcattctgtaatgcgggttttgacctgttgggccgggaggggccttattcttccttgatccattataacggcagctatgtgcttttggttgtttcggcgctcatcatcatcggcggtttgggattcatggtattgtttgatctgctgcattaccataaaagcaaaaaactccggctgcacagccgggtggttctcctctccaccgcctgcctgcttttcatcggcactctgggttttgccgcgctggagtggcataaccctgccacgatgggcaatctcccggtctggcaaaagttgaatgccgccttctttcagtcggtctccacccgcaccgctggtttcaacagcattgacatcgcctctatgaacgagatcagtaaggttctttccatcggtctgatgtttattggcgccgcgcccggttccaccggcggcggcatcaaggtaaccactatcgtggtgctgattatgacagccgtttcggtagcacggggttacgacgatacgattattatgaagcataaaatcaagcggcaggtggtcaacaagtctctgaccgttgtgttcatcgggttcctggcggttctgctggccagcggtgtgattatttatacgacccatgacggcggggtcaccgcctccactgtagacgctttgtttgaatccacctcggcgttcgctaccgtgggcctgtcctccggcattactgcgatcgccaatctaccttctaagctgcttttaatcgccaccatgtttttaggacgtatcgggccgatctcttttctgttatccttggcagcgggttccggaaaagtcaaccggaaacaggttatgccagaagggcatttaaatgtaggataaaaagacaggaggggttaaaatggaaattcgtcacacgaaaccagcagatatggatgcggttctcgccctttacgatgcagcccgctgtttcatggcggagaacggaaatcccgatcaatgggtaaacggctatcctggcgccgaccagttgtcattggatatggccagtggcggcagctatgtctgcgtggacggaagcgccatcgtcggcaccttctactttgccttgggcgacgagccaaactatcaccggattgacgg

SEQ ID NO: 2918 - DNA, 3703 bp, Unknown
  16S sequences of unknown bacteria
ccgctggggcgcacgagcagcctgccctcatcgccgagctcggcacctgcctgccgctcggcgtcggcgattgcgtcgttgccggcatagagcgccttgtcggtgacgcgcacgttgacgagcgcctgcgggaacttgtccatgacctgcatgagctcggagaccggcttgcccgtcgtcgcgatgacggagagcagctgcagcgcggttaccaggccgtctcccgtcgagttgtgctcgaggaagatgatgtgccccgactgctcgccgccgatgcaggcgcccagggcgcgcatctgctcgaggacgtagcggtcgcccaccttggtggtgacgacgtcgatgccctcgcgcttcatggcaagctgaaaaccgaggtttgccatgaccgtgccgaccacggtgttctccgcgagcgcgccgcgttccttcatgtcctcggcgcagatcgcgagaatgtagtcgccgtcgacgacggtgccgtccggcgccaccgcgagcaatcggtcggcgtcgccgtcatgcgcgagcgcgatgtcggcgccggtctgcttcagcagctcgacgacgggctcgagatgggtcgagccgcacccgacgttgatgttcgcgccgtctggctcggtgttgatggcgaacacctcggcgcccagctcctcgagggcagccggcgtcgtcgcgcacgatgcgccgtgcgcgcagtcgagcgccaccttgagccccgagaagtcgacgcccttcgcgcggaccgtgtcgacggcgtgctcgatgtagcgctgcgcagcgtcctcgagcacgacaggcggctcgggcgtgggaacctgctcgccgcgcacctcctcgacaaccacctgcagctcgtcttcgagcgcgtcgggcagcttgtagccgtccgcgtcgaagaacttgatgccgttgtactcgggcggattgtggcttgccgagatgacgatgccgcagtcgacgtcggattggcgcgtgagcagggcaactgccggtgtcgggatgactcccgtgaccacaggctcgccgccttcggcgcggatgcccgccacgagcgcgtcttcgagcatcgggccggacacgcggctgtcgcgtccgatcagcacgcgggtgccgatctttcgcaccgccgcccttcccagcgcaaccgccaggtcgcggtcgagttccgtgcccgcgacgccgcgcacgccgtccgttccaaaaagacgaggcatacaacccctccaaatgcgtatctgcgtttcttcaaaaaatgctggaggcattgtagcgcaagcaccccaactcgacgcgcctgcgccccacgcgcaaaatgggcgataatgcacataatcgttttaacaggcaatcgtttcctcggaggggccctcttcccatgtcaaaagaatccacgtcaggctttctcggaacactcggctgcgcgctccttttcctcgcgctgatcatcatcgccttgatcgccctggcgatctggctcgccgtcgccgtcttggcaggtgtgggactgtggtacctgatccgcttcatctggcgcaagtacgccgccgcgcaccccgaggcgccagccgtgcagcgcgggatgaagatgacgccgctcacgcgcaaggtcctcgcggccatcccctgcgtcatcctcggctgctgcctgtttttcgccccgttcgtggcagacggcagctcggactcggcggacagccccgcgcaggaagacacgcaagcctcggcgcccgccgcagacgaatccacgcaaggcgcgccagcaaccacgccggacagctccgccccacaggcagatgacgccgcccaggcgccggtcaccaccagcgcaggcacgctcaagatgcactttatcgacgtggggcaaggcgattctgagctgctgcagctccccaacggaagcaccatgctcatcgacgcagggaccgcagacgagggccccgtcgtcgtctcgtacctgaagtcccaaaacgtcaagaccatcgactacctcgtcgccacccatccggacgccgaccacatcggcggcatggaggacgtgatccaaagcttcagcatcggggagctctggatgcccaactacgcgaaggacaccaagaccttcaacggcttcgtgaacgccgcacgtgcgaaggacatccccacgaagcaggcgtatgcgggcgagaccatcgtccccgcgagcgccggctgcgaaatcgacgtgctcggcccctcgcaaaacctgcactccgacgacgccaacgactattccatcgtcttgaaggtcgttaacggcagcacttctgccctgtttaccggcgatgccaccgccgacgagctcgtctcgtaccaccccggccacatcgacctgctcaaggcggcgcaccacgggtcgcggaccggcaccaccactcccgtcatgaacgcgctcacgccgcagtacgtgatcatgtcctacgcgctgggcaattcctatgggcacccgcaccagcagacgctcgacgccatcgagaaatcgggggcgaaggcatactcgactgcggcaaacggcaccatcgtcgccacgtccgacgggtcggcgattaccatcagctgcccgaagaacggccagatcatcgcgggcaagaaggccgccaagaaatagccgccgaaaagcagattgaggagggagcgccatagcgcccctcccccatctgctcaaacagcgcgttatccgctagacgtagaacagcatgtcgttgtacgtcgggaacggccagtactcgcgcgcgacgtacagctccatctcgtcgccgacctcgcggagcttgtgcatggccggcaggcacaggtcgcggtaggcaaacgcctcctgcgcccagtcacccgacgcgccggcctgcttgcgcgccgtgcccagctcgtggatggcgacggacattcggtccgccccgtccgagagcttctccaacagcttggtctcggcggcgttgctgacgcccagctgctgctttgacagggcagcctgcgcgacgacgttgccgtactcgatgaccgcgggcaagatctgctgctgcgccatgtcgagcatggtgcgcgcctcgatgttgatgatcttggcgtagtgctccatctcgacctcgtagcgggcattcatctccgccgggttgagcacgtcgaactcgtcgagcaggtcgatgttcttctgctgcgcgtacgcgccgatggcatcgggcgtgttcgcgttgttggcaagcccgcggcgcgcggcctctttgggccattcgtcgctgtagccatcgccgttgaagatgatgcgcgcatgctcgttgaagacatcgcggcagatggcgatcgcctcggcctcgacgtcgtcgcagtcctcgaggcgctcggcgtatcccttgaagctcttcgcgaccgccgtgttgatggcggtgttgcacgacgagagattcaccgaagagcccggcatgcggaactcgaagcggttgcccgtgaaggcgaacggggaggtgcggttgcggtcggtgctgtcctggttgagactcggcaggacatctgagcccaggttcatcttcttgcccgcatgcgtttcggggtccttgcccgccgcgatggcctcgacgatgccctcgagctcggagcccaggaagatggacatgatggccggcggcgcctcggagccgcccagacggtggtcgttgccggcagacgccacggacaggggcagcatgtc

SEQ ID NO: 2919 - DNA, 32759 bp, Unknown
  16S sequences of unknown bacteria
ctaaattgttgcacttgatagtataattcaccaatagtaaaagaaaagaccggcctttggccggtcttttgttttacgcttcggtggggttctcccagttgtgccacacattctgcacatcgtcattatcttccagcatttccagaagcttgttcatgttcttgatgtcgtcttcgtcatccagagaaatgtaagtctggggcaccatagcttcttcggcctccaggaatgtaaagccgttttcctccagcttttcccggacagaacccagatcgtcgggggtggtggtgatttcgaacacatcctcctcagcggagaaatcggaagcgccggcttccagggcctgcatcatcacttcatcctcgtccatatcgtccagacgctccacaaccagcatacccttgcggtcaaactgccaggacacacagccggaagcacccagatttccgccgtatttgtcaaaataatggcgcatatcaccggcggtacggttgcggttgtcggtgagggtctccacgatgacggcaatgcccttggggccatagccttcgtaggtgatggattcgtaatcctcaccggcgccgccggaagcatatttctgcagcacccgattgatgttgtcattgggcacattgttggccttggccttggcgattacatcccgcagcttaccgttgacgctggggtcggccgagccgccggtgcggatgaccaccgccatctcacgggcgaatttggtgaatactttggcgcgctgctgatccacaacgcctttttttctggcaatattatgccatttggaatgtccggacatttcgtcccctcctatatccttcaaatagattccattttttcgtgccctcttccgaaaaagagcggccaaacgctatttttcattttaacacatttcccggtgaaaaatcaatgtataaaaccggtggagacggtgcacaataggagcacaggaaatgaggtgagcgcatgaagaaccagaacggcaaaaacagccagaacagcaagaacaacaagatggagaacaacaagatggagaacaacaaggctgaaaacagcaaaaactgcaaatacgacggctaactgccaaacaatgcgcaaaaaaggactgccttccggcggtcctttttgcgtaagcggctcagatttcccgcacccgcaccacaccggggatgcccaacaggctgatttgcagctgggccgccgtggtctgctcccccagcttcaaagcgatggtcaccggagccacaccgtcggccggaaggttctggttgatggtgaggatattggctccggcgtcatagatgcagcccagaacagtcgacagcactcccggctcgtcggccagggaaaaatacaaggtgatcatgctgccgccgccccggtcaaacagctccacactgtctttatacttataaaaggcactgcgggatatcccacaggcccgggcggccatggcggcacttttcacctttccccgggccagcatttccttggcccgcaccactttcagaaacacatcgggcagcacctggctgtcgatgagcaagtaagtgggtttttccgccatggtcttcactctcctttattctttggtccgctcatctgcaaaccccagcacacggggcagcagatttttgtgatcgggtttggtgtcccgcaaaagctcggcatcctcttcgcccagatctccccacacagagaagcgtccatcttcctgcaaagcgatctccagaccggtgtagcggctgtatttttcgtcggcataatcttcctgccagccaaagagttcccgcgcggccagcaccactttgccctggccataataataccttgtcactttgttctccctctcttccggttcccaccggcgcccatttgtgctatactgaaaaaaagggattttttcaccagcgcctggggttttaagaatattgtaaggtttttacgaaaattttgcaacactttgctgttatacttgctttcaacaaccaagggaggtgtttcccatgcattcagatcgtaccccggagcaggaagagcgcagctatcgacgccggcgcaaagcagtgagcctttgttctctcctgggactgatcggcgtgtttcttttcatcactttcaccttcggcagccgtatcctcacctttgcctccgacccggaaggcttccgggcctgggcccagggtcaggggatattgggccgcttggcccttatcggcatccaggtgcttcaggtggtggtggctatcatgccaggagaagtggtggagatcgccgctggcttcaccttcggcgcctgggagggtctgcttctttgtctcaccggctcagtactgggctccatcatcatttatggttttacctgccgcttcggtgtaaagatggtggaagcctttatctcccgggaaaagatggattcgctgaaatttatccacaacagccgtaaactggaacttctgatcttcttccttttcctcattcccggcacacccaaggatgtgatcacctacttcatcggtctgacgcccatgaagctgaaaacctttctggtgctgtccaccattgcccggatcccctcggtgatctcctccaccatgggcggcaacgccatgggccttcgggattaccggctggccatcatcgtctttgccatcacggtgctcgtcagctccatcggtcttctgatctacacccgcattgtgaaaaagcacaacggcaaacattaaaaaagcccggctatggccgggctttttctattcttgggatgtggaagaatcgttgaatgatctcatgtttaattcatggacagggcctgggatagagcgccgggcagaccatccaggaagtctatcctcatgcccacatggacaacagaaaaggacgctggaaaaccagcgtccttttctttacggaattttatttcacatcacagagggaggaatgatatgatttctgttttcatcaggtatccagctgattggcgtctttcagcaccagatccactgtaatctccttgccatttcggacaaggcctaccttgacggtgtcgcccaccttgcactgatccttggcataattcagttcggacagggtggtcacttcttctccattgaaagagacgatatagtccccggactggataccggcctgctgggctgcgccgccttctactacttcggccacccgcaatccggctgcaatgccctgcatttggccataataggaattgatctgttccacggtgacacccagcatgggccgatcctgtacagcgccatattcgataaagtcattggccaccttgagggcggtattgctgggaatggcaaagccgatacccaccgcttccgatgtgttgatcttggaggaaaccacgcctaccacttcgcccaggctgttgaatagcgggccgccggagttgcccggattgatggaagcatcggtctggatcacattcatgatatagttgccgatctggatatcacggctggtggaggaaatggcaccctgggtcatggtgttggcaaactccagacccagcggattgccgatgaccacggccggctcgcccaccaccaactggtcggaatcgccgaaagtggcagcattcaaaccgtccgcatcgattttgatgacagcgatatcggttttttcatcggtacccaccacctgggcctcatattcggtgccgtcataggtgcgcaccgtaatgctcagcgcatcggccaccacatggtcgttggtgatgatatagccatcctctttcatgatgataccagtacccacgccgctgccgttggacagctggctggtgatggccaccaccgaagagacattttcttcatagatctgagcggaggtgagagcatcctctttataagtgggctgatagatcaccttggtgccgctggtggtattgccggaagaattggagctggtgctcttggaaggctcatacccgatccatttcaaatagcccacggtggagcccaccgagacggcggccaccagcaccagtgcgcctacccctttgaagaaacgggccacccgcttctttccaccgggacgatgctccttgggtgcccggggctgccggggttttccgccataaatcccctgggtgtcataagcacttctggcctgtccatagctatgataggaaggcgctggccctgcattttgggcgtctccctgctgagccgtctgattccagccgccctgacttgcggaacttgcctgattctgggcctggccccagccgccggaagtttcctgagcgctggtcttattcaccggctgggcctgatcgctgatgaaagcgggcttatgctctgtctgggcctgctgctctgccgcctgggaaatggactgagccatttgatcctttttctcttcctggctggtctcaccccaaccaccattttgggtcgcgttgaagtcttgggtgttctccccattttcccgattcattttatcctcattcatagaagtgttgcctcctttttctttctcaaaggcttaccgcccttctctgtttcttattatccattgaaattatgaaaatgcaatatcttaaaaaaaaacaaattgtaaagaactgtatcgctttctttgtaaccattcctttactgtttgtaactgacccgaggttgtatcttcgtccttattattttataataggagcgtcgaaaaaaccatctttttgtcgaatcagcaacggaggcttttgccatgacatctcatccttctcctcatcgccgcgccgcagcctttcttctttcctgctgcgcttttgtcctgtctgtttttgccctcatcacctgcttcaccggccggccaggcactccctcatcaaaccacaagcccggccagggcgaaaactctcaacagctggaagagcagcgtcagcagcttctggaaaaggctgatactttgcgccggggctatttctatgacgaagccctggagcttttggaaaacgccgacaaaaagctggtgaatgatgatgtgaagcaagccatcgaaacctgccagcaggacaaggactccctggtgaaatacgaaggaatgccctatcatgtgtttttccacagcctgatcatctatccggagctggcttttgacaacgaaggccatccggccgaaggctacaatatgtggatgaccaccgtcagcgaattcaaaaagatgctccccctgctgctggaaaatgattttgtcctctatgatatcaatgagctgatccaagtgaacgaagacggttctgtgacccagaaggacatctatctgccccagggaaagaagcctttgattttgtcggtggacgatctgagttattacgattatatggcccctgacggctttgccacccggctggtgatcaatgaacaaggggatgtggtcaccgaagtgaaagctcctgacggcacggtgagcaacacttacgacggcgatgtgcagcccattgtggatcagtttgtcaaggagcatccggaattctccttccggggagccaagggcattctggcccccaccggctatcagggagccttcggctaccggatcaccgacctggagctgtataccccggaagaaggccagcagatgctggaggatgtgcagaaaatcgctcagcgcctgcgggaaaccggctgggagatcggctgccacagctacacccacaacggctactggcgaggggacatcaccatggaagagctggaaagcgacctgacccgctggcgtgaactgatcggcacctacaccggccccactcaagtgctcatcactcctttcggcgcccactatgatcccagtgatccccggtatcagtatatggtggatcagggctttaaaatcatctgtcctgtagccgctaatatggcaacctcctatgagggcaacagcatgatccagaaccgcctcaatctggacggttacaccatgctcaagcacccggagcgcatcagcaaatatttctttgatccttcccaggtagtggatcccgcccgtcctcctctgaattgatcgttggcctgccccgacatcgaccggggcaggccctttttttgccttttgcacaaagttggccttctcctgcggcaaactgtcctccacacgcggacaaatcggtatttttgtttgaaaaagaaagtcttttctcattgaaaagtcaaaaagctgtgatataatgtttgtggacagttttgtccctttgtctgaaaaacatacattttattatgaatacggagatgagcgaaatgtctgaaagaatgatggacgccctggtcaagaccggccccgtcaaaggtctgaccctcacccaagtgcccgttcccactcctggcaacggcgaagtgctgatcaagatccacaagactgcgatctgcggcaccgatgtgcacatctacaactgggacccctggagccaggccaatctcaatcctcccctggtcaccggccatgaatatgtaggcgagatcgccgaatgcggccccaatgccaccaagtacaaggtaggccagcgggtcaccggcgaaggccacatcatctgcggcacctgccgcaactgccgtgaaggcaatggccagtggtgccccaccgccaagggcgtgggcgtcaaccgggacggcgcttttgccgagtacctgtgcattcccgagagcaatgtagtacctgtggatgaggatctggacgaagatctggtctccttcttcgatgccttcggcaacgccactcacaccgccctgatgtgggatctggtgggcgaagatgtactgatcaccggtgccggccccatcggcattatggctgtggccatctgcaaatacgccggtgcccgcaatgtggtcatcaccgatgtgaacgaatatcgtctggagctggccaagaagctgggcgccgacgcctgcgtcaatgtggccaaggaaaagcccgaagattatttcgaagctctgaagatcaaggaaggctttgatgtgggtctggaaatgagcggcagcgctcccggcctcaaccagctgctcagcctgatgcgcaacggcggcaaggtctccctgctgggtctccagggccccgacaccaagatcaactgggaccatgtgatcctcaagggtctgaccctccagggcatctatggccgcaagatcttcgccacctggaacaagatgatcgccatggtacagggcggcctggatctccatccggtgatcacccatcacttccactacaccgaattcgaaaagggcttcgaagccatgatctccggcaactccggtaaggttgtgctggactggaccacaaagaaataagcccgtttcatctgtttttattatcaaaaggaggaagctcatatcatgaaagaggcattgaagatctacgccaaagagctggaaggcatccgggaatccggcacctataaggacgagcgctttatcaccactcctcagagcgcccgcatcgacaccaccaaggctcacaatgtggtgaatatgtgcgccaacaactatctgggcctgtccaacaacccggaagtgatccaggctgctaaggacagctatgacaagtggggctacggcctgtcctccgtccgcttcatctgcggcacacaggaactgcacaaggaactggaaaacaagatcagcaagttcctgggcatggacgacaccatcctctattcttcctgcttcgacgccaacggcggcctgtttgaaactctgctcaccgccgaggatgcagtcatctccgacgagctgaaccacgcctccatcatcgacggcgtccgcctgtgcaaagccaagagactgcgctataagaacaacaacatggaagacctgaaggccaagctggaagaggccaaagactgccgcatcaagctgatcgccaccgacggtgtcttctccatggacggcttcatcgccaacctgcagggcatctgcgacctggccgatgaatacggcgctctggttatggtggacgacagccacgctgtgggctttatgggcgagcacggcaagggtactcccgaatactgcggcgtgatgggccgtgtggacatcatcaccggtactctgggcaaggctctgggcggcgcttccggcggctacaccagcgcccgtcaggagatcgtcgatctactgcgtcagcgcagccgtccctatctgttctccaacaccctggctccggccattgctgccgccagctgcaaggtgtttgatatgctctctgaatccaccgctctgcgggataaggtgcacgagaacaccaagtacttccgcgagaagatggctactctgggcttcgatatccccgaaggcacccatcccatcgtgcccgtcatgctctatgatgccaaggttgctcaggagtttgcttcccggatgctggaaaagggcgtctatgtggtgggcttctgctatcctgtggttccccagggcaaggcccgtgtgcgcacccagatctctgcggctcacaccaaggaagacctggatttcgccatccagtgcttcgccgaagtcaagaaggaaatgggtctctaatccctcccttttgcaaaacaactcccctgttcctgcgggaacaggggagtttcgtttttctaaacaaaaaaataccccggccatacggccggggcattttcaaaagttattcgatggcgatctgtttgcggccttcaggcagctgcatatcccgcttggggatgcgaatgcgaagcacaccgctttcataggagcacttcacttcgtccgggcgaatatcacccacatagaagctgcggctgcaggagccggaatagcgctcctgacggatataacggcccttctgatccttctcatcctgctcactgctcttgttggccgtgacggtgagatagccgtcctccagatgagcctgcacattgtccttctcaaagcccggcagatcgatggcaatgctgtacgcatcttcctcttccttcacatcggtcttcatcaggttcttggccctcttaccatagagcggattctgtgtgctccaaaagtcgttgtcaaaggcgtttccaaagaactcatcaaacaaattttcaccaaaaatactgggcaacataaatcattcctccattcgatacgatataaagtcgtgcccgttgggaggtcttattcaggccttcttttttagtacacctttattatagtccgttttttagcactgtcaaggcgagagtgctaatattcacaaatgggtaaaactctatggcaaaaaagttcataaaccgcccgaaggcggttttttctgtgctatatccactccggtcgtgcctttatcccccactctcccagctgctcaccctccccaaagcggccatgatagtctgaaccgccggtcacggccaggccatattgttgggccagatccaagcatcggtgggtacattccgcatcgtgtttggggtgatatgcctctattccaaaaaggccatggtgaaccagctggggcagaagctgaaaattcccgtactgtcccggatgggccagcacggccaatccgccgctgcaccggatggcctccagagcttgaaaagggtcggccaatttcacttgaagcggcgccagcggtggagcaccatcggattgctttttgaaaatgctacggtacagttctccatacatttcatggcaaagccccgcttttatcagcacatccatgatatactgcttgcacagctgaccacctggtccggcgtaggcttccacctgttccagcgttactggaaaccccagttcttccaaagccaatgcgctctgtcgaaccgcttcatcccgcgaccggcggaaaggctcgcagaacctttccagcatctctcggttttccctggggactccataggccagaaggtgcagcggtcgcccatcctcctgccggcagctgatctccatcccccggtgaaaaaggattctggccgcttctgccgcttcctctccgccgtcttccccaccaaaggtatcatgatctgtgagaataatgccggaaagtcccttttctccggccattttcaccagctggacagcagaacagtccccgtccgaccaatgggagtgaatatgcatatcggtcacgatttttcaccccggtcagtttgccgtctcatccaaaaactcttctccataatgggccgcataatccaccggcaccagccgcttttccttcatttcaaagcgttgatccgccagggtccggatggcgatctcatcatggaacacccccaccatggcggccccttcctttttcagctccagaatcagatccatcacccactgtttgctccgggcatccagagaggcggtgggctcatccaaaagcagaagccggggctttgtaatcagggcattggcaatgttgagccgctgcttttccccaccgctgaaagtggccggatacatatcccacaactgaggcgcaatgcccactgcttccagataccgctgggctttccgccgggcctgctgacgatccgccccccgtccggtttgggtactggtaagaatatccaatgccgacacccgtgggatgacgctgaaaaactgggatacatacccgatctcccggttgcgcagccgaatgatctcccagggttctgcgctggccaggtcgatcttctccccctgtgcatcctgataaatcacctttccaccagtgggagtgtatgtgcggtaaatgcacttgagcagagaggatttccccgatccgctggggccggtgatggccaccagtttgcccggctccacggaaaaagagatgtcctcaaacccctggatctgggcatcgttgcgaatgtgcatgacgaactttttggacaaatgttcaatctttaacacagaaaatacctcctctgtcttgttccatctcttccagcagccgcggcggcagccatacctgacactgctcccacaaagtccgcgtgggataggccgctacaaaatagctttcttcccccatgggaaacaccgtagctccccatccccggctgtgaagcaccggcacagccgcagcaaaatcccagggcttcaaatgggtgtgaagataaagagcgctttcttcttccggcaaagaacacatttccagagaagcgcacccaaaataccgcacaccccgaaactgacggggaagggccaggggatcgctgcccatcgccgccagatgttccatggtcttataccccaaatgaagcagactccggcggcactggcccgcttcacccctgggcaaggataccggtttttccaggccctcatagacccggccctgctccacatccagcaccaggcctccatagggcttcccgccataataaaggcccagagagatggcgtacagtttgcccaagtgaataaaattggtcgttccgtcaatggggtccaacacccatagccaagggcttttcccctttttctgcgccccttcttcccccaggataccgtgggatggaaaacgctccagcaagcgcccgcaaataaaatcctgggcccatcgatcattgggtgtgaccacatcgtcatacccggttttttcttccacctctcccaggctttccaaccggcggcgcatcagttcccgtccacactccagcaaaatcccccgggcaaacagcaaagcttttctcccatcagtcataacgggtgccatcctcccggatgaaatcattgcggtaacacagattggataccatctggccattgatgaacacctgcaaaatcaccggcaggccgtcctttttccccaccaccaacagatcaccgcatttgccttcttcgatgctgccggtccactggccgatgcccacggcccgggccggattgcgggaagtcatgttcaccgcctggggaagggtgagcatcccttcctcccacaggcggaacactgcatgcagcagcgccggcgggaaataatcggaaaccaggatatcggcacagccctcccggatggcctcccgggccgagaggttattggaatgggagcggcccatgagcacattggtggcccccacgaccacctgcatccccttttctctggcggcccgggccacatccagctccacagggaactcgcagatcccggcatgcagggacgaagtgacatattccagtttttccaggctgtcgtcgtcatgggaagcaatggcaatccccttttctgccgccagatcagcagcttcttccagctgctgggctgtgagcttggcccgctccattctctggcgaagaatccgctccttttcctcatcgctttgatcctgggccatcacccgctgcttgaaaaattccagatcccggtactggccctggcccggggtgtgatcggtaaaggagagcagctgcatatcccctcggcggataaactccagcagcaaggggtagcagtccagattggtgatgtcataccggcaatggaaccggtgccggatcagatgatccccttcgtggaagcgacgaatgagtccggccagcttggtgagattttccggtgtacgcagactggaacggttggcccgcacattgccgtttgtcatgctgagagaatgaaacatggtggtaatgccctgattcaccagttgtttttcctgctcccgcatggccagttcaaaatcaatcatgctctggggccggggctggatcaccgtttcgatgttgtccgaatggatatcaatgaagcccgggaaaatataatttccctgaacatccagcgttctgactccgggataccggtcctcccactgacctttgggacagatttcccgaatcaggtttccttccagcacaacggcgccctgggaaagcactttgtccggcaaaaccacttccccattgtgtatgataaaaatctcttccatggttcctccttagcccgctaaagcagcgagctgaccaatgtctgtgtatattcgtgaatgggatcttccaggatctgatcggtgaggccttcttccacaacccggccgcccagcataaccatggtccggtcggccatcatgcggatcaccgccagatcgtggctgaccaccatcatggcaatgcccagttctttttgaatggagcggatcaggtccagcaccttggcctgcacgctgagatccagcccggtggtcacctcatccagaaagagaatgggtggattgttggccgtggccttggagatctgcactctttgctgcattccgccggaaaaaacggcaggagcctccttcatccgctccaccggaatctccacatgacgcagcagctgctggctccgcccgatcatctctcccgcgttgcggttcccggcagcaatgagcttttcggccacattggccccggaggacaaccccatgcgcaatcccagcatggggttttggtagaccatgcccatcagatggttgcgcagataccgtttctgctggctgctggcctggaggatgttgacctgcccctggtgatacagggagatgtgagcctcgccgctggtggccgggcgatcaaaataaagggcccgcaaaagggtgcttttgccgcttcccgattctcccacgatccccaggatctctccggggaagagctgaaagctcacatcccgcaccgcccaaatggtatggcatttggggcaccggccccgctcgatctccggatgactgcggcagtaatcacaaccctctccaaaacgcactgtgatgtgttttccttccaataccggcgtcctgttatccatggttcggcccctttccctggcgttcctcctgctcctgttgctgctgccggcgcttctgacaatagccggtgtcggagcactgataatatgtctcccccgttttttcgtccaccagttcgtcaaaatacacattctccgccccgcacaaccggcatttccggccgctcatatcctcctggcggaagggatgatcctcaaacgccagagataccacatcggtatagggaggcacggcgtaaatcttcttttcccgcccggccccaaacaaatagagacactgggcctgatggagcttggggttatcataccggggaatggggctgggactcatcacataccgcccatccaccagcaccggatgggaagcgcccagaaatggagatccccgggtgagaagggcttcaaacagattcacccagataccggtatattccccatcggcatgcagctgacgggtcacctcttcgtgagggtccacccggcgcaaaggctccggctggggcacttgcaacaccagcacctgatcctcccgcaaaggctcttcggggatccggtggcgggactggataatatcggctttctgggtgtcggtggtggtttccactccggtggtatggcagatcagccgcttgatgctgactgcattgacgctgtcatcattgccctgatcaatgactttcagggtatcctccggcccgatgatggacatcgtcagctgaatccccccagtgccccagccccggccgatgggaagctcccgggaaccaaagggcacctgatacccaggaatgccaatggcatgcaggatggaccggcggatctccctcttggagccttcatccaaaaaggcgaagttataattttccctgtcatttttgctcgtcatgacccatgctccttttttgatttctcaggccgtccagcttggactggaaggtgacatagtggggaagcttcaaatgggaaatgaatccattcatttccagacaatctccatgaagcagcacaaactccatatcgctggtaggtccggtatctttcaatgtgagtgcatgatccagcacggccatggcaatagccttggtatcgttgcgccccatgacgcagccataccccactccgatgccgctgcttccgggacggcttcccatgagcccttccacctcggtgatatccacagagcccacatagaccctttccccttcttccagcggagagtccacttcaatgtccagccagccataccgcagttctccaatggtgggatgggacataccgaatccccggatatcgctgtatgccaggccgctgacaaacccggtgtcggcccgggtgagcgtctgcaaaatggcgctgcggggagcgggaaggggcagcttttccatggtgatatcgcaaggctcgctggtgtcttcctccacctgttccaaaagcccttcctgccggagaagatccagcacccggggcgcttgatcggaaagagtccggggtgcttctttttcttcccggaactgtttcttccagctttgcagctcttcttccttctcctgcctcaggccgaaatccagcagacgatggacataatcataggtggcccccagctgctgccctcctggaatattcttaaaggccgaactgatccggcggcggatgtgcatctggcttccatccacagtgcgggaagtgtaattgcgctgcaaggtgctccgatacgcccgcagaaggaaaaccgcctcttccgggcttccctcacactgtttcagcgccagggcggcgtaatccggcgcatacagtcccgcttccgacatgatccgatcgatcagaagccccatccggtcccgcagggccgccagatccaccggtgcatcgccctgggagcggtaatcccgaagcagctcaatggaggcgtcaatggcctcctggccgcctgtcactgcaacatatcccatgatttttcctcccatttcactttccggggcacggccatcagctccccttccggtgtgaggaaacagatttccacgccgcaaggaaactcgatctccatttcctgacggattttcagccaccggcttcctgtctggggcagatggatggagatgctcccctttaccccagggccggtgagtatgctttcttccccatcctgcaaagaaggaatgcccacaaacagcgcagcacttttgtggggttccggcaaagtccccttcttggccttttccaggatttcttccacctgatcattttccatgtcctggctgtccggcagaaagatatagtcggcttcttccaaggccgccggccggccataggtcatctggcgaagttcttcttccaaagagtggttcccgatggcggcaaaagtgcagctatggtccacaagggtcaacgcagcggccgccatgacgccctggggatgctccagattctgtccttcccgggcaatggagcggatctttcccggcatggccagggcatccatcaactgtttaaagaccttctggcaatcgaacaccaggtcaaatcggtccgatgtgatcataagtccttcctcctgtcaataggaaacatccagggtctcaaactggactttcgagcgggcatgacgggcaatttcccgctgctgctctctttccagctcctgctgccgctgctccagcgcctgcagcaccggctctttttccggcagatcggttttccgcagcgcatccaccacagcggccgccatgaccttctgggtatcatcgcccatcatcagggcaaatccctttttcccttccagctccaccatggcttcacaggccagcatttcccccagatagaactgggctttggctaccgtctcccgcattttgatcatcaccagggttttggccggtttgcgcagcacccgcaccgggtatttatccatcaccggcctgatcaaatccaccacccactggccggagctttggcaaaggaccttggaataattgtgactttccatcattctccccttttctgctatccgattctggcttttttctctttgacaaaggtaaagagcatctccatggcgtaagtgaacagcagcaccatgccgatggccacaatggcctgaccgtaggcatagcggccaaaactgttggagatcacataaccgatgcccccggctcccactgttcccagcaccgaagaagcttcaaaattgctttcaaaactgatggaggtccaggcgatcagtccggtgagagccgatggcagcaccgcactgaaaaagatcttcacacggcctgcgcccatggcctgaagggcctccagcgtttcctggggcacttcctcgaaacactgggcaaaagaacgggcaaaaaaggatgtactgaaaatacagatgccgatgatgccggcgtccgggccgaacccaacgcagaccagcaccaaaagcacccagatgatggagggaatggcccgcaggaatgtcatggccgcagaaagcaatgtggaaagccaccggaagggcgtcagatttttggccagaaacaccgccagcaccattcctcccagcatgctgtacaccgtagaaaggacagccacggccaccgattccagcagagaagtgaaggtgatgtccacctggctgaaatccagttccgccagtttgccgatggccgtggggatctctcccactccctgaacaagctgctccatatccagcttcatgcccacaagagccagcactcccaaaatcacaaaggccagcaaaaacaagtgcagtgtccgatcccggctgggatctttggtgcggatccgtccccggctgtcccgcagcagatcttcctgcctggtttcctgttggccgcttcccggtgccagcatcttggcgggagcagttgtagctatgctgttcatcaggccagcaccttctttctcagaaaattggtgagcatatccaccaaaatgacaatggcggcaatgagcaaaatcacgccgatggcggaatgataccgaaactgtttgatataacccatcatcacaagaccgatgcctcctcctcccacagcgcccaccaaagtggacgagcggatgttgacttccaaagaatagagcagccaggacagaaatccgggcagacaagcgggcacgatcacctgggtaatggtggtcagccgtccggcccccaccgcttccatggcctccaggctttctcctcccacctcatcgatggtctcgataaaggagcggatgagaaaaccgcaggtggagatcagcagggccagcacgcccaccagattgccgatgccaaaagacatgatgagcagaaatgtccagatcatgctggggatattccgctgcaccgaagccaccagacggacgatcttcttcagtggcggccagggcgctgtggtattggagcccagaaatgccagaaccagggaacacaccgatgccaccaggctggctcccactgccatgcagatggtttgcagcactccttcgccaatggtcttccagtcggcgatcttgggcggaaggatatcctggaaaataaaatcccagaagttttccatattcagcagaaaatcaagggggttataccctgtggacagggtggatatcacaaaaagcagtcccactcccaacgccagcagaagagtcatgatcttttctcgccggggaatcagcggaatggttgtgtgcctattcattgaccgcttttcccccttccatgttcactgtcaactggctgagcggcgcatcataaatggtctcgatcatctggtcggtgagtttttccggcacatcatcgaacaccacccgtccttggtggattccaacgatccggtctgcataggtgcgggccacatccacctgatgaagattgacaatgcaggcgatcttctttttgtgggccatctgctggatttggtccatgatcaccttggaggaattggggtccaaggatgcgatgggctcgtcgcacagcagcaaagtggggtcctgcatcagggcccgggcaatgcccaccctctgcttctggcctccggaaagctccccggcccgcttgtagatcatgccccgcagtcccaccatttccagaatctccagcgcttttcgtttgtcctcttcactgtaacggcccagcaccgcatcgggtgtggacaaataccccaaacgcccatggagcacattctgaaacaccgaaagacgataaaccagattgaagctttggaagatcataccgatctgccgccgcaaaggcttgagctggctctctctgcgaagggcggccatatcctgcccctgaaacagaatctctccctccgtgggctggatcatccggttgatgcagcgaagaacggtggatttccccgccccggaggggccgatgatcaccaccagctccccctgggccacatcaaaactcacatcctccaccgcacgggtgggaccatagtattttttcaggccgcgtatactcagcacctgttccatttgcccgttcctttctgcctggttcatcagtcgctcagcccgtactcttccttcagctcggccaggtaatcgtaggtgctgtcttccacttccacatagcgcttatccggctcgcccagagcagtgaagtactcttcgctgtaatccagcaggaaatcccggatcttgtctttcagctcctggggcagatctttctgcacagcaatggggctgccgggaatcagaggggaggtatggatgatcttcacatcttcctcgttgaaattcccctcttccagctgattctgataggtgctggaggataccgcagcggcatccacattcccctgtaccacggcctgaagagaggcggcgtgattgccggcatacatggccgatttgaagaactttccatcggtgtgcagatcgtcaaaggacaggtcgtcatcgccgatctcattgagaatttcatcggaaggcaccacattgccgctggtggactccgggtccacaaaggcaaatgtctttccctccaggtcttttacgctgtcgatatcgctgtccgccgctgcgatgatatgagaatagtagccaatttcaccattggtggctgtggtcaccaggcattcagcgccagaccgttcccgggccgtcacataggagaagggccccagcatggccagctgcgcatggccggtgcgcatggcttccactgcggcgctgtaatcggtggcccggtaagtggtcaccggaataccgatggccttactcatctcttccgccatatcatcccgcagctgcacggatttttccgtgtcttcaccaggaatcagcaccatcaccacttcttccacaccgtagtcggcggtctgttccgcaccgctgccgccggaaacagttttttgctccccttccttgctgtcctggctgcatccagtgagcacgccacaggtcatggccgccatgagcagagctgctgtcattcgtttcactttcattccgtgaatcctccttcgattccgttgcttgtctgccgtggtcttgcttacggggccatcctaaatcccttttgtaaaggcgccaagtggatttggtcaaagttcatcccagcccattgcactctctccagcacccttctataatgggtttgcaccgaagagggaggagcctttatgaaagaaaaaccttgggaaagcattgcggaaaagctgatgcaggatatcagaagcggaaaactccccccgggagaaaaaatgcccagccagaaccaactggccggacactttggcctgccgcgcacccatatccgcaaagcctatgagcagctggaagaactggggtatcttttttcccaccagggaaaaggcacctttgcctcccttcctccccgcatgatccccctggccatggagctgtccggttttgccaaaaaaatagcccagcagggtctatcatgcgaaaaccgggtggtgcagcgaaaatggataaattacaaaccccagctgtttcaaattctgggagcctcccctcaggacaaagtcctgaaaataagccgtctgcgggtggtggacggcgtaccggccgccctgcacaccagctacctttctgccgcccgattccctcagctggaaacagagggaaacggcatccaatcggtcagccaatatcttcgcgctcagggctatgaacactgccaggtatcccagcggtgcctggccatgatggtacctaccaaaaaagaacggaagcttctggagcttcccggatgctgtcctgcactgatcctcacctccaaaaccctttcttccccagatggcgaagttttggaagtgctgcgcattgtgtatcgcggcgaccgttttgtcttacagctttgattgatctattttgttgagaggagaaccttgcatgattacccaacaggccggtggcctttctttttgtttgcaacagccctttgatttttccttcctccgttgttacggtcagcccttccaggtctttgatcagcaggattccggctgtatgggctttggtctggagcacagaggccgccgctattttctcaaattggccggagccatgccctgccgcagcaaaatcccgccacagcaagccatcgcccgtctagagcaggccgcggaactttaccgtaacctggcccatcccaacctgatccctcttttggatgcccggccagtaccccaaggctttgcactacttttcccctgggtggaggggctgtgtatgggcaaacaatatcccacccgggaagcgtttttatccctgcctcttcccgtgcgagaaaaaatctttgaagagatcctggattttcacaatcttgtgggaatgctggggtatctggctgtggatttctacgacggctccattctctacgatccgaaaaaaggcaaaaccctgatctgcgacatcgatgaataccagcaggaaccctaccgtaatcccgtgggccggatgcccggctccacccgtttcatggccccggaggaatttctcaccggcgagcacatcgatcagcgcaccaatgtataccgcatgggcgccaccgcctttgctctctttggaaaaaacggctcccggcaacaccgggactggcctctgtctcccaaccgttttcaagcggcccgacaagccaccctggaagagcccgatttgcgccaaccctccctttcggaatttctccggcagtggcagcaaggataaaaaagctccgaaaaccgatcaaaggttttcggagcttttctcttttctttacaaaaccagttccacccggctgccgccggaccggtcctttttcaccaggacctgcttttcgattttttctttcagcgaggccacatgagagatgatacccaccagctttttcccttcggtgagactgttcagcgcctggatggcctgggccagggattcttcatccagcgaaccaaaaccctcgtccacaaacatggtatccagccgcacaccgccggaaaccgactgaatttcatcggacaaccccagggccagggacaacgccgcctggaaagactcaccgccggacagactgcgcacgctgcggcaggagccgttatagtgatcgatcacttccagttccagaccggtctggctccggttgttttccccaccggccttgcgccgcaattcatattgattgccggacatcaccaaaaaccggcgattggcccgcctgatgatccggtcaaaaaaggtcatctgcacataggtctccagcatcaccttttcctggcctctcaaagagccgttgacggtatcagaaagagccgccatccagcggtaccgctcttcccgccgggccagatcccgggatttatccacaacctgttcccgtatggtttcattggtctgcatccgggtgcggatctgctgctgccgctccagtttttcctgccgctgctgggtcaatgcctgatttctttcttccagggtctttcgatcggcatcgcttccctgacgcagcagctctgtcagctgccggagggccgcttccagctgtgtcaggcgggtttgctgctgacgattatcctgctcggcctgcagcagagcctgttccatctcttcccgctgccggctcaaatcagcatgatgggcttgagcctggcgcacatcggggaagcgcagctgtccggccaatgcagacacctgcccggccactccctgccgttcggcctgggcctgggccaactgcgtgcctgcttcttccctttcccggagcagctgatcccgctgctggatgctgtcctgtatttttccttccaggacttccttctgccgcacctcttcttcccgctgtttcaccacttgctccagctgacaaagagccgctttttcctcctgcaaacgccgcaggatcacctcttcggcatccagtaagggacaagtctctccctggtcttccagccgccggttcagatcccgctccagctgctgcttctgtccttccaggctccggcgctccagctggagccggtgcaaggcctcttcccgctccttttcccggatcagaccggcctgatgctgctcttccagccctttcagctgctgctccatctcctggcgctcttgctgccgccggagaagttcctgctcttgctgtttgagagcttcccgctgcctttgaacctcttctttccagcctttcagcatttcccgtgcctgagcagacaaagctttttcatcccgctgatgaagggccgcttccagccgctgctgccgctcctggaccagactcttccactgtcccgcttccaggcttcttttcgatgcctgctcctgggctttttccagcgcagctttggcctgctccacctcttccttggtgggagcctgaggggacaaacgggccggagccggatgctggagagcgccgcataccgggcagggttttccttcttccagctcctgagccagaagcccggcctgctcggccagaaaagcccggtttttctcctggtattgggcatcccgctgggcctgcacattccaggcctcctggtatgcctgttgggcctttttcaaggcgctttccgcctgttcccagtcctgagccaacccttccaactgccccaggctctcttcctcctgccgggcctgggtttgctgagccagcagccgctcctgcaagctttccagtacggcctcttcctgataacgccgggaaagttcctgctgcttttgttccagttcttcccgcttcttgccatccgcctggcgttgctcttccagcttttcttcctgggctttgcccttgccgatctgccgggcatagccctcccaggttttgcggtcctgctgaatcgcctgccagagcgcctgacgggcctgcgcctcccgctgctctcccagcgccttttcccgcaaagcagccgcctcctgcaaggccgctgccttgtgtttcagctcttcggcctcgcggctcacagcctcttgccgcttctgaagctccccttgatgcgctttgagcgcctgggccttttcctccaaggctttcagctgatttttccctttttccagctgttgataggccggaagttccccttccagagctttcaactggccgatgatctcctgccgctggggcgccagattctgctgttcttccaggcacttctgggcctgctccgcctggggccgctgctcctccagctgctttttggtttcttccagctgcttttgggccttttcccgctcttccgccttgcccagctgagcgttgacctgggccagctgctcttccagctctttcagctgactgctcagctgttcttcccgccgccggtcctgggaagaaagccgctccagcacatccactgtctcttccaaaggcagctgattctgccgggcctgctgagcctgatccgccaggggatctccttcttcccactggatgccctccacatactggcgcatactttgccgggcctgctcacattccttgccttcctggagagtcagagccttgattctgtcctggaacaccatataataccgggtctggaatatttcccggaaaatttcctgccggcttttggtatcggccaaaaggagcttgaggaaatctccttgggcgatcatggcgatttgagaaaactggtttctgtccaagccgatgatctgggtaatggcggccgtgatttcccgtggacgggtgatgatgcacccatcgggcaaatgcagctccccttccgccttttgggtggtcgttcccgtcccttttttcatagggcgctggtattccggattgcggcgcaaagtgtatttctggcctcgataagcaaattccagctccacaaaagtgggagtctccggacttgcatactgggagcggaacatggaagcatctcgattttgcccactgggttccccgtacaatgcgtaggcgatggcatcaaacaaggtggttttcccggcccctgtgtctccagtgatcaggtagagcccttcttctcccagcttttccagctctaccaccgtttcccctgcatagggtccaaaggccgacatggtcaatttcagcggtcgcatggctcatcctcccaaatttcttccatcagccccaaggcaaaagaccgctgggtctcctgcatgggctggccattttgtttttcgtaaaattcttccagcatggccagagggcttttctcctctgttggccccatctcttcccactgggcctggttctgggtgcgccggttgtcatagctgagcttcatcaaattgggatagatcagccgcagtttggccgccccatcgggcacatcttcctcgtcggtgaggatgatgtggagataatcttcccgaaaatcctttcccttgtaaaaatcccgcagggtcacttcttcataacttccccggatctccctcaaatcccgcaagggcgtcaaaggaatggtgcggatggatacattccccttttcctccatctccaccacagtcaccgacttttcatggtttgcttccgaaaaggagtacttcaggggcgtgccgcaatagcgaatggtaggttttcccacctgctgggggccatggatatgtcccagggccacatagtcaaagggggcaaagacagaggcgtccacattgtcgctgcctcccacggaaagttcctccgattcgcagcgggcggcgccggtgacaaactgatgggtcaccaacacattccgccttccttcctccactcccagatgatcgatggccacccggagtgcatcggtatagctttcgatggtttcctccgggaaaaaccggcgcacatgaaccggcttcaaaaagggcagcaggaaaacatccaccggcccgtgggcatcctggagagtaaaacggcagggatttccatcatacaccggcgccagatgaacgccgctctgctccatcaaccggccgccaaaagccaatcgctcgggggaatcgtgattgccgctgatgaggaaaacctgaggacccagccgggatagggacaccagaaaatcgtccagcatccccaccgcttcggccgagggtaccgttttgtcatacacatccccggcgatgagcaccccctggggttcttcccgacggacaatctccagaatctccttcaaaatataggcttgatcctccaccatggaaaagccgttgacccgctttcccagatgcagatcggacaaatggatccatttcatctgttttcctccctcttttggatgaaatcttgctatttttttattataccgggggcgaaaaaaagctgcaaccctgtttgtcttgcttttttgcactgatatgatatcataatatcacaagaggaggtggagccatgaagcagcgcaagaaaacaattatccttttgattttatcgctttgtgcggccctggccctgttttaccggcgcagccttcccctccagcagcttctccccggcctggatctgtctcagtgcgccagcatcaccctgcaaggggattactataaagaaagccctcgggaaagtgtggcctataaccgaaccttcacaccagaaaataaagaatttgaacagatcctggcccttttaaaacaggccgagttccgccgcagcctatggggcctgatccccaacaaaggcacccgtacccatccactccagaccggcgatatccggtgggaaatccactgtgttttccccgacagcagcttgcgggtgcataactttttcggtgatttcacccttagcttccaggaaacttcttctcttccggtcgctcctgtttcttcccaatgggtggatgccgtgacaaccatcataacaaaataaaaaacgccttttcaggcgttttttaacatttcgaaaaagtggtctctgccactttttcgagtttttgcaaggggctgcgtgcacgcctttggcgcacacttgccccttgagaagtgcaaaaagccacgcacaggtcgcggctttttgcagattgataagggtaagggcaaacggcccccctgtccagattcgttttcccccagactgaaacgccttttcaggcgttttttatttttccggtgcaaattgtcccagccccagcgtggcagccagagagaatgtccgttgactgccatcttgaaaggccacggtgaccagatctccctgacggtctgcaatgatccccggaccaaagcgccggtggctcaaagccgcccctttcacataatattgttctgctccagcaggcaaaacctgcggctttttttccaaggctgcgggacgctgggccatcgtacccgtttttttgctcaccgtaggccggagagcagcaggagcccgggaaggcttcttcaccggaaagatctcctgagtgaatgtggactccatctccggatgtcggaaacggaacacctgaagccggttcctggcccgggtcatcgccacataaaaaagccgtcgttcctcttcccaggttttccaggcttcttcatcccccggttccggctggcctgtccgcggaaaaatgccgtcggccacatccatcaggatcacccggtcatattccaggcctttgctggaatgaatggtggaaagcacaaagggacaatccggctctcccccttgccgcaccaggttctccagctctcccaagcgccgcagcagatccatagggcttttttccatcgcccccaaagattctaaaatctgagcctttcccgattccataccctggcgctgcaaatattccccatatcccataaaccggacaatacggtacactgctttgtcccccggctccagcagcatatgatccagatgagtctgcaaggcccggcactgacgccgggtgaaggccgaggcctggggattttccgccagtcgttccaaaatggtaccctttcctttttgcgttgccgcctcctcagcgtcctttttccggatgcctgctcccaatttataatagatattcaaaaacaacgcagaagattgagggtcctgggcaaaacgaatgatattgctgatatcctgcaccactcgactggtgaaaaaggcactgtccacttggcggcaccgataggaaatccccttccgggccagcaggtcaatgagaggcaaagcgctttcattgtcccgataaagcaccgccgtctcctcctggcaatcctgggccagctgcatcaggtagggatattgtgcccttcgatttgaaagggaaatgctttccaccgccagccccgccggacgcaccgcttccatgtgtttgggataccggtcccggttcttttggataaagttttgggcggtctccacgatctgcggagtggagcgatagtttttctccagataaagcaccttggccccttgatatcgtttggaaaactgagtcaaggcctggggataggccgcacgaaagccataaatactctggtcttcatcccccaccaaaaagatgtttttctctttcccagccagaagatccaaaatggcatgctggatcttggaggtatcctgggcctcgtccaccgaaagataccggtatttgtcctggaagcgagccaaaacctctggataccgcagcaggatctggcgggcataaaccatctgatcatcgtagtccatctgctgacgctgacggagggtttgatcgtaagcctgaaacagagcgggaaaatccacgccctccacctccaccgtttccaactcttcccgggtgagcatctggttcttagcataggtgatggcggtctgaagggccttgacggtgctttccggcacgaactccttttgttgtctgcggcacagttctcccaaaagggccccctgggtcccggtgtcctccagcaaagaaaaagcctgccgccccagcagccgttcataggtgcggatcacccggctgcacagaccgttgatggtgcgaaactccagccggtttcccatctcctgcccaaagctgcggcaaaaacgggccttcatatccctggcggccgagacggtataggtaacggtgaggatctgctccgggggaatctgcttttcatagaccatgtatcccacccggctgaccagcacggtggttttgccgctgcccggcacggccaacagcaacaccggcccttccacactctccacggccacctgctgctgaggattgagagaaaggccaaaccgactttgaaaccgctggagatcagccatggaaacgccagccgcagtcgtcatgatagatcatctgatgggtcatgccgccatcgatgcagatattttcccctgtgatgaatccggccttgtccgagcaaaggaaaagcaccatctgggcgatgtcctgaggcgttcccacccgccccgcagggtgctgcttctcatcggccccgaagaactgggagccggtggtgtcgatccaaccgggggagatggagttgacccgggctttgtcccgcaggctcaccgccaaggcatgggtgagggcggcgattccccctttggcggcggtatagctttcggtgaaaggctggctcatccggtcccggctggaggagatgttaacaatgctggccccttctccaaaataggggagcagcagttgggtcagataaaaaggcgccgccacccccacctgaagagcctgattgaattgctcccaggtgcaggtatcgatgcccaggaacaggggttttgcattgttcaccagaaaatccacccggccataggtctgaatgaccttttgggcgaaccgctccaaatcttccttttttcccacatccccctggaaaaagtcgttttccagcagatcgatggtgcagaccctggccccctgttttgcaaactcctcacaaatgcaccggccaatgccctgggcgccgccggtgaccacggctactttgtcctgaaacatagctattcctccatttggatggccaccttaatgaccccgtcttcccggttttcaaacacctcataggccttttcaatctcccgcaaggggaaagtgtgagtgatcagcggccgggtgtccagtttgccctctgcgatcagctggagaatatcatccacatggcagccatccactccgccggtctggaaggtgaggtttttgccgtacatctccggcaagggcagtacctggggagcatcatacagcgccaccaccgtcaccactccattgggacgggcacatttccaggacagctggaaactgtcctccgtcccggccacttccagcacccgtccggcgccgccgtggggagtatgagccttcacaaattcttcggcctcctctggcgccacggtgagcacctggggatagcgctcttccacgaactttcgccgctggggatctttttcgcacaccatcaccactcccggctgatgcagcagcacgcattgcaaggtgcacagcccggtggggcctgcgccgatgatgagtaccgactcccccggttcgattccggcgatatcggcagcccaataaccggtggccagcagatctcccgccagcaaagcctgctcatcggacaccccctggggaatatggctcagcccttgatctccatagggtacccgcacatattccccctggccgccgtcgatgcggcagcccaatgcccatcccccctggggatcggtgcagttattcacatacccctgacggcagaagaagcattttccgcagaaagtctccacattgacggccacccggtcaccgggagcaaatttctgcaccttctcccccacttcttccacaacgcccaccatttcatggcccaccgtcaccccaggcaccgcccgaggcaccgaaccatgcttgatgtgcagatcgctggtgcagatgctggccaaagtcacccgcaccaccacatcctccggcccttccacatggggccggggcttttccaggagggcaaatcggccctgttccacataagtataggccaacatatccatttctccttttcgcccatatgtcaaaagcccggccccttcccagggaccgggccttgcatttcgaaaaagtggcccggccactttttcgagagtttgcaaggggctgtgtgcacgccttcggcgcacacttgccccttgataggtgcaaaaagccacgcacaggtcgcagctttttgcagattgatgaggatcagggcaaacaacccttttcctgtatcggttcgtccacagtgtgatcccggccccttcccagggaccgggccttgtgccgttttgtcttacatcatctgccgccgccaggacaggttcatggtgccgtcctgcatcaccgacagattgtccaaagttttgccagtgcccagagccacacaggagatggcgtcgtcggccacacgggtggcaatgccggtcttggattcgatcagcttgtcaaagccatagatcaggctgccgccgccggtcatgacaatgccgtttgtggcaatgtcgcccaccagctcaggagcggtgcgctccagcacgaaatgtaccgcctccacaatcttggtggacacctcttcaaaggcctccagcaattcggtggaagtgacggtgaacacccggggcaggccagtcatcaggcagcgtcccttgacctccatgctcacttcctcttcccggggatagacacagccaatggtcattttcagctcttctgctgtgcgctcaccgatgagcacattgtgcttgcggcgcacatatttgacgatggcatcgtcgaacttatcgccggccaccttgatggaagtgctttccaccatgccgcccagggaaataaccgccacatcggtggtaccgccgccgatgtccacgatcatattgccgtcgggcttggaaatctcaatgccggcgccgatggccgcagccacaggctcctcgatgagatagaccttccgggcaccggcctgggtgccggcgtcgatgacggcacgctcttccacctcagtgatgatggaaggcacacagatgaccacattgggcttgaacagacggaagcccagcaccttatggatgaattccttgatcattttctccgtcatttcataatcggagatcacgccgtcccgcaggggacgcacagcaatgatgttgcccggtgtacggcccagcattttctgggcatcctcaccgatggccaggatcttgccggtggacttgtccaccgccacaacagaaggctcgcacaaaacgatgcccttaccttttacataaaccagtacggaagccgtacccagatcaattccgatatcgcctgctgacatatctttcccgctccatttctccggccgcctgctttcagggcccgtccccgctgccgggtggggtctgggcgcccatttctccaaatcttcacacaaaaccacagttggtttgttctttccatagctctttttattatacccaaccagaatcatgttttcaacacattcttttgatttctttgtcgaaaaaacgcccaaaagggtatgcacccagctcattgtttctaaaattttaacatgctatgataaaaatgaaaatggacgcgtccttttcatattttctcaaggaggtacagatcatgcaacagtggaaaaagtctatgttggaagtccaatcctggggcaccggtccgcag

SEQ ID NO: 2920 - DNA, 3099 bp, Unknown
  16S sequences of unknown bacteria
acggcaataaataccgtacccgccgcgccgaaaatattaccgaataatattttacatacttaaaacgccgccgtcaatagttttttaaaaatttaatttactttttcaatatagccgcttataggctcggtatacatattatcgtccgttacgggcttaaaacgtttgccgtcgtaaacatcggtaaagccgtttgtcgctgtgtaaacctcgtttgtctcggtatcataaacgcgctcatagccgagggtcgagtcgctctgcttttggctcataatatcctgacttttattgcggctctcccacgaggacataaagccgtccatagtctgattaaagttctggcttatctgctttgaaagcacaagcttttcattgcttgcctgatttgttgcgtttacaaagctttccgaataatcaagcgttttcatacactcggtaagcacgctttcccagtctataaagatgtcctttgcggcggcaggtcttgattctttactgccgcaacccgcacacccgcaaagcaggatgaaagcaatcaaaatagccgccaaaccccgcattttaaattctgaaattattctcatttttctctcctcacgggaaaaattttcttataaagattttagcatatatatcatatcaacaaataaataatttccgttatggcatttgccggaatggaaatttttacactttattttttgacggttttgttgtataatataaaaaaacattacggatgtgaaaatatgagattttgcgacaggcttaacgagtatatagaaacgcttgactgcactgtcaaggaattaagtgagctttcagatatatctgcggcgactgtgagccgttaccgatcgggagagcggctgcccgatgccgaaagcgagcttgactttttaaaggcgaccgtgctttcaaaatcaaaggatgatgttacgctttacagcgatatgcccatgaccgaaatgccgaagcgcgattgaaaatttcattccgccggtaatcgagtaaaaatcggcttgatatatttaaaacaaaagaacggagaaatattatgtataaaaatattgaaaaagaaaaagttataaatcttaaagatcttgtggattacagcgagggtcaggtggtaagcaaaacgcttgtgcagaacgagcttgtgagcatgaccgttttttcgtttgataagggtgaggaaatttcatcgcattcggcaggcggcgacgcgatggtgaccgtgctcgacggaaagggaagatttaccgtcggcgggaaggaatatgttttgtccgaaggggagacccttattatgccgaagggaataccgcacgcagtgttcgggcttgaaagattcaaaatgcagcttaccgtatcgttttaagaaatccgttatataatgacggttacaagtacacagcgtggaatcgtcgaataatcggcgattccacgctgtgtacttactttattgtaaaaacacacaaggttttttgtgagttttcacaatttaccaaaaaatattaaaatttttcttgactttttaaatgggataggttattataattagcaagtaatactatgtcggagtaacaatgaggagtatttttgtcgaaaattacaagaatgcgtcggacgaagaaatcgtcgcgcaaatatgcggcggagactatgagcttctgcccgtaattttcggtcggtacgataagcgaatacgctattatgcggataaatactgccgcgaaagcgaccgcgaggacgcagcgcaggaggcaagccttgcgctttattccgcagtgaagaattacgataaagataaatcctcgttttcctcctttgcctcactttgtataaagcactcggttattgattgcgcaaaacgggcgggcagaaagaaaaacattcccgaggagctgcttgagccgatagaggatgtaagcattcccgattgcaacagtccggaaaagattttctttgataaagaggcttataaagcgcttacgcacagtataaagcttgaattatcgggaatggagcttgcggttttgcagcttttcctttcggggaaaaaatacatagatattgcggacgagttgggtgtttccgaaaaatcggtaaataacgcgcttatgagaatccgcaggaagcttaaggataaacagggaaattgattcctttttattaatatgcccatgtagcttaaagcagagcgttgaaaccaaagatgtcggtgcgattccgtccggggctaaattttatcatcagagaggtagaaaacatgtttgaagacaagacgttagtttgcaaggagtgcggtgaggaattcgtatttactgcaagggaacaggagttttacgaatccaaaggctttgtaaacgaaccgcagcgctgcaagccctgccgcgataagcgtaagaatgccggcagagctcccagagaaatgcatgatgcagtatgtgctgcctgtggcggcgttgctaaagtgccgttcatcccgagggatgatcgcccggtatattgcagcgagtgctttgcaaaaatgaaggaagaagaaaacggcggagctgcagagaccgcagagtaataattctttggtgcgcgtgtcgaaaaatcgccacgctctcctacgggaatgccgttcgctcgaaaattacggattttcggaccgcactccctactcttgcggaacatacagaaaataattgctcggcgcgcgaattttctttgaccgcggcgccataacgccctccttttatccgccgcaggcggcagtcggttgttatgctccgtggttactcaccccggtgccctcctgaaaccgattattcagcggtttttcgcttacaaggtgtttttccgctgcacaggcatggaaaaaatgaaaaatgcggagttaccgctgcaaaaacaaattttggggttcatcgacagactgatgacgaatcgccgaaaggcgattcgtttttttatacctgcagtgcttgcagagtatgatgacatttaatttaaaataaagttacaattattcatattttcgtaatataaatattatattattatctttaaataagtgtagtgtccgaaaaggattgctgtcgggct

SEQ ID NO: 2921 - DNA, 2255 bp, Unknown
  16S sequences of unknown bacteria
gtcaatgcatgctatacggcactgatgtctgtaaaatatatctggaaaggcattcagacactctggcatcggaaaattgaggtgcctgtgctcgatgcaactgcaatcggcgtctctgtcgcacgcggtgatatgggaacggctggctccattatgttcctgctcggtatcggtgaactgctggaggagtggacgcataagaagtcggtaggtgatctggctagaacaatgtccttaaatgtcggaagtgtctgggtaaagaaggacggccaggagctgctcgtgtcgtgcgatcaggtacaggccggtgatgaggttgtcgtacatatgggtacggtgatcccgtttgacggtaccgtcacagcaggcgaggcaatggttaatcaggcatctctgaccggagaatcagttccggtacgcaagggagaaggaagcaccgcttatgcgggtacggctgtcgaagaaggtgaaatcaccgtccttgtgaagtctgtcggtggctccagccgctatgagaagatcgtaaaaatgattgaggaatctgagaagctgaagtccggccttgagagcaaggccgagcatctggcagaccgcctcgttccatacacccttgcaggtacgggactgacttacctgattacgcgaaacacgacgaaagcgctagcggtgctcatggtcgatttctcctgtgccctgaagctggcgatgccaatttcggtgctatctgcgatccgtgaggcgaacacacataagatgaccgtcaaaggtggaaaatatctggagtctgttgctgatgcaaagacgattgtatttgataagaccggtacactgacagaggcgaagccgacggttgcagacgtcgtatcatttaatggaatgagcccggatgaactgctccgcattgcagcctgcctggaggagcatttcccgcactcaatggcgaaggccgtcgtcaatgcggcaaaagagcgtcatctggatcacgaggaaatgcattccaaggtgcagtatatcgtcgcacatggcatttccacgacgatcaatggaaaaaaggcgattattggaagccatcatttcgtatttgaggatgaacagtgcacgatcccgacaggtatggaggagcggtttgcagccttaccggaggaatattcccacctgtatctcgcattggaaggacagctggctgcggtcatctgcatcgaggatccgctgaggacagaagcggcagaggtcgtaaagcagctgaaggaatgcggttttgagaaaatcgtcatgatgaccggtgacagtgaccgaaccgcaaaggcgatcgcacgcaaggtcggtgtcgatgaatattattccgaggtacttccggaggataaggcgaactttgtcgagcaggaaaagcagaaaggccgcaaggtcatcatgatcggtgacggcatcaacgattctccggcgctttctgctgcggatgtcggcattgccatcagcgacggtgcagagattgcacgcgagatcgcagatatcacgatcggtgcagatgaccttcaggagattgtggcgctgcggatgctgagtgcggcactgatgaagcgcatccactggaactaccgttttatcgtcggcttcaattctggcctgatcggacttggcgtggcaggtatacttcagccgacgacctcggcattgctgcacaatacgtcaaccctgatgattggactgaagagcatgcagaatttgctgtaacactggaaaatttgattgtcgatttctgtacagccttgtaaaacggataaatgtaatttgctttataatcctctgccgcaactgtggcaggggattttttaatgaaaaatgttctcaattaaaacacttttcttttcattttcacgtgctataatacaagcgtgttagataattcgaatgacagtacggcaacactatagccgcagaaaggaaaggcaggagcaggtatgggtagatattatcgtttatcaaaaaaagtgaccgaagaacaggcagctgagattttgcgggaattaaaggaacgcgacgatattaaacgtgcgattatcacagacgaacgggatacaatgatcgtggaaacaatcgatggagagtatttcaatgtgatgtatgccgctgtcaatatctgtagccggatcgcgggctgtgagctgtcattcatgcattttgatacggaaggacttgcttcctgatgatgggaacaaaaaagaaagaggacacagaattatgacacagattacatt

SEQ ID NO: 2922 - DNA, 7896 bp, Unknown
  16S sequences of unknown bacteria
gatgtggaccccatcaaatataatttgttttttgagcgctttttgaatccggagcgcatcaccatgccggatatagacgttgacttctgctatgaacgccggcaggaggtcatagattatgtcatcgaaaaatatgggaaagaccacgtatgccagatcattacctttggaacgatggcagcgcgtgcagttatccgcgacgtagggcgggtgatgcgtatcccctatgcggatgtagaccgcatcgccaaggcggtgccgatggaattgggcatcaccatcgacagggcggtggaaatttcccaaccgctgcggagggagatggaagcagacgaaaccattgcccagctcattgcaacagcccgaaaattagaggggatgccgcggcatgccggcacgcacgctgctgcagtggtgatttccaaagatcctttgatgaatatcattccgctgcaaaaaaatgatgagacggttaccacgcagtttaccatgggggccatcgaggaacttggccttttgaagatggactttttgggcctgcgtaacttgaaggtcatccaagacgcttgtaaccttgtggaaaagagcacgggcaaaccactggatatggaaaagatcgctctggatgatcctctcgtatatcagatgatcggcgaaggggataccgatggcgtatttcagctggaaagcggcggtatgcgcgaactgcttaaagaattaaagcctaattgctttgaagatatcatcgcttgcatttctctgtaccggccaggcccgatggaaagcatcccgcgctatatccaagggaaaagagatcctagcagcgtcaagtatttggacaagcgattggcacccattttacaggtaacttacggctgcatggtgtatcaagagcaggttatgcagattgtccgtgagctggcgggatatagctgggcgcgtagcgacctggttcggcgtgctatgagcaagaaaaaacgcgatgtaatggccaaagaacggcaggcgtttatctatggtacggaggacggtacagtgccgggcgcagtgaaaaacggcgtgccggaagaggtggccagccaaatttttgaccaaatgacggattttgcgcagtatgccttcaacaaatcccatgcggcggcctatggcatcgtatcctatcggacagcgtggctgaaagcgcattatcctgtggaaaccatggccgcgctgatgaacagttgtctgcaaagcccggaaaaaatcgcacagtatattgcctactgccgaaagaaaggcatagaggtgttgccgccggatgtaaacggtagcggcgtgcgttttgaggtgcaggatggcaaaatccgctttggtttgtccgcagtaaaaaatgtaggggccaaagctgtagagctgatcatccaggaacgggcgcataagccgtatgaggacttcttctcctttttgcggcgggtgcctgcggatgcgctgaacaagcgcatggtggaaagcatgatcaaagcgggctgttttgacagcttccatgtaaagcgtagccagcttatggcggtgtttgaaagcaccatggatgctatggcgcatgatagaaaacgtaacctggaagggcaggtttccctgtttgaagggctgttgggcgaaaatgtaccgtcgcttgtgcctgtacaggaactaccggatcttgcggagtttgatacccgtgctatgctggcgatggaaaaggagatgacgggggtatacatcaccgggcatcctatgatggagtatgaaaagtatatggagcaatatccagtgaatctccttaccattttggaaagccgagaagaaggcctatcattggatggtaaggaggtaacgcttccctgtatcatacaatccagacgaaaccggacgaccaaaacaaaccggctgatggccaatctggttatagaggatctatatgctcagatgaatgccatggtattccctggcgttgtggagcggctcaattttgtcttgcagcccgatgcgctggtattgctcaaaggcagggtcagcatacgagaagaggaggatcccatgctgctcgtagacgatgccaagccatgggaacctgaaaaacagcaaaatgcggagcaggaacggccgcacttgatcaacggacgcgacctgccgttgtacggggtacaaagcgagccaaagccagcgcaaacgcaaaaggacagtcagcaagaaacgctttggctaaaggtaaaaacctttgacaacgattttatgatcacagggctattggccatgctgcggcgtttcccgggtacagtaggtgtgaaggtatatgcagcgaaggaaaagcgcttggttaaactgcatgacaccgtctccatcgatccggaattgatggcaaagctgaccctgctcttggacgagggaaatgtaaaaatcaccaaaaaatagaccgtttggtatgctataataaaatcacgaaaatggggctcgggggcgctccattgggcttgagcggaaggagtataaatcatgaaaagaattggtgtactttccagcggcggcgatacgcctggcatgaatgcggcgatccgcgctgtggtaaaagtggcggctgaatatggcattgaagtatttggcatccgtcacggatataggggcttgattgaaggagatatgcgcgagcttacaacagacgaggtgcgcaacattgcccataaaggcggtacgattttaaaaactgcccgctgtaaggaatttatggtagaggaagggcagcgccgcgcactgttgactgctcaggcgtttgatttggaaggcatcatcgccatcgggggcgacggtaccatgcatggcgccggtgcgctcagtaagatgggcattcccaccattacactgccaggtacaatagacaacgacttggcatataccgactttagtatcggcttcgatacggcggtaaacggcgtgctcacagagctgatcaaggtacgcgataccatggtttcgcatgaccggatcggcattgtagaggtaatgggcaacaaatgcggagacattgccttgcacgcaggcgtggcaggctcggccgactttatcttgctgccggaaatggaatttgatatcgatgtaatttgcgatcagctgattaaaaataacattcgtaaccgcaagaccagtatgatcgtgctggcagagggcgcgggcaagggagacaagctggctgggtatatccgggaaaagaccaagctggaagtgaaaagcgttgtattgggctatacgcagcgcggcggcagcccaacagggaaagaccgcatcctggctacgcggctaggggggcaggctgtctcccttttggcacagggcgtcagcaaccgcgccgtaggcatccatgataacaaggtgcagaatatggatatttacgaagcgttggatgcggaaaaacaatttgattcggagctttatacgctggggaaaatcatggcgcgctgagttgatgcaagagcggaacgttttcgttccgcccttttcttatgggctgggaagttttttcatgccagctgcatatggatgtgataaaataccagcagaatgatgcaatcaaaacaaagggagtgttttgtatggcttggtttggatgggtcgtcgtggctctggtgtttgtgctcagtttttttgttggcaaagggctttcgctaaaaaaagcggcgccggcgccaaaagcaaagcctgtagcggtagacccgcagctggcagcagagcatctggcaggggctttgcgctgcaagacctatggcctcgtaacggaagacagcgaaaacatcaaagaattcgaaaagctgcaagcgcatcttagggcttgttttccgcatgtgttccaaacggtgacgacagaggaagtgaaccggtgtagcagattatactgctggaagggggacggcgcctcccaaaaacctccgattttgttgatggcgcatcaggatgtggtgccgattgcagagggaacagaacaggattggaaatatccgccttttgacggccgcatcgaggagggctgcgtctggggacgtggcgccatcgatatgaaaaacgccttggtggccatctttgaagcgatggaggcactcatcaaggcggggtttgtgccggatcgcgacgtatacatctgcaacggccatgatgaagagctgatgctggataagggctcgaaaggcgtagcggcgctatgcaaggaaaaaggactgcattttgaatttgtactcgatgaaggcagcagctttgtcgatggtgagcagtttggactgcccggccagctttgtgcgtgcattggcgtatatgaaaaggggtattgcgatgtgcgcgtcaccttgcacgatcaggccgggcacagcagtaagcctgcgcatcccacggcgttgtccaggatggcaaaaatcattgaaacggtggaaagccgtccgttcccggtacgccccacgcgcattttttacgaaatgtaccgcgatgcggcgccgtacgggggcctttggggacggatcaaggcggccaacccaagcatattcgggcggggatttgtcaaccaacagctgaaaagcctgcaaggcaacgcgtcgctgcgcaccacggtggctgcaacacagattcaggcaagcgatacgcccaatgtgctgccccataccgtatgggccaatttcaactgccggcttaatccaggagatacccggcaggagctggtagagtttttccaggagattgcagggccggattgcgaagtgaccttgcccacctcctttgaggcaagcaagattgcccgcacaaattcacgggcttaccaggccatttcccaggctgtacggcaggtttacggagagatccccgttgttccctctgtcttttttgccagtacggacagccagtatttcaacgaccttgctgacaatgtatataaacacatgccgtttatcagcaatttgaaatatacgacaacgatgcacgccaccaatgagcgtatcgatgtagagagctttgcacagggcatacagttttacgcgcagctgctgcaaaatgtatgcagccaaaccgggcaggcaggctaagagtggagggcaaaaatcatggaaaagcagattcagattcccggccaagcagagatcgcagcgcatttgtctgggatgattccttttgagaccattgcataccgcgatcagtcgaagaccaaaggcgaacctttttttgccttgcatgcttatttggaaaagacctatcctttggtgcatgaaaacatggaaaaacaagtgatcggcgattattctcttttgttttgctggaaagggcgtaacagagagaaaaggccgattctgttgatggcgcatcaggatgtagtgcctgtgccgtctgaaacgttggatcagtggaaatatccaccgtttgaaggcgtactggcagagggtaaggtttggggacgcggctctctggactgtaaaaatatgctctgctgcgaactagaagcggcggaagcgttgctaaaacaaggctatgtgccggagcgagatatttactttgcttttggccatgatgaagaaagcggtggattcaacggaatgacggccgttgcggcctatctaaaggaaaagggcgtctttctggaatttgtcttggatgagggttcaggttatgtagagggggaaaagcgtcattgccctggccatacggttgctgaaatcggcatttttgaaaagggatatgcagatttaaagctgacagtgcagtctccgggcgggcatgcgtctagaccaggcccgtctaccgcattgggaatcttggcaaaagccatcaatgcgttagaggagaatcaatttccactatctgtacccgatccggtcaaatggcattatcaagcgctaataccttatcttgaagcgggagaggaaaaaaatcaggtagagcagatggaggaaaaccctgctgcgtttgcgcgatatctgagccagacacccaaaggcaatgcaatggtacggacgaccacagcaccaacgatggcaaatgccagcattcggcccaacgtactgccgacacaggcacaggcagttgtaaattttaggctcaacccagatacctcctgcaaagcattgctggcgcactgccaaaaagcaattggcaatcccaaagtgtcgttgacactgctaagaggggaagagccttccaaaatcacatcggtggaggggaaagcgtataaggccctatgcaatgtcatacagcaggttcatcccggttgcatcacagcgccggtgcctgttttgggggcaacggacagccgcaagtttgaggggatctgtgatgatatctttcgttttacgccgctggacaatcagggcttgggctatacggtgcatggcgtcaacgaagcgatgcccatcgaatcactggaagaaggggttcgtttctttgttgcgatgattcaacagatgtgttaaaatttcaacctgtttttgcaaaggtgaaggaattgtaagaaaacggaattttgttgaaattgatgttcttttcatatacaataaaagaaattcactcctgtgaattagggaaattatggaggagaagaccatgagagattacatcattgcaacggattcggactccgaattgttgtttgcgtatgctcaagaaatgcaaattcctgtgtttgctatgcctgtgagcctggatggcaaggactacgattttgatttggatattgaaggaaagtttcctactttttttgaggacttaaagaacggcgcaaaggtttctacatcggccaaatcaccgtgggagatcaagcaatggtttttgcagctgttggaatctggcaaagatattttatatatcagcttttccaaccagctgagcgtgcactttagcaactgccagcaggcggtggcggagatcaaagaggaaaaaccggaagcacggattgtgttggtggattcattgaccatctctgccgggcaatcgttgctgattcgccgggccttaaagctgcaacaggacggtaagagcctggatgaagtggcggcgtatctagaggagaacaagctgcgcagctgcgttttgttcaccgtagacgatctgaactacttaaagcggggcggccgtttgtccggaggcgctgcctttgtggggacggtattggatctaaagcccatcgtacatgtaacggatgatggcaagctggtacctacggaaaaatgcaagggccgtaaaaaaacttggcgtcgcatggcggagcttgctgcgaatcgttttgattatggcgatcctgataacgagatcattatcttgtatgcagagctggaggatggcaaagcatttgaggagatcttaaagcagacctgtggcgacgtaaagacaatgctgtggaaggtgggcccggtcatcggtgggcatgcaggccctggcgtggtcggaatgtcgttttttggcagccccagataacaaaggaaaaagccggcacaaggtgccggcttttttatggacatgcagcgcaagatttacaccggcctgccaaatatgtataaaaagaacagatatgcaaaggaaagcggaagatttgtatgtagcgttttatcgaagataccggcccaggcttttttcagaggttattggccaggaaccgatcatccaaaccttgaagaaccaggtagcttcgggccatgtttcccatgcctatctattttgtggctccagggggacagggaagaccagcacggctaagattttggctagggccatcaactgccaatcgccgatagaaggagagccctgcggccagtgcccagtatgccgcatgtcggaagaggagcttgcggtagatattttggagatcgatgcggccagcaacaatggtgtggatgagattcgcgatcttagggaaaaggt

SEQ ID NO: 2923 - DNA, 8046 bp, Unknown
  16S sequences of unknown bacteria
ggatacccgcttcatcgttgaagccactggcctgctcatgcgctgctgcccggtgggataaccctctttcccggagccatggattccggacatttttccaaaaacgcaaaagcccgtactgtcacaaaagacagcacgggcttttttcatgagctgacataccgggcgaaccggctcacccctccagttccagatcaaagccgcagctttccccggtgacttcaatggaggccacccggctctgttttgcgatggttccggcattcacccagtaagtccccgccgggacctgggtcaggtacagcacaccggacgcatcggtaaaaccggtgtaggaatccagggagagtcctccgtagacatcaaagttcttctggtctgcgttctgaagctccacaaacatattggcggctggctccccgttccgggtcagtcgcaggcacaccctgccctcggtttccgcgtagccggcatagaggttgggctggtcgatctgcagcttaaaggccgggactgtgttctcccaggtgagggtgacccattgggtggaatcggtctgggttccgtccgctgcccgctgggtcacccggacttccagcttccggggcaggccttccgccgcctgagcccctgacccatccaaagcaatcaggccggcccgggctgtccctgtcccatcgatccgcaccgcaaagtattcactggggctgtaatcggttccattctcggcattctgctgggcattccagcggtactcctcctcggtggtaaagcccagacgggcattctgcaccgggctgccgttggggtccaccacctcaaagcgaatgatcccctccgggtaccggctctggtattccacagcggtatgctccggggcgtggaattccagctggtattccggctcctcagaaccgattcccacatccagcgcaactttgccggtttcgctttccgccgtccgggctggctcttccggtaccggcgcttgggcctccggggactggtgctctgaaaatgcagagccaaacagcaggcagattgccaggaaaactgcggtgctcatggtcgaattccctctttctgttccgatgttccggcttctgccgggaaatttctgtcagtttcagtttaatgctttcactgcgaaaagcaacagcccgggttatgctgtccgggcagaacttccgaataaaacgaaaaggggcggacagctgtccgccccttggatgattctgaccgggaaactcagttgttttcgccgttgaggaagtcccaggccacctgacagtgcagagctacgccggtggggaagctgtcctcgtcaaagactacatagtcgctgtggttgggatattctccgccggcacccagacgggcaaaggcagcctttgccagaacggtgtactcggagaagtcctcgccgcccatgccgggctgagcctgcaggacctgagccggatcgctgacaaccttaccggcagccttgcgcaccagatcgatggcatcggggtcattgaccagcacttcggtgagcatatcatattccacctcagcctcacagcggtaggcagcggcggtgttcttggcaacacgctccacaatgccgggcagctgatggtgcagatccacatcgtagctgcggatggtgccttccagcacagcctcaccggatacgatgttgaaacggctgcccgaatgcaggctgcccaccgttacaaccagctgggtagcagctgcaacttcccggctgacaatgggctgcaggttcatgaccagggccgcggccgcaacagtggcgtcgataccggcttccggacgggcgccatggctggccttaccggttaccttgatggtgaagcggtcagcggcagccgcactggcgcctgccatcatggcaacgctgcccacatccatctgggaaccgatatggatgccgaagatgaagtccacgccgtccagaccgtgctgctgaattacagccttggcgcctctgccgatctcctccgcgggctggaacagcagcttgacagtaccgcacagctgatccttgacctgcatcagcaccttggcggcgcccaccagcatggcggcatgggtatcatgtccgcaggcatgcatgaatccgtcattcttggaggcaaagggaagcccggtcttttccgtgatgctcagcgcgtcaatatccgcacgcagcgcgatggtcttgcccggtttgccgcccttgatctccgcaatcagtccggtcggctcgaaccggcgatagggaatccccagtttgtccatttccttagcgatctgctctgtggtacggaactcctggaagctcgcctccggatgctcgtgaagatcccggcgaaatgccactacttccggctgtacagcctctgccattgctctaaaatccatatcaaaccctccctggtcttgttgactgcggaaaacaggtatctgctgtttccttgtaaaaatattgcatttattgtagcacggtaaagcgagaaagtcaacggaaaatattcgccggatgcgatgttttcttccgtcttcctgtccggcggcatacagaaagagccgccttccggcagacattcctgcagatttccgtctatggcgcttcacgcctcacagagcagatgatccagttcggcccggtatccacgctgccagacctcgaagatcagataggacagcactccgaacagaacgctgggccagtaagaagctgtcccggatatgcccagctccagcagcaaaaataccggagagaccatcgcaaaagtccggagctgatccagcccatcctggcgctggacccggagatcctcgatcccctcgcccatatcctccagcggagcggtgctcagttcccggatcttatcctgccaggtccagaccaggccaaactgggtcttgggctgcaggaaggtgaggacaaaccccatcaggagcatgcctcccacctctgctttggggccggaggaaaacacaccgtttatatagagcaccagtgccagtgccgaaaacagctccaccagaatcaccgccttcatcggtccgagcttccggcgcagagccatcagcccattctgaagattctctctcatattgcccctcctgtcgtccggcatccttaccgccgcctgccctggtttatgagaataccccggacagtgtgctgaatgcctctttctccaccagataccagacggagtcatgcttcatcagtccggctccatcctgagtctggctgctgaatatataggaattgccttccccgaagctcacctcgatggtttcgcctcccgtatccggggtgaactcgccctccagcggacgggcatccgcaatccagccccggatctgctcctggagcgctgtatcccagaccacccgctcgctggcacggtacaggctggactttttcagcacgatctgttctgcgcccgaggtctgcgccgcatctgccccttccggtacagccggcagcgcaggaatcactgcgtccgcccatgtgctcagcccggcgccgcactggtacagaaccccgtccttggcaatgtaatccgcatcgctttcccggtagagctggtagcggtgttcaccgccgtccatgctgtacaccagcaggatctccaccggctgggcatcgctgggaatggcctgatcactgggaaccacgctctgcagctctgccgcgaattgcgccgccttctgcccgtcggagatgacaaccatttcggctgcaatggcattccgggccgttacattgacctgcaccggttccgcttccgccgatgtgacaggccggaggctcaccgtccggggctggctggaaacaggttcttccggctcaaccgcttcctccggctgggaatcttcggagggctgctccacgctctctgaagaaggttccatcacctgggagctctcctcccgggagccggacacctcctccccgttccgggaacaggcggtcatcatcagcaggcagctgacgcacagaatccctgcaatccatctttcatcggatcttctcctcctcactgatataaaggctgcgatatgttaacccgcaatattctggatgggcatcccgccggtttcatcaatctccagaatatgccgctcactctccccgccgatctgcacaatcagccagttgctgttcagtgtaacgctccacagccggctgccgctctggtcgaatgccgccacattggtggctccgcctgtggcagggttccccagctccgccatcacggcaggagaaagcccctccagtgtatcgaggacagtgttgacctcctcttcggtcagatcccgctcggtattcattgtggaaaccagcagccgggcaatggaatcccggcccgcaatggcctgattccaggcttccagatccgcttcggttcccagcacttcggtgccggttccaaagatgctgccgtcattcatcacaacggccccggtgatcccctctgccgccggttcgtctgcggacggtgcctgcgaagcggcatcgggcacactggaggacggcagatccccggcagaggcggcatcgccctccgaagatccgtcctcagaggcgggctcttctgcctcagacgaggattccggctcctccgcctgactggactgggaggagttctgtggattctcctcttcggtctgcgaactgcatcctgtgaatgcggcgctgagcaccagaacggaaaccagcaccaatgccatgattctcttcttcatacaaatcttcctcccatttatctgtgtccatgaatttcaaataggtctttatatatttcatacactaaatcgataaaaactacaaccgggaagcctcaattccaccctgggaatctcaggcaaatccgtcccattttatgggaattttccacaatattttcgctccggacatataaaaatgacctgccgcatgtgtaaaacctcacatacagcaggccgcaaatctattgacttctacaaaattctggctttatgcaaattcctcccgccgccgggcccggaagccgcaaaacagctcgcgacccgacattccgcctgtattcccgggatcactcccctggctcctccggcgcaaggatctcgagctccagaactgtatccagggcgatccggctgccgtcctccagcaccagacagcgggcataggtatcgatctgccgaagccgtccctgtgccacctcataccgtccgccctccttctggctgtcggcccgaaaccaggtgacggcaacctccggatgctctgccaggcgctcggtcagcaggctctgcttctgatccagcagggctttggcgtcctcgctcagttcaatctgccggtcggtcagacgggcggtttcggagatggctgctccatgcccggtgagtgccgcaaagggggaaaactgcgccgcccggtctgccatggacatccgcggatgcctggatgaagtaggatgcggcagatggatcatatcatcgtattttccgttcactgctgatgtcctccgatctgctggttccgctccttggcggtggcgccctcctccagattcatggccttcaggatggcgttcttcccatatttcttcttgatgcccagcatggcctcctggagttttttctcccgggcgtgggcagcatcctgttcagcccgctgctgctcctgtgccgcatagtcggtgaacagatccagctgttccggctgctgacgctgccgggctgtgacttcgtccaccagatggttggcgctgatgctcagccgccggaccagcagagccgggtccatgatccggtcatagagcgcactcaccgcctccatcagatcatgggccgaggaggaatactgtcccagattggctgtgccatgggcatgcttgggaatcctgcgtccgtagcggtcggtggtcaccgggccggtatagtgcttccggcgctccggatcggtgaggttttcaatgtcataccccacggtgagcaccagctgatcggtgagcagccccttgtccaccagatccagcgccagagaatctgccatctcccgcaccaccagccgggcctgctcaaaggtgtagggattctgcagcacctgtcccgaaaccacactcttgttttccggcttgtaggctttgacatccgctatggtacagggctcccagccccaggcatggtcgatgagcagctccgcattgacgccgaacagcttatagagcagttcctcattataatagtctccggctccgcccagcgaacaccgggcaatatcccccatggtaaaaagcccatgggattccagcttggaggcatagccccgtcccacccgccagaaatcggtcaggggacggtggtcccagagcagacggcgatagctcatttcatccagctcggcaatccgcaccccgtattcatctgccgggacatgcttagcttcgatgtccatagcgatcttggcgagatagagattggttccgattcccgccgccgcagtgatgccggtggttttgagaatatccagaatgatggtccgggccagctgccgcccggtcatttgaaaggcttccagataactggtggcgtcaatgaacacctcatcaatggaatagacatggatgtcctccggagccgcgtatttgagatagacctgatagatccgggtgctccacgcgatgtagtgggccatccgtggcggtgcgacaatgtaatccagcgccagttccggggactgccggagatccgggtcatgccaggaggaaccggtgagctggtgtccgggagcctgccatttccgctgggtattcacttcccggaccttctccaccacctcaaacagccgggcccgccctgagatgccataggctttcagggacggcgatactgccagacagatggtcttttctgtccggcgctggtctgccaccaccagattggtcgtcatggggtcgagcccccgctccacacactccaccgaggcatagaagctcttgagatcacagcagatatagcacttttccattatgccccggcctcctttcacgattggggttatggctgcggtcagtcagctgtcagtgtgcggagcagcccctcgcagccctcgagaatatccgtccaggctgtatcgaaatcccccgagtaccaggggtcggcaacctctcccggacggctggtataatccatgagcaggtggattttgccgtcggggtcaccgccgcagatctgctgcatccggcgcaggttcgcccgatccatcccgatgagcagatcccagcggctgtaatcctcccaccgcagctgccggactgttttgccggaacagctgatcccatgctctgccagcttgcgctgtgccggcgggtagaccgggttcccgatctcctcggtactggttgcggcagatgctatttcgaactggctggaaagtccggccttctgcgccaggtctttcattataaactcagccatcgggctgcggcatatattgccgtggcacacaaaaagtatttttaccatctcttatatatcccttcataagcctgtaaaccattgttatgactggttttcggcgctgtttcttttctttgcagcagctgtgctgtccatataattctgtgcattttcgtgggcaagatgtgcccggggacagcttgagatcctgccgcactgttttttaacgcactgcccagaggaataaaccgtttctctgctcctctcctgcccgcaggaatcttttcctatggtattgcgcttttcagacactgccagactccgttccacagtggaaggagccttgatatccactttgattgtaccatattcaagcagcctttcgcactacaaatttcagagggaatgcacttgaccggtgaaccggctcaacaggcagccttgtctattctgccggaaacagatgcaaaaaagcagcaagtctggaaagactcgctgcttttaccggctgtattgacaggcgttttaccagtcgctgagctgactgccttttatgggaccggggcacctgggttccaaaaaaggcagtca

SEQ ID NO: 2924 - DNA, 6575 bp, Unknown
  16S sequences of unknown bacteria
tcatacggggatcggatgcagtgttggccctcaggcatcaactgtcagaattttgtccttgacaaagggaccatttcacaatgtcctgaaagtggacagctttttgaatcatcagatggatgtcatcttcttcaatgagatggccaaggaattcaagcgcctgtatgaaggcgtgccgatcaacaagatcctgaccattgaggcgagcgggatcggcattgccatcatggctggtctgcatctggaagtgccggtggtctttgccaaaaagtcacgttccagcaatatctcagatcaggtgtatcacacggtgattcattcctatacgcataacaatgacaatgatgtcgtggtcagcaaacagtatctgaatgagggtgatcatatcctgatcatcgatgacttcctggccaacggctgtgcgctggaagggctcatcgatctggtgcatcaggctaatgcgacagtggaaggcatcggcatcgcggtggaaaaaggattccaggaaggcggagaccggctgcgcaaggctggctaccgggtggaatcgctggccatcgtggacagcatggatccggaaacgggcgaaattacattccgcagcagtgaagactgactgcggatttctttttgtctgcggccttggcgtgtttgcgtatgttcctcaaccttggtataatgaatacagcgtagatatcagtgagatgcaaaagcatctggtttggatattgcggcctgtttcgaatggatataatatataaggaaagcagccgatggtggaaaagaaatgaaggtgatgcgatgaaacagggaaagaagtatgcgttgaatctgcttttgatcatcatcgtcaccgtattcgcggtatggtttgccttgaaggacaattatgaggaggtcctgcggctcatctcggaaatgccgtggtatttcctgttgatcatcatggcatggggcatcatctacacgctggtcatcggatggatctataaggtgctgggccggcggtatcggaaagactatcggttcattcacggcgcggtcatcgcgttcgtgggcagctttttttcgggcatcacgcccagcgccaccggtggtcagttcgcgcaggcctatatcctgaaaaagcaggggatcaagatcagcgacggcgcgtcgctgctgtgggcggacttcatcgtgtatcagaccacgatgatggtctatgtcacggtgctcttcttgcttaagtttggctattacagcgcgcagagcggctggttcaatctgatcctggtcggatatctgatcaacctggccgtcatcgcggcattgtatacgatggcgctgttccctaaagtgtatgtgaagctgagtgcagtcgtggtcaatctgctggcgaagctgcatctgatcaaagatcgcgaaaagacgcttgaggggtggaaccttcagcttgccagctttaccagcgagatcaagaaactgacgaaggacaaaaagatgatcgtcaagacgagcgccatcaatgtgctgcggatgacgctgcagttttctctgccctatttcatcgcattgatgatgggcatttcgctgcagccaggacagctgctggatgtgatcgcgctttccagctttgtcatgatggccaacagctttatcccgatcccgggcgccagcggcggcaccgaggtggtgttcacgctcatgttcagcggcatgctgggggcagggaccggtgcggtcatgatcctctggcggttctccacctatcatctggtgatgatcgtcggcgctgccgtattcgtgctggccaagcgctattatgacaggaaaaagctgaaagaagatgaaatcggcattcagaatgaggaggtgctgtgatgcggatcggtatttttacggatacatatacaccggatatcaacggggtcgtttcctcggtcgtgacgctgcagagaggactggaagcagccggccatgaggtatatatcgtgacgggacagaagaattctctgcatgcgcatcgggaaggcaatgtgatccgcatgcccggggtagagctgaaaaagctgtatggctatacgctgagcacgccttatcattttgaggtgaaaaaagaagtggaagacctgcatctggatgtcatccatgtccagcaggaattctccgtggggatcttcggacgcatactgggacataatctgcatatcccggtcgtctatacttatcatacgctgtatgaggactatacgcattatgtgaatttctttgatctgaacagtgtggaaaagatcagcaagaaggcggtctattcgctttcccgctatctgtgcaattcggtttccggcatcatcgcgcccagtgaaaagacgagggaaaagctgctgggctatggcgtgacgcgtccgatctatgtgatcccgaccggattggatctggacagctttgcgcatgaacgcgtatccggcgagctgtgcgcgcaggtgcgggagcgccatggcatccgcgcaaaagagcgcatcatcacttatctgggccggatcgcttcggaaaagagcatcgacatgatcgtcagcggcgctgcgctgatccgcaatcccgactgtcggatcatgatcgtgggcggcggcccttcgctggatgagctgaagcagcaggcgcagcgagaagggatcagcgaccgcatcatcttcaccggacctgttccgcctcaggaagttcctgcatattatgccatcagcgaggcattcgtcagcgcgtctacctctgagacgcagggcatgacgttcatcgaggcgctggccggcggactgccgatcttcgcccgtcctgacgaagtgctggaaggcctcgtcgaggaagaggtgacaggcttttacttcacggatccccaggagtttgccgccaaggtagatgcgttcctggagatggatgaagagcgcgtgaacaagatgcgtcaggccgcggtcgagcgaagcgcgcagtatgacatgcatacgtttgccagcaaagtgttgaccgtataccagatggtgatcgacggctatcatgaagattatgaggttaccaagatcagggtgctggacgatatggtgcgggtgacgctggacaatgattcgctggatgagccgcttcgcctgtatatgacgatcgaagattacttcagatataaagtgacggtgcacagctttatggacggctcttatgtcgcctctttgctggaacagcaggaggtctataaggcgacgcgcagcgcgctgcgccggctttcttcacgggattatacctgtatggagatgcgccgttatctgatccggaacaaagagctgagcgaagaagaggcaaagacggtcatcgcggatctgaaagcgcggggcttgctggatgatgcgcgttacgcgatggataagacggcgtattatgcgcaaaacggctatggccgcagcaagatcatgcgcacgctgctgaaaaaaggcatcgaccgggagagcgcagaagctgcgctggcacagctcggcgatgaagacgaggaagagatagcattggtctttgcccagaagctgctgggcgggatcaaggaccgctcaaagaagatgaagaaacagatgatcgtcgcccggctgatggcgcaggggtacagcggcgagcttgcccgccggaccgctgagcgtctggagctggacgatgatgaagaaagcgaggccctggacaagacgatcgccaaggcgctgcgcctgtatgcctcacgcgttgaaggcagccggctgcagcagaagatcgtcgcctattgcctgcagaagggctttccttcagatatggtgagacagagactggaagaacgggagtggaacgacaatgaatagattactcagggaactgatcgacggggaccgcgggaccatccgcgtactgctcagcagctgcagcaggggcgttacggccaagggcgccccatatctttcgtttacgctgcaggataagagcgggacgatggatgcgaaatactggaacgtttccgaagagctgctcgatctgtacgaaccaggcatgatcgtggatgcgatgggagatgtgctcagccacaatcatcagctgcagtttcgcgtcaagcagatggatatcgtggaagaggatgtcagcgtatatgatttcgtgcaggaagggccgatccctgcggatcagatgaagcgggagatcgaacagacgctgtcgcagatccaaaatgatacgctgtcgctgatcatccaggctgtctatgagcgatatggccatgactttttcgaatatccggccgctactcgcaatcatcatgattttgtcggcgggctggcgacgcataccatcggcatgctcagactggccaacgcgatcgcagatcagtatccgatgctcaaccgggatctgctggtgagcgggacgttcctgcacgatctgggcaagatcaaggaattcagcgcgccggtcgttcccagctacaccacgccggggaagctgcttggccacatttcgatctttcaggccgagctgacgaagatcgcggccgagcttgggatagaggacagtgaggaagtattgctgctgaggcatatgatcctttcccatcatggggtgcatgagtatggctccccggtgctgccgatgatcccagaggcagaagtgctgcatctgatcgacaacctggatgcgcggatgaatacgatccagaaggcgctggatatcacagaggaaggcgcattcacccagcggatcttcgcactggaaaaccgcagcttttataagagcacactgtccgcagacgaggaaggatgatgtgcctgccgcttgacgcggctttttttctggatcaagcgatcaaaaagaatgaaaaacatgacgctggtgaagggctttcgcattgacaaaaccaaaaataagaagtaaactaagaatagttcttaagattggaggctgtcatgaagagaaaaacatccagacaacgggagatgatcctggactatctgatgtcagtgaacggacatcctacagctgaggagatcttcaagaatatgaatgcgcagggcacgcagatctcgcttgccacggtctaccggaacctgggaattctggaggagatgcataaaatccgcagagttgcccatcctgaagaagggtattgttatgacaggaccagcaggccgcatcatcacctgcactgcatccgctgcaatcagatctatgatctgccgcttccctatgaggatgcgctgaatgcgcggatcgccagtcagtgcggaatgacggtattctctcattcgatcatggcagagggaatctgtgaacactgtcgcagagaaacagatgaatgtaaggagtgaatgaacatggaactgaaaggatcaaagactgaacagaatctgatggcggcatttgccggtgaaagccaggcacgcaacaagtacacgtattatgcgcagaaggcaagagaagaaggcatggaacagatcgcgcgcatcttcgaagaaacggcgcgcaacgagcaggaacatgccaagctgtggttcaaggcgcttcatggtgacgcgatgccggatacggcggccaacctggaagacgcagcggcaggagagaattatgagtggaccgatatgtacaagcatatggcggaaacagcgcgtgaagaaggattccagaagatcgctttccagatggagaaagtggcagagatcgagaagcgtcatgaagagcgctacctgaagctgctggaaaacgtgaagaacggcactgtgtttgagaagagtgaaaagacgatgtgggtatgcgatatctgcggatactgcatcgaagcggagaaagcgccgaaggtctgcccggtatgcggctatgaaggctctcacttcgcacaggaagcaaagaattattaatgctttaacagcataaatgaacaggcgatacatataagaatatcgcctgttttattttgcatataatcgacaggaattctgcgcaaaaaaacgctgaaaaatatcataaaaatataataataccgcgatagtttagatatacaaacatggacatatttgcaaattttaaccacattatctaataaaaagacaaaatagtccattttccgtgcaaatcaaagataaaaataacaaaaaatacaacataattaccaaaaattataaaattatccgctttcattttccaaattctgtgttaaagtatgtgtgtacaccgagaggaaactctgtgaacagtttgtgtcaggaccgtgaccttcttttgtggggcatccttgtgccggtccgcttgctggagcagagagaaaggagtgagaaaacagatcataggacgtacatcagttgcatcacatggcatgagcagatcagtagactcttttattttttatgccggtgatgtaagcgctaacttgtcagtgagttaagcgctgacttgctttgtttgatttaaagaaagctaactatataaaaatcaagtaaatcagatgaaaaagtttgaaaatgtagactaactgatttttgatagctggttttgtatggatctttgaaaatgtgaataaaaaggcatgacgaaaacaaccttggtcaaggctc

SEQ ID NO: 2925 - DNA, 2984 bp, Unknown
  16S sequences of unknown bacteria
gtggcagaatttgctaactttggtaaaaaaactgctggggagcgcaccagccgacaccgtgggtataaccggaaatgtcggttatctgctttgcttcaatccacttgccctcttcgggaatgggagcaggtccgtgatggggaccctttgcgactacgcacatattttcgacttcctgtgaataagtcatttttctatctcctttcgggaattagcggatttcggacggcaaaacgccgaaatacgcaattataaacatatatattgtatacctatccgaccgattttgcaagtgaaacaaacgaaaaagtttgtttcacgtcgttgaaaaaatttgtcgagtcggtctcattgtcaaaaaccgaaaagcaggtcggtccgctgccggtcagcgaagtggcaataccgcctttttttgcggcaatttcgcttatgcggccgtatacgccgcggctgttgcaaagcgcaaaatcatttccgaaggattttattgccgaaaccgtctctccttgttttaaaagagagaggaccttatcggtgtaattttcgtcaaagctttttctttggtcaagcattttatacatttcgcccgtcgagcccttgtcgcagggctttataagcacaaaaaacattctggggaagttttcgagaaaggtgagcttttctccaattccttcggcaagagcggttttggaaaacagggcaaagggtacgtcggcaccgagctttttcgccaggccgattttctgctcatctgtcaatccgacgccgtagagaacgttcaaaatgtttataacggccgccgcgtcggcacttccgccgcccagccccgaaagcaaaggaatacgcttttccacggttatttcaatattgtcatcggcaataccgttcgtttcaaaaaagagctttgccgccttaaaggcaagattttcctctcggcgtacaagactgcaattaacctttattccgccaaactcggtcttttttacggtgacggtatcataaaggtcaacgggatgcattattgattttaaattatgataaccatcgggacgtttttcgagacagtcgagggtcagattgagctttgcataggctttctgtgatatttttctcataattcgcccataaattcttcgattttttcaagtgccgttttaagatgatcgagagaataacagtaggaaacgcgaatgtgtccctctccgctttgtccgaaggcggttccgggaataacggcaacgtgcttggaataaagaagcttttcgcaaaattcgtccgagctcatgccggatttttctatgctcggaaaggcgtaaaacgcaccgagcggctcaaaacattcaagtcccgctttttcaagaccttttaagagaaatttccttctcatgtcatattcgtcacgcattttgacaatatcgccgtcgccgtttttaagcgcttcgattgcggcgtactgagacgtggtgggcgcgctcattattccgaactgatgaattttggtcatctgttttatgatttccttgggtccgagagcatatccaagcctccagccggtcatggaatatgacttggaaaatccgttggcaataaccgtccgttccttcattccgtcaattgacgcgatcgaaacatgatgacggccgccataggtcagctcggcatatatttcgtccgacaaaatcattatgtttgtatctttgaggacttcggcgatttgctcaagatcgtgtttttccataattccgcctgtggggttgttcggatagggcagaacaagcagcttggttttcggcgtaatcacggatttcagctgctcgggtgtaattctgaaattgttttcaacggtggttttcagcggaacgggaacgcctctgcaaagactgacaagaggggagtagcacacaaagctcggctcgggcactatgacctcatcgccctccgacacaatggctctaaagcaggcgtcaatggcctccgaaccgcccacggtaacaagtacgtcggttttcggttcgtattttattccgaatcttcggttgtaataagcggcaatttcttcgcgcagctcggcaagtccggcgttggccgtatatcttgtatatcccgcctcgagagaggaaattcccgcctgtctgatgtgccacggagtgtaaaaatccggctcgccgacgccgagagacaccacgtcgtccatggtgcttgcaatgtcaaaatatttccttattcccgagggcttgagcgacacggtaatagggttcaaaatgttatcatagttcatcaaaacgacattatcctcctgtcgtccttgttgtcatagcatatacgcacacccatctgcttatagttgcggagcataaaatgagttgcggtggatgttacgccttcaatgggcgcgagtctgtgggaaacaaacattgccgccgactgaagatcatcggccttgacggtgacaagaaagtcgtatgagccggacatgaggcacaaatcggaaacctcgtcaaactgcatgatttttttggcaagctcctcatatcccgcatcgggctggggggtaaccttaagctcgaccatggcggtaatacgcttgtcgccgagcttttcccaatttataagcgctttatagccgttgataacaccgtcggcctcaagcttttttatgtgttccttaacttcttcctcggtagttccgagcatagcggcaaggtcggccaccgaataacgggcgtttttaaagagaagtttagcaagcttatccatagtaatcctccaatcagataatgggaacgagcatgggaacatgctgttcgtatatagttaaataggtaaatcctgccgccttggccatttccattccgtcggcaatgtttttgcccacgtcataataatggtgagcgtcggaaccgaaggtgatataccgtcctccgacctctttaaaccgtttcacgacttcgagatcgggaagaggctttccgtaggcctgt

SEQ ID NO: 2926 - DNA, 5529 bp, Unknown
  16S sequences of unknown bacteria
ctgggcttactacggcctgtttccgccactggcggcggccttcgtgcgcccctttacacaagggagccttttggatagtgctacaccagtatgaagttgcactccccaaaagcccccgtcaagcctccctttggtaccaaagggaggtggcacggcgtagccgtgacggagggattgacaacccctcagtcggctagcgccgacagctcccctttcacaggggagccttttggaaagtggcactaccgcacgaaggccgcagagacaaccccgctctcttggggttttttgacagcctgatactatttgcccacgcaaaaattctggaacacgcgggcgatcacgtcttccgtagcgtcctcgccggtgatctcgcccaggcggttgagcgcggcgtgcaagtgtacgctgagcgcgtccagcggcacgcgcgcgcgggccgcgtccagcgccgcgcggatttccgcgagcgcctcgcgggccaaagcgatgtggcgctcgcacaccagcgcgttttccccggcctggggcgcgtccagcgcctttaagatggcgcgctgcaattcgtccagcccctcgcccgtgaggcaagagacttcgatcgagcccggcagggatttgcgcacgggcagatcggttttgttgagcacgcagatggcgcgcgcgtccagcgcggaaagcagttctttgtcctgcggcgtccagggcgtgcccgcgtcgaacacggcgagcaccgcgtccgccgcagcggccgccgcccgggcgcgttccacgccgattttctcaatctcgtccccggtttcgcgcacgccggcggtgtcgctgagttcaatcagcagcccgcccagggagatgcgctcggtgagcacatcgcgcgtggtgccggcgatgtcggtcacaatggcgcgctcgctgcccgccagcgcgttcataatggaagatttgcccacgttgggcgcgccgagcagcacgcaactggccccatcgcgcaccacgcgcgcgcggcgctcgtccgcctgggcgcgcagttcgccttccagcgccgaaagcgccgcgatgagttccgtgcgcgtgaactcctcgtccacctcttccggaaaatccaaatgcgcctcaatccgcgcgatttgatccaccagccggtcgcgcaggccgtgtacatacgcgctcacgccgccgtttagctggcgcatggctgcgcggcccgccgcctcgccgcccgcgttcaccagcgccatcacggcctccgcctcgtccagcgtcacccggccatgcaaaaacgcccgcagcgtgaactcgcccgggtttgccgcgcgcgcgcccagcgaaagcaccagcgcaagcacgcgccgggtgatataccgcccgccgtggcagtggatttccgccacgtcttcccgcgtgtaggtatgcggggcgggcagaaacacggccatggcctcgtcaatgggcttgcccgcgtccatcacgtgcccataggtcaacatccgatcccgcctgggcgcaggcgaaaaggcgcgcgagagaatctcccgcgcgcccggcccactgatgcggatgatggccacgccaccttcccccgcgggcgttgcaatggcggctatcgtatcgtttggaatcacagcaggctcgccgcgccctcgtccaggaagaactgcacgttctggtgcgcgcgcaggatcgaggcgggaaccttcgggtcgatgttgcccttgatgctgtcgcgaatggccttggccttgccttcgccggtggccagcagcaccacgcgcttggcgttcatgatgccgcccacgcccagggaaatggcctgacgcggcacatcgtccgccgaatcaaagaagcgggcgttcgcgtcgatggtggactgggtgagcgtgatcacattcgtggggtacacgaacacatcgttaggctcgttgaagccgatgtgaccattgtggccaatgcccagcagttgcaggtcaatgccgccagcggcttccaccgccgcgtcatacgccttcgcgtccgcctcgtgatccgcgccaatgccgcagggcacgtgcgtgttggccttatcgatgttgatatggtcgaacagattctcgttcatgaaacggcgatagctgcacacgtgcgccggatccaatccgacgtactcatccaggttataggtacgcacgcgggagaaatcgatcaatccctcgtggttcatgcgggccagctccttgtagagcggcaccggggtggaaccggtcgccaggccgagcacgcaatcgggcttcttgaaaatttccgccgcaaaaaccgttgccgccgcgcgggcgacttcttccgcattcttgtacacaaatacctgcattttaatccactccttcctatgccatattatagcacatttagcgttaaatgaacagggaacacgagaaattttccggattttatgatacaatacgggcaaggaggcgatgaaatgagttttcgtcttgtgacggacggaacgtgcgacctgagccacgcggttgcgctggagagggacatcccggtgattcctttcaaagtatccgtgggaaacgaagatttccggccctataacggcgacccggggctgaaaaatacgttctcaatcggcgaattctatgcccgcatgcgtgcgcaggagaatacgcacacctcgcaaatcaatcccgaagattatattcgctattttacccccatgctggaagccggggaagacgtattgtatctggcgttttcctccggcctgagcggcagttgccagaacgccatgctcgccgcgcgcgagttggaagaaaaatatcccggccgccgcctggaagtggtggatacgctgtgcgcatccctgggggaggggctgctggtttggcttgtggacgatcagcgcaaatccggcgccagcctggatcaggcgcgcgattacgccctcgccctgcgcaagcgcattgtgcatgccttcaccgtggacgatctcaatttcctgcggcgcggcggcaggctcagcggcgcggcggcggtgctgggcaccatgctctccatcaagcccatcctggatgtgaacgcggagggcaaactggccgtgttcgataaggtgcagggccgcaagcgcgcgctgaaagcgctggtggaccgcatggaagcctgcacccgcaagccggacgcctatcccgtgttcattacctacgccgattgccgggaagacgcgctgctcctggcggccatggtgcgcgagcgcttccacgtggaaatcgcgcacatgaacgacatgggccccatcatcggcggccacgctggccccggcacgctcgcgttggtgttcgtgagcgacgaggagaaaaaataatccatttgaaatttcaaatcgcgcggggagatggttttcttccccgcgcgatggtttttgaaaacttaacgcgcgcgcccattgacaaaggccaggggaggcagtataatatcctcgttggttagtttgatctaactcacagtttgaaccctctcccccctcgcgcaaatgttgaaacagcccgcggtactccaccaccgcgggctgtttcaacatttggggaaccaattacacttcacgcgaaagcccgggcacgatcgcgccattctcgttgaggcgcgctcgcagggcctgcgcgtccagcgcgtccacgcccacgcccgcctggcaggccatagcggcggcggttccggcggcctcgcccatggccatgcaggacgcctgcacccgataggcggattgcgcgcggcggtcgcccgaagcgatgcgccccgccatcatcagattatcgaatccccgcgccaccagcgcgccataggggatgcccggcacgcggccttcggccaggaattcgttggccagcggcgcgtcctccgcgccctggtgtacgtcgatgggatagaacgaatagcacacggaatccgccgggcacgcgccgcgcacataatcatcgccggtgatatacgcgttgcccaggatgcggcgggattcgcgcgccgccacggtgggactgcaggcggccacataggcatgctcatagcccggcacgttctcattcagccagcgcaccagccgcgcaatggacttgcgcccctcgatttcgccgcgcgtgcggctgtcgtcgtccgcgccgttgtaggggtagacgtggtttaagttgctgaacaggttgatggcgtagttctcgctcatatcggcgccccggccccggctgccgccctggatcacgcccaggggattgccgccccagatgtcatagggggacaattcgccacaggccaccctttgccggtagtcctccgccagggcggcggtgtccttgttcctgggctgcacgttcacaagcacgctgttgaggctggcgggctgcaattcctgggaaagctcatattccgcgcccgccagggcggatagcgttccatcgcccgtgcaatcgataaagacctttccttccacgcgcaccaggccgttggccccggccgtcaaaatcgcggacacatgcccattttgcgaaaacgcgtaggccaccggctgatgaaaatgcaaatgtacgcccgccgcaagcgccatatcgtccataaacaccgccgcctcgaaggcgttgacctccacggccatttgtggatgccgcgcagtgtagggcgcgggcggaagctgcgcatagcccgcctgggccaggcgagtcatcagttcccagccgatgcccgcgatgatttgcttgccgtgcgcgtgaaacagcgcgggcgcgggcacgccgcccacggtcatggtgccgcccagcatgccccattgctcaatgagcgcggtattcgcgccgccgcgggccgctgccacggcggcgcaaaaacccgccgggccgccgccacacaccacgacgtcatacgattcgcttctctggatggtaacggtttctttcatagccatatgcctccttggcccgcgagggctctatgcgatattgtaacacactggtggacgtgggagcaagcgcctccatccacacaggcggggctgtaaaaaaacttttgttgttctttcatagccccagagcattgacaaagttcatatttgattcgaaattgcaagattgtatttttaaatggcacactcttgcggttttgcgtttctaatccctccgtcacggctgcgccgtgccacctccctttggtgccaaagggaggcttttgggcagtgctacttcatacggttgtgccactacccaaaaggctccccttgcgagcaagggggcgcacgaagcgcgcgcccagtgggacggagcttcgccgcgcgcagtgcgcgaaacaggcgaagcggaagtccaggcggcgcagccagtggggcgcacgaaggccgcgcgcagtgcgcgaaacaggccgtagtaagcccaatgagcaagggagtactgcaagccgtagggcgcagcaggacgaccattgcgaattgagggtgcaatagccgccgatgagcccagtgaagcagggagcgccgcgagtgagcttgcgaacatcggaggcccgaagggctgg

SEQ ID NO: 2927 - DNA, 6932 bp, Unknown
  16S sequences of unknown bacteria
agaaaagggcatctggtatgcaccgggcaaggcaagcaacgccggcggcgtagcgaccagcggactggagatgtctcagaactctctgcgtctgtcctggacgttcgaagaagtggatgcacggctgaagagcatcatggaagagatcttcaagacctgcagcgagacggcaaaggaatacggcatggagggcaactacatggccggagccaacatcgccggcttcatcaaggttgccgacagcatgctcgcccagggcatcgtataagaacctcatggatccttcgggatccatttttttacaaaagaaaagatcccgaaggatctgatcagacgttttcttcgacatacatgtgccgtttgatgatggagctgatgagctctgccgcaagctgcggatcctcattgcacacgatgtatttataattgctgacgagcttcatctcgttctcggccttcgccagccgctgctgcacgatctcctccggctcgctgcggcggccgcggatccgtttctccagctcttccatgctcggcgggatgatgaagatgctcagcgcatccgggcatttctgacgcacctggtcagcgccctgcacctcgatctccagcagcacattcttcccctcgttgcgcagttcctctacctgagccagcggcgtgccataatagtttcctacaaattcggcccactccagcagttcccctctgcggatggcctcttcgaagtgttcccggctcgtgaagatatagtctacaccgtccacttcattcgctctcggtttccgtgtcgtcatcgagatcgagtaagcaaggcggagactgtcgtcgtccatgaaacatttccggatggtccccttgcctacgccgctcggtccgctcatgatgatcagcagtccttttttcatgcgcttcatccttccgtttatttactactgattttaccagcgtgccctgcatctgtcaaactttttttccgtccttgatctgtgctataatattacaatggagtgtgatcaaaatggctttggacggactgctgctgcatcagatcagcagcgaactgaaggaatacctgccttgcaagatcagcaagatccagaatatatccgatgtggaactgctgtggacgctgcgcacgacgaagggaaaccggcgcctgctcacttcttttcacagcacctataaccgcctgcacctgacgcaggcttcttatacgacgatggagacgccgagcaacttcgtcatgctgctgcgcaagcagctggacggcggattcatccgcaggatcgaacagatcggtcttgaccgcgtgctgcgcatcgatgtggaagcgcgcgatgagctgggcgatctgcacatgcgcacgctctatgcggagctgatgggcaaatacgccaacctggtgctggtcaatgcggagggcatcatcgtcgacgccctcaagcgcatccctgtctttgaaaacagcaagcgtctcatccaccccggcgcacgctacgctctgccggcccaggacatgcgcaagcacgaccctttccaggtcgacgcatccgcgctcgatgacagccgccccctgggcgcgcagctcttcggcttctctccgctgctggggcgggaggtggaataccggatgcggcagggggagaggcatttgcggacatcatggaacagatccgaagcagccatgtcctgtatctgcatacggtcaaggaacagacgctgttccactgcatcccgctcacccacctgcaaagcgaagcgcagacgtatccgctgatggaaggcatggatgcgctgttttatgaaaaagagcagaaggtgcgcgtcaagcagcaaagcggagacctcttccgcgtcatccgccgcgagctgagcaagaaccgcaacaagctgcccaagctgtatcaggcgctcgatgaagcgatggactgcgaccgctaccgggaatacggcgacctgctgttcgcctaccagtcttccttgaagcgtgagccgatcgtgcgccttccttcgtttgagcgggaggaggaagtcgccatccccatcgacatgcgctttgacatcgctcgcaatgccaaccgttattatcagaaataccataagcagcgccgggcgcagggcatcctgcaggaacagatcgcgctgtgcgagcagacgatcgcctatttcgaacagctggagtctcaggtcgagctggccgccgtgcccgatgcgatggagatccgggaagagctggtgaagcgcggctacatgaacgcacagaaaagcggcatccgccgccgcaaaggcaagcagatcccgcatttcaccgtctttgacatcgagggcacgctcgtctatctgggcaagaacaatatccagaacgagtacctgacccgcaccctggcccgcaaggatgacctgtggttccacacgaaggacctgcatggctcccatgtcatctgcaccgacccgcagccggatgaacgcctgctgcgcatctgcgcgatgctcgccgcctactactcacagggacgcttttccagcagcgtgccggtcaactattgcccggtgcgccagctgaagaaggtgccaggctccgcgccgggtgcggtgaccatgcagcattaccgcaccatctacatggacccttcgcagaaagaggtcaccgagatcatccgtcagtatcagaagaaagcatgaaggctccggttccggagcttttttgcgcaggaacgaaaaaagccgtggatccacggctttcactcatctcagcatccagagcagcttccgctgtcgcatccgccgccgcagcttgagcatccgccctgctgcgcagccatctgctgctcatagaccagcgtatcgatagcgagacactcgatctccaccagcgcgcccttaggcagtctgctgacttccacgcagctgcgtgccggatacggctcttccaggaatccggcatacacttcgttgagcgcgtcaaaatcgttcagatccttcacgaagatcgtcgtcttcatgatgtggtcatagcgcaggcccatctctgcgagcacggcgccgatgttcttcatcgcctgctctgcctgttccttcatggtctctcctgccagctctccggtattcgggtcgatgcccagctgtccggaaagatagacgaaatctcccagcttggtcgcctgggaatacggccccagcgccttaggcgccttgtcgctgtgtacggcttttacaaatacgttcatatccattcctcctatatcattcatgatgatggcatgggtctcatgtctgttatattatatctgattttcctgaaatttcaacgcagatgcgctttacagctcgtcttcctctcggacgaacacctctctgggctttgagccgcgtgccggaccgatgatcccgcgttcctccagcacatcgatcagccgtgccgcgcgggcatagccgatgctgaagcggcgctggatgagcgaggtgctggccttgcggctgtggatgacgaactcccggacctcgtcatacagcgggtcttcctggatctcgaccgtcttcccgccctggctgctgtccagctgatccaggcgcaggaatgcgtcatcatagcgtggccggccttgcttcttgaccgcctcgcagatcctggcgacctctttatcatcgacatatacgccctgaatgcgtctggctgcggtctctccgaccggcagatacagcatgtcgccatagcccagcaacttttccgcgcccatctggtcgaggatagtgcgggaatcgaccgcgctggatacagagaaggcgatgcgcgaggggatgttggccttgatcaccccggtgatgacatcgacgctgggacgctgtgtcgcgacgatcagatggatgccggccgcacgggccagctgcgtgatgcgctggatgctcccctcgacctctttggcagcgaccatcatcagatcggccagctcatcgatgatgacgaccacggaaggcagcggttcccgctgttcttccggatgatcattcaccatggcgttatagccggagatattgcgcacgccggccatggcgaacagctcatagcgctgatccatcatcgcgacgatgaccttgagcgcccggttggcttcctcactttccgtgatcaccggcccgatcagatgcgggacctcatggtatggggtgaactccaccttcttcgggtcgatcagcagcatcttcacctcatccgggcgtgtgcgcatgagcagcgaacagatgatgctgttgatgcagaccgatttgccgctgccggtagcgcctgccaccagcagatgcggcatcttgttgagctctccatatacgcagctgccgctgaggtccttgcccaggcagaagagcagccggcgcgtcgccatgctctctgggatggcgcgcatcagctccttcatgcgcacggtcgtcttctcttcgttgggcacctcgatgcccacagcgctcttgccggggatcggcgcctcgatacggatatctttggcggccagcgccatcttgatgtcatattgcaggttgctgatgcggctcacccgcacgccctgatcgggacggacctcaaagcgggtgatgctggggccgatatgggtgccgaccagcgtcgccttgacgccgaactgttccaggatgtcgatcagctgctttcctttgagtcgcgccgcctgtacgttcgtattcgccttgctcttcttcccggatgccggatcatcgagcaaagagagacgcggcagccggtatttgctgtaatcgatgtcaaactgactggtgaacggtgctttcttatcctcctgcgcctcacgctcttttccatcggccaggatgcccagcttctcttcatgcttcttttgcggtgtcatgatgtccagatgatcttcttcctcctgggcgaacagcggcggctggcgcatcatccgcatccacgaaaaaggaaggcgtgtccacaggaccgtcatcgatgcggatatcggggacgcgccttggctcttctttgtccttgcgcggcggcttaggcgccttgcggcgcgcctgccaggcagaccccagggagtctttggccgagcgcaggcgggcggacagcgtgccatgcacgcacagcgcgatgcccatcaggatcatggctgccgcgacgatcctcgtcccggtatgatcgaacaaaaagctgagcagggagaccagcagcacaccgatcacgccgccgcctctggcgacctctccctgcaggatcagcgcggtatgacgaagataatcattcagcagcgccgcgcccttgagcgtctcatccgatgggatggacgcgaggatcatccaggccgtaacgaacaaagcagccgccaccagatactgcgcgggcagctgcttccatgatttccgcatcatggcgagaaaggccgtcacgatcaccaccgcatagacgacaccgtagagcgtgccgcacagatactgcagcagcgaggtgagcaggctgcccgcaaacccgatctgcagacagccgatcaatgagacggcgatggccgcaagcgaatagatgtagaccatcacatccggttccaggatcccctttcccttctgtgccttcttcttctttgccttggccatgcctcttccctccatttcttagacgttgatctccaggatgaccggcagcaccatcggccgctttccggtcttcttgaccagatacttcgtgatccgatcacgcgcttcgctgcggacatccacattatcgtagcgtttttccttcacggcgttgcggatgcattcctccaggatgtccccggcatccttgacgacatattccgcgtccttcagatagatgagcccgcgggtctgcacatccggcccgttgatgatctccttggtcttggcgttgatgcccaccgcaacgatcatcacgccatccgtcgacaggatctccctgtccttgagcacgacgccggtcacatcccagttttccttgccgtcgatcagcgtatcgctcagcgcgagatgctccgccgtgctcttcacctcgccgccttcgaactcagcgacctgtccgttgtccagcaccaggatgcggtctgcctgatagcccatgtccatggcgagcgtggcgttcatataaagatggcggtactcgcccttcaccgggatgtagtatgtcggcttgaacaagtacagcatcatcttaagatcctcccggctggggtgcatggagagcacctggcgggaatccagcgagaagatcgtcccgccttccttatagatctcattttccatgttgttcgcgtccatctgcgttccgctgacgatcggcgaagcgatgatgatcgtatccgagctgcggaagcgcacatagcggtcttcctggttggcgatgttgctcatcgtacggaacaggttctttccctgtccgctgatgatgaccagcacatcttccatgtcgtcagagaactgcttacggtcgatgaacagatcgtgcggcaccgtataatacttcatctcctccatgagcttgatgatgtggcggagcccgtcatcgtggataaagatcttcttgcggtatttgattgccacatccaggatctcttggatgcggaacagcgactgaaaataagtagagatcaggatacgcccgtcccgatggctctcgatgatcggctcgatgagattcgtgatccgatggttaggcgaggtatgcccgctgcgctccacgccctgggattcgcacagcagcgccagaacgcccttcttgccgaattcgctgagcaggttcaggtcgcagcaatactcttcctgcatcatatcgtaatcgatgatgaactcgccggtatagacgacatagccctgatcggtggagatcgccacgccgaaggtgtccgggaaggcatgcgtcatcgggaaggtctggatgcgcacgccgtcgatgcgcatcg

SEQ ID NO: 2928 - DNA, 6581 bp, Unknown
  16S sequences of unknown bacteria
aaaatccccacatattcattgaaacaagcgccttttccgaaatattgccggcgccgtcggcagtgattctgccgttttcgcggcgaatgagcgccgccatggtgtaaagcgtctgctcgcccgccatggtgttggacgcatcgggaagcgaggacggattatcggggtcgtaaacgtaagaatggacgaaaccgccgtctttcattctgtaacgcagaataccgtcgtaaagagtattcccttttttgataaagcgtttatccgtgagagggtctataccgagacagcacagcgccaccatgacctgatcggtgctttcgacgttttccgttccccaacttttgaaatctcccgtgtcaagctgcaattcggaaagtctgccgagagcctcgtctatcacgtcgtaaacgtgctttgtcacggtcttttcaatcgatttttgctcgtatgtatatgtcttttcggaattgtaataaggtgccaaagcctgcaatgccatggcggtcaggtcggggtcggaagcagcgccgctcaacgcaaagccgccgtccggcagttggcgggacaaaatctcggttattatatcgtcgcgggtgtaataagcgtcagcgggaacggtgtaacgctttgagtcaagcgcgataagcccccatatccagccgtttatgccttgtctgccgagagaggtcgtctttcctctgttatacgttccgtccgcaacaaggtcaattttttcgccgtcacatacgccgaaagacgtagggtcgccgcctgcggcaagcacggaaagcgttattctgtgccactccgtagccttgacgctgttaagttttcccggctcggaataacgttcctctacacggtcacgcagaacggcaagatattcgtcgtaagcgtccgcgacattgagccgcgaaagcccgataacataccaatcccccggcgtagtgcccgcaagttcgaggtatttgccgttcatcagaacgccgtccgaagatgagccgacatcggattttttccatgatattatgccgtttgcgacctcttgaaaagagggcttgttcgccgccgcgaaagagggaacgcaggcaaaaagcgaaaccgaaacgcagacggcgacaagaaaagaaacgagtttatttttcatctttgttctccgcattgtgcggcgcgtgctttttgaaaatgacaagcgcgacaagaattgcgacgggaatcaaaaccgcacatacgacagcgaatttcacgggcaaagcaagccctccgccgttttcggaatcaccgttttcggtcgaaaccgattcacctttttcggctgtctgcgcggaagaagtcggggcttctccgtcagccgaagtcggagaaacggaagtgttatcctccgtccccgcagcagaagtcgaagcgtccgatttgtctgcggaagtcgggtcttcaagcgggtcgggcggcagcgtcgtatccgccttatccgaggacggagccgcaagcgccttttcaagtttgctgcgtgccgccgaaatttcggactgcgacgcattgagtttttcaagcgttttcaccgcagcagaaagagcagatgaaacattttcgcggtctttgtattttgacgcaagggcgtgcgccacggaaacggtgaggctgtcgccgtttgccacggcaaagtatgcgcccgtcggctgattttcggtgtcgggaatatccgtgcctatcgcgccgaagccgccgatgtccgcgccgtaaccgagcgtgaaacggacgcgcacaacgtcgccgtccgaaagatatgtgtccgcaaagccgacgttggggtaaacgttgttgacagaatacatccaccccgagccgttcgtcagcacaaattcaccgagaaagccctcccagttttcggcgtaatcgttcggttcgaaaaacgtcatggtctttttcagatgaggaacgagaatctcgggcacattcacattcaaatcaagttttttccggtaagacggactttcgccgcgattatagccgttgaaacgttttgcggtcttgtctccgtccgcgatatacgcaagatagaaagacgacgaagaagagcctccgtaatatgcggtataaccgttgtttttcagaaggcgcagaagttggtcggcggatgtttcgccctcatatatcggaacggaaacgggattgacgatataaccgcagcccaaggtaaacgcttcaacgctccacacggcgtgtccagtgatttcacccttatttgcctttacatatttgattttgtaggtctttgaaagcgttttttgtcccgcgacagccgaaacgacgaccgtattttcaccctctttcgtaaagacgagggtgtacgaagtcttttcgttgtcgtcccaagtcggagcgacgttttcgccgttcaaaagaactgtggaaccgatttttttgcccgaagcgtcacgcgcacggacttcaaacgtttttcggcttccgcgctgaacatagttatcggagagcgtggtttcaagcgtcggggacgcggctgacgcagcgacggagaacgcggaaacaaaaatgcagacacaaaagataaaagcaagaagtcttttcattcttttcataaaatgctcctgccgtcccgcccctttcgggagcgggacgggttgagattaaatataaattattatatcagtcaaacagagaagtcgatttcttcgcgacgaaatagaacagtttcatcgcgtcggcgatgtcggtctctccgtcggcgttgaaatccgccaccgcaagcgcggtttcgggcagagcctcttttttcgcaacgtgatagaaaacaagcatagcgtcggtgatgtccaccgcattgtcaaaattcacgtcgccgcaaagcgtggttatctgccatgcaagaacgggaagtccgccgttaatgccgcagacatcgggacggaaagcgtcaccgatcagtttcagcgtttcgtcggaacgaagttcttcaaaagtcttgcccacggtcttatccgtgttgtctccgacggaagtttttgcggtgtcaaagaagcagtttgtaaacgtgttgtcgtatgtcgtttcgccgcagatgccgcccgcaacgtatttttcggaagtgcaggtcacatctcccgcgttgtagcagttttcgaacgaatgtccgtcctgtgccttgccgacgataccgccgacagcgctgacgccgctgacggagccgatgttatagcagttgcggacagttacttccacgtttgtgccgccctgttcgcgggtggtgtctatatgtccgacgattccgcctaatcctgtgtcttttccgacaacggagccgacattgtaacagccctcgataacgctcttgccgccgtcacgaaccgttccgacaatgccgcccgaataaccggaagcgtatacggtcgcgccgttccggcagttgattatatccgcgccgttgctccaaccgacaatgccgccgagccaactcagatatgtgtcgggcgagcctatcgtgccgcttgcgacaccgacgtttttgataacggagttagtgccggcgtatccgaaaagaccgttgcggggagacgtcagattctcaatcttgtgtccgtcgccgtcaaacgtaccgtcgaactgtgttctcgatgtgcctatcggcgtccatgttctgtccgcaagatcgacgtcggaagtcattttgaagaatttgcccctgaaagtatagcccttggcaatcttatcggagattgcgcaaagttcgtccgcagttgcgataatgtacgggtcggattccgttcccgcgccgctccacggcattttttcgttgacttttatcgcaatcgttacgcggtcaacgccgacgcggaccgtgaaggacgaagtgtccgtatcaagcgggtcggaaacaagcagtttataatcgttaacggcttccctgctgccgtcgctgtaaacggcggtaacggtcatacccgcagtgtcaaggctttcgccctcttcgtattcggtctttgcgggcgcggtgacctcgataccgactatatatttttcggaattatcgagattgttttcgccgcccacgcggtcaagcgcgtcaaaaagtgcgttgccgttgcgaacataagcgcgctcgttttcgggaacggcgcgaagcgcgtcaagcgcggtttttacagccgccttatagttttcgttcgtgggagacgggatattgtttatagcctcaaccgcggcagacacagacgctttgacggggtcggactgcgaaagacgcatatcgtaaagcgaacggagttcgttttcaaaacgccagtaagaaacaagcgcgtaagtcgcctgatcgtttgccatggagttgaaaccggtattgagcgtatgaccgaagccgccgtcatcggttctgaatttaagtattccgtcaagcagagttttaccgccgtcggtcacgaatcgttcgtcttttgcggggtctacgccgagtgcgcaaagagcaacgatgacctgcgcgatgctttcggagttctctgtgttccatgaagtgaatcccgcattttcgttcatcatcgagccgagacggtcaagcgcgtcgttgacgcattcgcgtacggtgcggctgacttccgttttggacgcggcgtttgtatatgtgtaaactgtctcgtcgttataatacggagcaagagactgcaacgccattgcggtcatatccacgtccgaggacgaaccgtaaccgccgagcacccagccgccgaaatcattgccgtttacgccgtcggtcagttgtgttttaagaatttccgttataaatctctcgcgcggatatttcgcgtttgcgggcacgaccgtgtcggtcacgtccatggagataagtccccatatccagccgttcaagccctgcgcaccgggaccgcgggagataacgcaattataactgccgtccgcaatcaggtctatcggagcgccgttatatgtgccgaaagatgtcggatcgccgccgagcgccgctatcgtaacaaccgctctgtgccactcggttgcttttacgcggtgcagtttgccgccgttttcggcataagttgtttcaatataagttttcatcgcgtcaagatacgcttcatatccgttgccgtcgtcgataagcgtcttgccgtcgtcggatgcaaaacgtcccataccgagagcaagccagtcggtcgcggtggaagatacgcccgcaagataatcgggattgccgagcatcgtatccgtaacgcccgcccgcttctttgcgctttcgactgccgcgcggatataagaagccaactcggcggagagcgcggttctttcaacaaagcccgcttttacggggttttcggtcgagatattcttttcccacgcaagtacgggaagcgtctcgcctttttcgaatgcagcgccgagtgtggaagcgtcaagcgtgtcggcagcggtcgcgccttttgtcgcatcgccgtatcccgaaatgacaaaacagttggtgcaagagcctctgtttgcgccgagaacgccgccgatgttatttgcatagcctacggtatcaacgacagcgccctcattgaagcagttctctacaacggtcgttgccgctttatgtccgccgacaacgccgccgacggttgcgggaccgctgacacgacccgtgttatagcagttccgaacttcgcccgcgcgccaatgctgcccggagacgccgccgatataacctgttgtgccgctgactgtgcctgtgttcacgcagccctcgataacgcacgcgccgttaacatatccgacaatgccgccgacggcagagccgcccgatacggctgcggagttcatgcagttttcgatttttgcgccgtcgagtttgcccacgatgccgccgacgttcgatgtgccctcaacagagccgcgaacaacgaggtttttgacggtgccgccctttacaactccgaaaagtccctgttccgaaccgcccgcaacggacagccccgaaatgtagtgatacccgccgtcaaacgtgccgcggaaaggagcggacgctgtgccgacaggcagccacgcgccttcaagcgcgaggtttgcgttaagagtgactgtttttccttcaaacgtgttgccgccgtttaccgcgtcgcggaaagcgacgaactcttcgacagtcgaaacggtcaaatcaccgtcctcggcataaaacgccgtcggcagaagcgacagacacataattacggctataacagccgcaaaaaatcttgttttgttcgttctcatgatttttcctcccgttttttgtttttcttttttgcggagccgccctctcaacaaaaaaagacgcatcgaaaacgccgaacaataagcgttttgattgcgtccattctcgcccaatatgacaacaaaaaagaaacggcaggatcctgacttatgatgcggcactcgccgcaaagacgcacgcaaaaatacttttcgcgtgagtgcttggtcttgatcaaatacagtaatggcggtcgttccggaatcgaaccggatttcctgaaatatcgcaatgacatttctctactcagcgtacaacttttcaaaccgtatcttttaatttaatt

SEQ ID NO: 2929 - DNA, 32759 bp, Unknown
  16S sequences of unknown bacteria
tgatatttctattctataccatttcagaggtttacacaagatgggaagaagtctcttgcgtgaagcttttctatgatttcgtgagctatcttttcattttaactttacagtgccattcttttttctttatccatttttgttattatatttttcgaaggatttttcaatagttattttaattttttgtcttagggtatctggctttgttatctccacataatttatatattgcattgcccagtgctccattgcaatggggcttgccttaacagtcacggtcacccgaccgtcgccacgctttgaaatttgcgtatcgcacccgaaccaatcaattatctggtcgataatgcaagcgtcggcaataaactcaattctttccggctcgtcgctgtacatatacggcattgcggaagaaaatctcttgtagtcaattccgctttcatagcccgcaaccgagcggataggcacagcaggggttttcgatatgctcatatttgttatatggtcaagacggtgaaaaaccatattgccccagtattcgctgtaagccataaggtaataacgctgattgtgaagtatcatctgataagggcttacctcctgataagagcttttgtgcagctttttatccgctccgtatttattataatcatagcttagctgcttgcccgtttctattgcggtatctataagctctatattataaaaaagcgcctgattgtcggtcttgctccaatcatttaccgaataaatatttttaatatgcgacttgaagtatttatttgaaagtccgcataagcgctctatcaggtccttagagtgcttggcggttatatgcttgctgcttaaaacgccgtctatcagcatacgaagctcgctgtcctcaaactcacggcagtcaatatagctgccggctctgcgggactcaatttcaatatccgcctcttttaaaagcgatatgtttcggcttatcgctttgcgttcgataattatgccgtaatcgttttcaagatgtgcggctatatcatcctgagtcaacggatggtcataatcgctgtattctttaagtatctgccatattcttataagcgcaagctttttaggttcaagcccttccatcttcactgctcccttttaatcattatacaataatcgttcgcggcatattcggtgcattactatattatcatataaataagaaaccgtcaattgcggggagaacaaattattaaaataacttttttgcatttatcttcaagtttctttatattggcatatgttcctttgcttttaccgttccacagcataattgaaaaatcgcatgccgccgagaaccatatattccctgaagttttcaagcattacctcatactcgacctttgaaagcggcgtaagcttcagcatactttgataaagcccatctatctgttcgggcttatatccctttgcccagagatattcatcaaaatcaagggaatacatttcgtaatcttctttgttgcctacgctgtttgattcgatttccttatagttgatacccataagcgagccggagcaaatagcatcatatctaccattctgcaacatttgcatatcacaaaattccaattaaatcaacacaccatttcacaaaaatacatatgatttagccacgcgttttcacaaaattatcgtcgcggtttctgtcccataaagcataaaaacactgccacaaagggcttttatccaaaagacaagatttcaaaaaagttataattttttcccattaacaaataaatttacacgacatttttatttgtttttctgtcatttataaagcacccactaattatttttataaaataaatacattctttcgtttaggtctatatcatccaaatcgggacgatgaggttttctctgtcgaaggcagagaggcggtcactcatgcagagcacggcagaggtgccaagcaccaagggcgatttatcgataaggctgaaggttttggtaattcgcttatcgggggtagctgtttttttaatttcaagcggacacagcttgccgtccccctcgataattacatcaatttctcttgcatctcggtcgcggtaataattgaggtacggttcttttccggcattctgatagcttttcataatctcagaaaccgtgaaattttcaagcagtgcgccgctcatggctccgctttcggcaacctcgggcgacgaccattttgtaaggtagcaaacaagacccgtatcataaaaatacagcttcggcgttttaatagttcttttcaacacattattagaatacggatgcagcagaaaaataatccccagcgtttcaagaatttgcagccaggcttttgcggtaacctgatcgatatctgcgtcatcggcaatcgccttgaaattcacaagctgagaggcacgggcggctaccgccgtgatgaattttgcaaatttcagagcgtctattgcgcccgaaagctcacgaacatcacgctcaatataggtggaaagataagaggaataatacatattccggtcggtgtacgctccgctgagcattcccggcatacagccgttccatatacgctcatacatttcgggtgtaatgagcggctttataattttactgtctcttgctagcgcctcaaaatcggtggtaaaggggcgcggctgtgcgccgacaatttccctttgtgaaagcggcgacatatgcaaaagggcaactctgccggcgagtgactcttgaactcctttcatcagactgaaaacctgcgaaccggtcagccagaaatcgccgggatgatgataggtatccacatgaattttgatataggtgaacagctccggtgcatactgaacctcatcaataataatcggcggtttatgaagctgcaaaaacattttcggatcgttttttgccatttcccggacggttaaatcatcaagagaaatgtattcccgaccgatattttccttttcggcaaggtttttaagcatcgtggttttgccggactggcgcggaccggtaagcaaaattgccgaccaagtttttgacagttcggtgatgcgctgttctatatgtcggttgatataggccataatacacctcggctgagtataattttgttcattaccattatactttattatacccgcaatgtcaacgaaaatctcggctaaaatcagaagcaattctattttagccgagattttgccgttgcacttcttgatagaataaaaaatcagcacggcgtgaaaccgtgctgaaatgctttgtttatgcggttttgcggtggttatgctaccagccatacaaaccgttctatattgttacttccgtatgtacggtagatttgcttattttgaaaacctttgccgctgcgcggacggtagcgcccgtatcaagtatgtattcgcccagtatctccgccctgtcctgtgtcgcctctttcatacaatcaactccccttaaagcgtcttacacgctctctcactggttaattgtatgatttttcttcgctttttatgcctttttaagacaaaacggcacttattgattactgctttttgattttgaaaaacattcgatttttaacattaccgaacttattatcttttaaaacttgatcttgcaacttcatcttgtaagctgtggataattttcacaacctaaatgtcaccttcatatagctctgcgcttataaggcgaaagcctaaagcctatgaacaacaataccgcaacggacgcgaaaaatgcgtaatatgccgcttgcgtatgctgtgcgccgtcggttttcggaataagcgaaatatccgtaagctttcccgtagtgtaagaaacgctgtctgcaaaaagcgtccacgcgacatcatttgtaaggttaagcttaatttcatctgttccgaggggcaggttatcaaccgtggcggtaacaataacgaatttttctgttccggcaatggctgttggcgcggaaagcgtataatctaccgttttccaagcagcagaaaccgcgtttttggtctgaagcgaaaagtgctttgctttatcgaaatatccgtcggctattaccagtcttattttcaccgatgttatttccttatcgtagaccttatagcttatatagccgtcctcgccgtcggttttgccggctacgcttaagccggtttcgggatgctccgcaaacgcctgcatattatcagaatgactgtatacctttgaaaaatcggaaagttcatccgtaaaatctccgtatattatccccgaagaaccgtcgcggctcattttaaattcggcgcggtcaaggaaaagcgtccacgcaacgtcattaagcaatgaaattttaacctttttaacgtttgcgggcaaatcggctgttaaaacggtgcttttgaaattattgtttgtcgaaccgcttatatcggatatttcgccgtcaagaagatttacagttttccaagccttgcctaccaaaacctctacctttatatcgcgtgcggcgtcaaaaaaacctgtataaaactgtattcctattttcgccgaggtgatataagcgttattttcggcggcataggttaccgagctttccgtatttccgtttcctctgcccattacgctgagccccgtttcggggtgcgggttgtgaaattcaaaattatcggtatgtgattcgacttttgaaaaattctcaaactcatccgtcaggataatatctttaacctcgggctcgtcttttttgccgccgtcgtcggttttaccgccgtcaattacctttacatccttaagcgttatgccaagctcatccaaaaacagcgtccacaccacgtcgtttaaaaggctgatttttacaaagcgtgtgttttcgggcagcgccgcgcttaattcctgtgttttaaaaacggggtttgctgcgcttttaatatcctttgtctccccctctgtgagcggagcgtttacccattcgtccttatcggaaattttgtattcaagccttatatcccgtgaatacagaacataaccctcagccttttgaacgccgagcttcaccgccgaaaagtatttcccttcgggggcgttatacgctaccgagctttcaccgtcggttgtttttctgcctataacgctcaatcccgtttccggatgattcggaaaaacatcaaaattatccgttttaaaatcgggctttgataaatcggaaaaatcatcggttaaaatatcttcgccgggaacttcgggtttttcttccccggagtttccttttttaatatccaatattaccgaatctataaaaagcgtccagccgacatcgttaagcagcgatattttaatttccgcggtctctgcgggcaattcacagtatatcttctgaagcttaaaggcaagcgtttccttgccgataatattttcttcaccctcctccgtcattacaagagacttccactcggatttttcgtcggttctgtattccgcctttaaatctcttgaaacactcacaaagccgctgtatacctgtaaggaaatttccactcttttaaatgtgtcgccgtttttcgccgtatatgtaaccgagctttcgtcggtcacgtttttcctgcctataacgcttaagcccgtttcggcgtggcttgcaaacatatcccagttttcgctatgggcagagaccttgctccagtctgtcatatcgtcgtgtaattgcgcgttattttcagcggataaaggcaacacgcacactccgagcgttaatgtcagacatataagaattacaaatattttagatagttttttcatttcgcttcctccttatcaagtgccgttacattaagataatcgtacccgtcggttattatttcgtattttgagattccgagaataacacttttaagcttagccatatcgcttgaatctataatatcgttttggtccgcgtccaccgcagatgtatctatatttacagaatagccggagcagtattttttaattgcgataaggtctgtaatatcaacgtttccgtccctgttcgcatcaccgtatacaaccgcccctacggaaagcgatatgcaaagcacaagcattgtaaggagcaccgctcctgttataatttttttcataagctcaccttttttacatcagcaaagctttaaaagctcgtttgcggcaagaacggcaaacgccgcgtccgcattgtaaagcgggctgccgtgctgtgcggaaaacctttgcctgtacgccgtaataaacaagtcagctttttccgtatcccccgtcaatgctgcggtaaacgcgatcaagctccacgccataccgctcgggttatcaagcctttcccacgaacagccgaggctgccgccgcccgaatacagcgaattaaactttgaatacagcattgcagcccgcgcgctgtttgcgtcgatcacaccgagcattatcgggaaaagctgcgccgttgcgtcggaataccaggtttcccaatttaatgcggtatttccgtaaaaattcagataactgtcgttttgataaagcgattcaataccgcataaaatatccgcaattcgagctaatacctcggcagtcgctctgccggttgccttaagcagactgcggtatgccgccgcgccgtcataaacctcgcagttatccatcaggtaataaaaccgatacgcaggctttgcggcagtcagctttttatcgtgatcccaggttgaaagcattgccgaataaattctttgtattgctgtgaaattggaattaaaatacccgtaattaccgacggtattgcaatattccgaaacaagccttaaaaaggttgcggcgtatgaatcggtcgaatcaaagtcgcctgcggatacctcggtaatgctgccgtccgcgcttatatatacgttgtaatcaaacacagagccgtcgggtacattttcagcggcgttattaaggtgagctaaataccagtccatataatttttaacgtttgcggtatatctgctgcccgatttcagaagagctgcggctgaaatatttgcaaagtacggatttatgcttgccgccccgccgctcggcggtcgcgttacaattgcgccgtcggtaagctgcagcgatgctatccagctgttctcgctttccgtaaaattcatatattccgtttccttttcgctcggctcattgctgtatttgccgtttatcggctctcctataaccgtcatttcatcctcttccgagccgtacaccgcgtaagcaaaagcggaataacgctcattttcctttccgttctcggtaatgccgtaaagtcgcgcggaatagcatatgcggctgtcggtctcaccagttgtttcggttctttcaagaattaccgcgccgtttgtctgcgctgccgcatatatctcttcggcgtttgctttattttttataacgcctttaaataaaaccgtgcccgagcttataagtggcagtcccttatacgatttcagcgcagccgaatcaaactgcaaagcgctttgctcatattttggcgaatatttgtgcgccccgggggtcgcctgctttataacgggtcctactgtgtaaacgggcgtttcttccgatatatcgtcggtatacagctcaacgcggtcgatgaataacgtccatgcaacatcattcagcaaacaaacacgaaccgcaacggtgttttcgggcaaataagccgaaatattctttgttttaaaattatcgtagcccgaaatatcctgcgtttcaccctctgtaaacgcaatgccacgccattcgctctcggcggacacaagcgccgaaacggaaatatggcgggaattgtaaaaatccttgtgcagctgcagtgaaatattcagccgtgtaaagcgcttacctgcgggcgatgcatatgtaaccgagctttctccccctgcagcgccgcggcctataacgctgagcccactctcggggtggcttaaaaatcgctcccagttttcgctgtgatatgccgcaatgctccagtctgtcatatcgtcggtaatttgcgcggcgcctgcctgctccgccaaagctgcgggagaaaaaacgcctgtaagaagaacaacgcttaaaagaacacaaaaaatgctttttctcatatctgtcgcctcctgtttttatgccgtcggtcagaaatcgtgaggattatataatgctgtgaatttctccgttgctttcaagcacggtaaggatatcctcgcaaagcataaggcagcgcggcaaatgaaaaggtcctttccacaaagagcccttttgggtgtgtgaaacgctgccgtctctgtgcagatagccgtaccactcgccgtattccctatccgcaaaatgcgaaaaggtataatcataggtcttttcaaacatatcccaatattttttatcctttgttacggcatatgcaagcagtgtggatattaaaacctcgttatgcacccaccaaagcttcatatcccattccagctgctcgcacggtctgcccagcacgtcaacaaaatagaacattccgccgttttccttatcccagccgagctctgtatgccagtcaagtaaattcagcgcttttttcataagctcatcatccttggaataaagcgcctcgcacataataaaccacgagttttcgcaggagtgaccggggttaacggttctgcccgcggggttatctatcatactgccgtcgcttgccaccgtttcaagcacacacttaagctcgggcttgtagtgatatttcagtatatctccaattacctcgcgcaccgcggcggtataatattccgccctttcgggaatacagcggcgcagtatctgccccgagcttataagcaccataggcactgcggaatcgcgctgacttcttgtttcggcatacgatttcggcgtaattttatatgggtcgttttcggggtgacggtagatatcgagcatcatatcaaagcattttgccgccttagacagagcctcggtatctcccgtaagggcgccgtattcagccatgcctataacataaaagctctcggaatacatatatctgcgttttctcagcggtctgccgtcgcgcgttacggtaaaaaacattcttccgtcgctgtcggtgcagtatttttcaagaaattccttaccgctttttgccgcgttaagccagctctcccttatgccgtaccttgcacaaagtgcggaaaacgtccaaaggcagcgaccctgaaaccaaaccgatttatcgtcgttgtagcttttgccctctctgtctaccgaggttataaacccgccgtattccttatctataaggtcgcttttctcccagaacggaatacagtcgtccaaaagcgccgagtgaaagcgatttttgtattcggtaaatattttattttccattgccgttttcctccttggttttaaggtaattcatatattcgctgtaaaatttttcggtctcggcaagacccaaattcattctgtgccccggctcgttcataattccggtgtattggtagccgtatatctgctccaatttatcgtaattcttcatttctttaagcaggtcgggtatttttttggggcgaagcccgtctgtaaacggaactgcgaacatttccatatcaacccagaaatgcgttcccgtcttgcggcacatattcataatttcatcaatattatattcgctccttgcaaatgcaaagggaattataatatcaaggttttcgagtatcggcagccattccttctcataccagtgcatatggatgttgttaggtgcaagcgccaccggctttgtgggggtaagccgccttacaaatgcggtgtattctttgaaaaaactttgtatatccttatatttctcattcggaacagcgggataatcaaagtataacgagcccataatttcctcggaaatataccagccgtaaaatgatttatggtgtccgtagcgttcgttcagctccacagtcacccttttatgccattcaagagaatcgggcgaaaattcaaaccacgcatacatacccaccccgggaaaaacatacattccgcactcgtcggcggcagtcagtataacctctaacgggtcttcgcactttattggcattctgtttttgtaaagtttactcgggtaaaacgcttttccgtcgtatgtatccacggtcatattgtgctgataagcgtaatttcccgcgtcaaacacattctgaataagcaccgaggtaattttagccttgtgcatggagtagattatctgccgccagccgtcggcgtcaagattcttgagcccttcgttaaaataagtaccctctgcctcgctccagtggtaaagcgttatccagcagccgtctatcatcccggtggacggcacatccgattttacaacctcataaggtatgcgtattgtttcctctgtattgccgtcgttgtccttaaagtttatttcaaactcaaattttcctgttataccgccgaggtcgggatatattctgttagattcaagcccttttttaaggtcgtattttccgagcagcgccttaccgcctgcggtaaccgcgtaaatttccgccgcgaaggcgttttccgttgctattttcaattccggcgacaccttattcgaaattcttgccgcaggaatcggcgtacagtaatttttctgcattttttcctctccgtatctattttaaaagtgcatttgcatcgtccaccattttttgataggtggtttcgtattgcgcaagcttctggttaatatcctcgccgtttctcacatcataaagcaggtaaaacgctccgtagccctgctctaaaattccgtcggtatacgtcggtatgcacagatttttcgcaagcttatcatacatggcgcggttttccgcattttcaagggcttttttctccttgttatcctcatccgcagcctttaaaatcatatctataagcatgcccgcgctgtaaggagcgtctgagccgttggaaatggcgtagcccgtggaatgtccgaagcttttaccgtccttattatcaggtcctgcagggaaagccgtcaccccgaaatcaattgagaccgaaccgctctttttcaaggagttaaaggtcgcttcttcatacgcgtatgcgccgtgcatagccgccttaccctttaaaaacttattctgacccgtaacatagccgctgccgcagataacgtttttattgaatatatcctgaaccgtttcaagcgtgtggcgcatttgcggcgactttatattaagcgtgtatttgccttccttaaactcgaccgccgtgcagttattcgatgcctgaaatacctcgtcaaacatattctcaagccccgcaataccagcgtctgagtcgttgcactcacgcgctatttcaataaaatcgttccaggtccagctgcccgattcatagcgcttgcgcggctcatcgcgatcaaagccgtttgcttccataatatcgcggttataataaagcacatacggagtagccgaaactcctgcggcataatacttgccgtcgaatttaacaaacgtgtccattacatcgctgttgtgccctgttacgctgagatctacataatcgttaacgggggtcagataatttttctggtacattccgaggtactgatccacgcttatataaaatacgtctatggggtctttggcggcaatttgcgccgccaccttttgattccaaagctgctcgcccacagcctgaagaatttccacctgcttgccgtaggttttttcaaattcctttattgccttggtgtaatagctgtccttatcgctgccgtcgtacccgggcaccaaaaacgaaatttttttaggctctttggcaattttctctgcgcgctcgccgtccgccgcgccgcccgttccgttttttccgcaccccgcaaataccgcagagatcatacagatacaaagcgccgcggaaattaccgatttaatttttttcaatgtaatcatcctttctgtgaaagcttttctatcataaccgcagccgcaaggcatactctgcccgcgtccgcgttataaagcgggtaagcgtgatttttcattgcttttgtataaagccgcatatagctttccaccctgccctcgtcgcccataattgcggcggcataaacgaccgagccccaaaaaaagctgtcaggcagacttattttttcccagctgcttttcttttcgcctgtggaaaaattatcgttaaagcttttgtacagctgccgcgccctctcgctttcgggctttaaaagcccgcttgaaatcataaacagctgagatgtggcgcaggggtaaaaatcgctccacgcaaatttataagcaaccgtaccgtcgggggatattgccgtttcgtaatagccttttttattccaaagcagattttctatcccgttcgataccttttcctttgccgccgttattttacctataagctcctttttatccgcaaaaacgcttttataaagcttttccgcagccgcaagcccctcgtaaacctcgcagttatccataagatactgtattttataatcgggctttgttgttgtaagctctccctcaaaggttgccaaaagcgcggcggtcacgcggtcaatatctgcgccgttttgctttatgtatgcggcgtctccgcttttattccggtatttttccagcacgcaaagaaaggttgccgcataggaatcaaccgaatcgtaatgctttttgccgttatcggtgtttaccgtttcccgcttcacctttccgcccgatacctccgccgtgtaatcataaacggtgccgtcaagcccgttataatccgtatcggcggtattaaggtgcgagaagtgccagtcggcatattttttgacctgaccgaggtatttatcgctttcaagcattgcaagcgccgcaaaatcggaaaaataggggttaagcgtcagctttccgtccgccgcatatgtcatgggcaaagctccgttatcaagctgaagcgacgcaagccacgcggtttccccttcaactatttccttgtaaagcgatatttgctcctcgcggctaagcgttgcttttttcaaaatatcggctgccgcaggcggcgtttgagagctgtctgtatgcccgcccgtttcagaagaaaggcttttttcatttgcacagcctgccgcggatattacaaaaagcgatatcagcacggctgccgttaaacgtatacctgttttcatcctacaataccggtcctttctattccctctgtaaaatatttttgcaccactgcgtaaaagcctatcagcggcagcgcggttataaggcacgccgccgaaagtatggaatcgctgagcagctttatatccgagcctgttgtgagtcccgacatattttgcagttgattgccaagcgatgttgaaacgcccgtaagcgcaatggaaagaggaaaatttttattgagcagcatacccgtaagcgaataatcgttgtaataccaaacaaccgaaaacaccgttaccgtaagtattgccgcggaaacgttgggcaccattatttttataaaggtttcaagcgggttgcagccgtcaataaacgacgcttcctcaagctcctttggcatatttataaaatactgcctgaaaataaatatatacagtcccgagcgcatacccgttccgagcagcgcctgaacataaaactgcgcgtaggtatcaagcagacccattgttttaagatttacatagagcggtatcatatacgattccgtaggaactatgatattgaagatcaaaagcccgaacagcagatttcggaatttaaacctgaaacgcgcaaagccgtaagcgataaaaaggcacgaaaccacctgaaaaataacgcagggcagcacaataagcagcgtgtttttaaaggactcgccgaatttcagcagctcaagcgccgttttaaagctgaaaaggttaaacccactcggaatccatacaactgtcgggtcaagcgtatcatttacggatttgaaggagtttgaaagcataaacagcaccggataaagcattacaaaccccacgcccaccaaaaacacggcgcgcaaaattgatttcacaagccttacggagcgtttttttgaaagtattattttcttatccatttttccgtcccttaatttcccgaataaaccacaaaccgctttgaaataagctgtatcaaaccgattataaacagaatacagaaaaagtatattacccctatggtagcgctgtacgtgtagttattatttgtgtaatagctgcgcagcagctgcattaccttattatcgtaatcggtaaagccgtctatcactgtatatataaccgaaaccaaaagcgtaggtgtaacggtcggaaaggttatcttccaaaacttttcccaggcggttgcgccgtccattaccgccgcctcgtaaaacgaagacgggatattgtttatagccgaaagcagcagtaatatctgcacgccgctttgccaggttaaatcaaacatactgtttataatatcggtaatcgatttcgtaaccgcctcgggcagtccgagctccgaaaaaaccgccaccagatcaggagctttaaacatataccccggcgacatatccgtaacgcccgagccgctcatcataaccttatcctgtaatatactgattattacgcccgaggcgattataacaggaaagaaaaatacggttcttgcaagacttctgcctataaacctttcctttaaaaccacggctataaggaggctgaacgccgttatcataaccacgcgcggaaagaccgacgccacagaccccgtaagatactgaagaaagaaggtatcctttgtgaaaaggtaggaataattggaaagcccggtaaaatcggttttaaagccgtttccgctgacggtaagattacaaaaggaatatataaccgattgcgccatgggaacggcgaaaaacaccgttatacctacaatccacggagctataaaaagccacgcccagcgtgccttctgcttttcaagcccgccgcctttattgcttttcataatcattcctcccccttaagactccacccgataggtgaaaacccctttgccggaacggatataccgctgttttcatacggcgcatcgccgtaattcacatatacgcccataccgttttcaaaaagcgtttcggtaacatcgggcgataaacgcttgtgcgagaccattttcttatcggaaacggcggcaagatactccgccgaaattttatatttgctaagcgcagatgccttgcaaagcccgaaatctatatatgagtattcatcggcaagcgtatcggaaagctctccagcgttttcaaagccaaaggcgtatttcagcgccgttcccgcctcaagcgcctttaaaaatgcggtgttttcatcactttgaccgttaatatcgggcgatgtcaggtaaaccgaaccgtgcagcgccattgcgtaaaacggaatttcatactgtgaaaacaaatagctacccgaataaagcggcgtgtcggttatggcataggctgaggaaaaaccgtaagcgcaggcgttcggaattactattttctcattttccgaaagacctttaagcgccgttcgccacagccgctcgctttgcgctctgtctacggcacggtcgccgaggtcggaatatatcttattcccgagcgttcctaccgaataccccgcagtattaaagctgccgaagcacttacgagccgcagccgcagccgacgtaattctttcggggcttaaaagatatttaaagggcgctttatccgttttttgaaaggtgctcattttatacctgtaatcaattacgggttctttgcgcaccgtctgcgcggacgcggattttttggaatatccgtgttcgcttttaggcatatcggtgaaattcagccccaaatacgcctttatgccgagcttttcggcggtgcttaaaaaagcgttaagcccgcttttgccgccgagagcgcgctcgggctttaaatcggcggtaattccgctttcatcggcatttttataccagtaaaggtaattaaccgaaaaatcctcaacgccgccctgctttaaagcctttaccgttttttcagccgctttaaaatccgtaatcggcattacccgctttacgggcagccccaaaacgctttgctgcttaacagccccgcctataatatcaacaaaaagcgcgttgccctccgctttcagggctttaagcccctcttcctcggcaaggtaatttctgtaagaagctgccataccgttataatccgccgaatcgcagacgcggtactccaccgaaaacttttctgcagagcagggcttgccttcaaacatattgacctgggtattttcaaaggttttctggctcacgctcacaagaatattttccctgtaaacatattccgcgcaaacggtggtatagggtctttttgccgtgctgccgtcggcattcacagccgcccttgccgcagcgtttgtaataattgcgcaaaatgcggcgttgtttctttttactccgaacacgggaagataagcctttgattgcggcaatgttcttgtgttttgctccacagcgcaatcctcgccgtaaattctcgccgaatacctttgttccgaatagccgaaggaggatattgctccgcagccgtcgggaataaacacatacccgtcgtcgctgtcagcgccggcggaaaatcccggcagcagcgttacggaagtaagctttacaagattgctcttttcctttatttgcgaagaaattatttccgcacgaaagccgtaatcggtaaccgtaagctcaatcggtattaaaaagcccgcgctttcaaaataaaattcaattcttgcaccgttttttatccttttaaccgaaaatgttttccttttaacggcggcggacgtactgttttgctcggaaatattggagtcgcggtcggcgtattttattttaatcacgcttgaaagctccgaaacggctgcggttttcagtccctcaatgtcgtagagtccgtcgggagcgcttgaaaaaagggtgtcgtttttcttgtcaagcaatgttaccgccgcgtcaagcgagcttaccgaaagtctgaagcggccgttttctgcgataatatccccatcgttttcgggtgaaaaatcaatctgcgtcagcttttccgtaaccgtaccgccgctgtcgctcgaacgtgaggcaaccgataaaagaagaattattccgcccaccgcacaaaacgaaagcgcaaaaccgagaatattttttaaaagtacctttcttttcatacaaacaccccctacgcccttatttcgcttattaccattgaaataaagctcaaaagctgcgcgaacatactgtacgccacggtgataataagtattaaaagatacataccgaatacgctgccgaaaaggacaagcagcgccttgccgccgctgtactcatgaacctctttgttggaaacaaaaatgtgcaccgccgtccatataagaccgaccgacctgattattccgtaaaacgcctgctctttaagcgaaaaaacgtttgatgaaaccaaaagcgtaacctcggttataataagcgggataagcgcgtatgaggtaaatattattatttcaccgaatttacccttaccgtccgccaatgtggagaccgcccaattgcatataacaaacagcaggaatattccgagagtttcggcaagtacggcaaaaatattgaactgtctgcccgaatcggggttatagtgaaacgccgtaagctgcgtggatataatacctaccgccgtaaatacgcatagtattaccgccgcgcatatcccgctgccctgctttgtttctttaagtagggaataccccttaaacggacttttaagacagtaaaacggataactgcgtgcgcttaatacgcggttgtattcgtttataacccgcctttcgcttaccgtaagcgccgcaacaataccgagtaagaccgccgcaaccccgataactaagaacacaaagcccctgcgcattgcttcgtcccgccgtgcggcaaatgcgttcgagtagttttgtcgactgttgcctgttttgtagtatttcatagcggcggcataatcgcccgtgcgctcgcggatttttcccatacctatattggcaagctcgtaatatgcgtcctgctttaatatggctttccaatgctcttccgattctccgtacagccctttattgtaaagcgaaagcgccgctcttacattaagcgcgaaatcggtcggttcaaaaatatgcagtccgcctattccgctgtcaagcacaattattttgtcgccgagcgtatcaatcgccacgggcgatacaaacgtgccccttctgttgcccgctccgccgaaggcataaagcaggttggtgctgccgtcatactgaaaaaggcgttttcgggttgagtcaagcagtgttatatagccctcgccgtcaaccgctatatcggaaaacgaggtggttatgtcaagatttgaaacactgtcgaaataggtttccgaatcgccgtaaaacgcctcgttgccctcgtcatcaagcaatatattcacactgttagggttgattttccttacctgtccgccgctgctgcccgttcccgattttacggtgtaaacaaaattttcacggtcaatatcaaactgaacaaatgaaaccggaacgcttctttgcagacccgccgcagcgtcgcttgaaagtatgcgccgccaaattcggttcataataacctttaaattcacttcgacccggttgctgccgaaaaatcctaaaaagctgccgtccgtatcatattgcagagcgcccgaatatgtattggccgaaattacatataccacacctgcgctgtctgccaatacatgggtcggtgcaaattcaaaaccgctttccaccttatcggcaggcggtgcagaaatgaccgatgtgatattaccgtcgttatccgccgtataaaccgccgcgccgcttttatcggcaacgtatatcttatcggacgcggaaacaaaaatcccctctgcaccgctgaggtctaccctgtttccgtttcttataagcctaatatctctttcaaactcaaggcttgagcttaaaaccgcaatgcggctgttgccgctgtcaagaatatatatttcgcccttttccgaaacataaatatccttagggtcattaagctgcaccccgccgaagctttttttgcccgaaatcggcgcatatgccttatacggctcgggaacagcctgcgaaacacccgatgaatcataggtatagctgaaagaggtctcgccgtcggcaaaaacgccgacagacgtccaaacacccataaaaacggcaattattaaaattatcagcggtttgacgcgtttcaagaatgttcccctcctctttatttcattcccgagcttgacattgtttctattattcgtgattgcgacgctatgaaaagtattatcggcggcagcataagtaagagcgaaagcgctgaacccgctcctgcgcgggctgtaccgcccgccacaacctgacttaaaagcgaggataccatttttatcttttcatcatacactaactgcgacatctgcgtagcgcctgtagtgttccatattgtctgaaaagaaaatatcataacggtaagccacgccggtttaacgttgggcattgcgatctgccaaaatattctaagctcgcccgcaccgtctattcttgccgcttcaagcatagcctcgggtatctgccccataaaattcatcataaggtaaagccccagcgccgattgaaccgagggcagtatatatgcccagtaggtatttatcataccgaacctcgacataacgatatactgcggtataagcattgcggcggaagtaaaaagcaatgaccatttaacaatatttgaaaaaagatttttgcccacaaagctgtgcttcgcaagcggatacgccgccatacttgaaagcaccaaatgcccaacggttgccgttacgcttataaacaccgtattgaaaacatactttgaaagcggcacccaaaaggtgtcggcaagaacgcccacctgaacaaagttatcgagcgtgggtcttcttacaaacaggcgcggcgggaaaatatatatttcgtcaagcggcttaaatgccgcactcaccgcataaatcgtaggcaaaagcataaataacgcaccggcgaaaagaaaaatgaatataaccgccgtgccgccgaatgaacggttaagccgcttatgaaaacgctttttcactgaatgttttcactcccccgttaccgacctatacgtcggataatatgcgataccacaaaatttgtaaacatcatcataacaaacagaaacaccgcgatagccgacgcatatcccatttcaaaacggaccgttcccacatcgagcatatatgtaagcagtgtgtccgcgctgtattgcgttgtgggaaagcccgcaagcgactgcacaagcgcgcccacaccgaagcaagccgctatctgcattaccgcgctgaaaagcagctgcggtgccattgagggcagcgtaatataccaaagctcctgccagcggttttttataccgtctattccgcccgcctccgcaaggcttttatccatgctctgaaagccggctatgaacgtaagaaagcccacgccgaagcttgcccaaagctgaaccgttataagcgcgccgagcattgtttttgggtcgctcagccactgctgcggctcggaaattacgccaagctgcataagcacgctgttggctatgccgtattggtcgcccgaaagtatcatagcccatatggcgtaaagatttccgcaaagcgccggcgcgtaaaagcaaaaggtcataaccgttctgacggctctgcccatttcatttatcagccacgccgaaacaaatgaaataagatagctgagaggccctgttataattgcgaaaacaagcgtgttttttaaaacctgcgggaaaatctcgtcatccaaaaacagtctttcgtaatttaaaaaacccgtaaatttcggcggttcaagcatattgaaataggtgaacgaaaggcaaattgccgcaataaccggaattaccgtaagtaaaatgaatacgatcatatacggagccatcatagcatagctcaccgcactctttttaagacgggacgcaagcccgtattctttacgtttcacaaatttcacccgccaagctccgttatttttctttttatttccctatcgattgcagcgtttgcattttctaaagcaactcttgtgttaccgtgctgatacagcacctctctgaaagcgttatctatacaccgcgaggtataatatccgccgggtatttcgggaatttccttaacgcacgcccgctgcccgtttaatatttcaagctccgcgcgagtccagttaaggttgccgaacgcttcaagattagccgttgcgtgccttgccgccgcacccaaaaggttttctgcggctgtgccgtaatcggtctgaacgtcggcagaggtaagccactgcataaagcgccagcagttttccttattacgcgcgtttttaaacattacaaccgccgtgcccgaagctccgcccgatcggtcaatcccgccgtttttctctattcccggcataagctccattttccaaagcccgcgtatttcgggggcggcgctcataagcgtgccgtacataccgtaggacgctacggcaatgggcatttcgcccgttctgaaccgcgtattgaaatcatagctcaattcaaagctgtactgcgtgtaaaactttgtccacagttcaaaagctgcaagcgccgcactgtcggaaagggctgcgccggtaagcgttttattgtaaaagctgccgccgcactgcattaaaagcgtggggaacagatcctttgcgccaagtcctaaatccaccgcgcccgacgccgtaacagccgtatacggcagccccacggtcatattattacgctgtagccttgcggttacgtcaagcagctcgttccaggtttgcggtacggatattttaagctcgttcagtatgtccgtccgcacaaacattacaagatatacctgcgtaagcggcagcgcatacactccgttttttcgggtgtagggcacaagcgcgtcgtccgtaaagcgtttcgccgtttcgtcaaagcctttatatcctttaaggtcttcaagcgcattgcggcttgcaagatttatcggctgcccgcgtgatacgcctactgccacatcggggttattccccgtgagcgccgattccgtaagcccgccctgcactaaattaacgtttacgggtattttggtttcttcggtaaaatccgatataagatttttaagtatctgcgcctggtcgcgtccgtcgttcagccatacgttaaccgcttctgcctcgtcatactcgctcattgagtcgtaatcatcggaaaatgcggaaataaatcttttaaaagaaaacactgcgttgcttataatatttcccttagccgacggcagccgatagccctctccgtgaaatataaggtaatcaagctccataggctgattttttgcggagaccgcaaaatccgaaagcagcgatatattacttctgaatgaggaaagccgcgccggaatttccgacggtttttttgcaaactcgcccagctgctccgccacgcgcttaagccccgaagaaccgcctgttttaccgccgtttgccttttcatacatttccgccgcgcttgtcaaagccgaggaaagagcggaaaacctctcccctatatcgggtatttcacgttcgaggtagtagtctctgtataaatcggggcttgtgcttgtaatcattattattcttctgtaaaggctgttcatttcgcggcttaccgcgtccacacggttaagggcctcggcaaagccgtccgccgtaacttcaaggcttacggtattcttgccttttttaagcggtattaggcagacgccgccgttttcatcggcaaccgttttatttctccacccggaagaatagggaaagcttaccgaggaaagctctttatatggtatttcgccgttaatataaatatttcgcagtacagacatacctatctcggtgttttgcctgtatttaagggtaagaaaataaagtccgtcccgcggggcgtttaccgtgtaggttatatacatcccgggctttgaccagcccgcgccgccgattatattgcgtttcaaagcatatgggctgttcggactggttgcggaatttgaacggtcgtaaaccggatagagtgttctgtccgatttataagccgcgtcctccgcctctatgtaaataaaagtatcgtcctttattatttcctttccctgttcctcgtaattttttatcgcttcgtttttatttttaagattttgcggcggcaaaaggcgcagatcgccgaaaattataccgtccgaaagcgcgttaaagcgcagcacatttttaccgctttcaagctttataataaacggtgaagtgctgtatcccgaataatcggttattccgcactcctgccacaccgcaacctgcttttgcttttgtatcaggtcgttcccgagaccgtcggttttcatatcgccgtcgttttcccatactctcctgagggtgcaggagcccgcctcctcaaagggcttttcgccgttgagctcaaacgaaaacgcaagctcgttcaccttagaggtatcggtaaggtaggaatatttaagcgatatataataaagcgcggttttcggaatatcaagcgtgtattccgcatatccgccctccgaaaccgcaagacccgtgttttcgcacggtgtgacggtttcagcgtttaccgccgcggaaagaacgccgcggcactcgccgtcggcataaaccgtattttcgtttttcagcatatatcggtaataggagtcttccgcaaagagcgctgccccctctttactctcttccgccgcgccgtttgaatacagtgccgcgcctgcggtaataaccgccagcaaaaccgaaagagcttttaaaaatacttttttctttttcatagcgctacttcccatccgactgaggttcttgtgcctgttcgttaataaatgtcacgggagaacagcccattgtacgcctgaacgccttattgaaggtctgaagatccgagtaaccgagcttcagcgccgcctttgtctcgcttattttaccgtactgcatcatttctattgccttttgcattttaagattatttatatatttctgcacggtaagccctgtcgcctttttgaacgtattggatatgtacgagggcgtataccccaattcctcgcacatctgcccgatttttattttttcgtaaatatgctccgcaatgtagtttgccgctattgaaaatgcgcgcgaagatgaatcggggtttataacatcgaaataagtagccgttttggtttgcgtaaaagcgcggtaaaccgtaataagcatctgcttgatatatgccgctaccatggaattatagaattcgcccctgttatatatctcatcaagatttttggtgagcggcgctaaaagctcacggcagtttcctgcggaaaaaacctttgtgctttcataaaatcttttaagcgccactatatccgcgtcatgggtagtgctgtcaaaatcaaagccgatatagccgtaccgcaggtcggaaccggtggtctgaattgcgtgcatagagcctgcgggcgaaaaatgaacgtagccctccattaaaagctcggtttcgttgtttgtggtaaaaagcccctcgccgcttataacatagcttatttcgtgacaccactgcttatgcagcggaacctgataacctgaaagacagctcagatccccgagctggtaaagcgttatgccggaaaaattaaccgctgttccctcagtattatctttaaaaagcttatcaaaatgaaactgccttccatgcacctgcattcagcgctcgccccttaatttattttttctttttgcttttcacaataagcacggcacacacggctgctgccgccgccactgccgcagaccccgcagcaataagcacggtcacggtatttttgccgctttccgattgcggcttatcggtatcggactgtgtactgccgcttgaagagccgtttgtatccgtgctttcttccttttcggactctgacgcttcttctgtgccgtatttgaccgttacggtattaagcacggtgttccaaacgcagctgtcctttacggtgaaagggtttatctgtatttttataaacttacagcccggttctattttgtcgcggttggtaaccgaagacatcatccaatacgccatttcctcatttatgtaaaggttttcgtcaaatgtctgcggtgtggttttgatcttaacctgtttccaatctctgttgttttcggaaacgaaaacgcttatatcggtatcagcgtcgcccaaaccgtttacgtgcatacagtctattttaaacgaaattatatcgtcgtccattttgtaaaccacatattccgttccgccgacatccccgttttcggaatacttttcgtaaaaggtctcgcctgtatccttgttcttttcgtaacgcattttatccgatttttcaaagcaaagcgggtaattatcctctaatgtgtccttaaattcgccgacttcggcgtttgcggtaatacacggtacggcaaataccgaaattacacacaaaataaccgtaaacaattttaacagagctttcataaagaaattcctttccgaatcagatttttctatattcatattatacacgatttttaaattttttaaatggttttatttttagtatatttgtgtcataatttatttatattagtctaaaaacaccatttttttatcatattacagttttttagtatattcattgacctaataatgttgtctgtttttgcttttttaagcaaaaacagactgccgctgttgtaaagggcggcagcctgttcggatatttattatgctgtttttaagagctttttacgcatattgataagatcgtttccgtcaagcttaccgtcatgattaaagtcgcatgccggtattttcttatcggtcacttccgcaacggtctttttcaaatatacaaaatccaatatatttaatacgccgtcaccgttggcgtcgccggtggtgtatacatcgttgaaaacatagactttatcgattatagccgtataattggtgtaatttttaccgttggggtcaagggttattataaccgcgtcggtattgaaaggcagattattacaaagcagcttatagcggtaaacgctgtacgctccgttatcatttacaatgttgcattttgtaaaatcaaacgcaagcggtgtaagggtatcgcccgaaacggcggttaaggatacactgtcctttatatccttgaaaaatgagtccataataagcatttccatataaactgaggtgatttccttaccgctttgcgccgcgtagcgtataacccctgcggcgtcattagcctccttggtaactccgtaatatgtgtttgcaccgaaggtttcgctgcgggtctttacattgctgctttcagacgttttttcaagagtgtcaagctcatcaatcataacctttgacgaaacaagctcggcgcttatctcgtcaagtcttaaagtatagcccaccccgcctgcggcaaaattatctgcggcatggggcgccaatgtaatgcgaagtgcggttgttttatcggggaatgcagaaacatttgaaaccaaagctcttgaataatcttctttgcccgctaccgtttcacggctgtttatagtaagcggcacttcggtaaatacatccgagccctctgtaagtgcctcaagctttataagataatcacaggaataattctgcacaaacgcgtccattaaataaagagcggcgttaaattttgttatatatttatccgcaaaatcataacgtaaaacaccggttttacttccgtccgttctttgcgccacaaaaatctttttacccccgtaagtatcataggtccctatgacattttcagaagaaaatgtaacaccctcggtctcgttaaacagtgtcgggtgttcgccgtttgaagtggtgtagctgtatgtctcggtgtagcccgagaaaacctcgtcgaacgcctcggtcgtaaagcttgccgttaagggttcgctttccagtccgaacgactccgccgccttaaccgaaaccgtatattcggtattgaccgaaagtcccgaaaccgtaaagctttgctgcggcttcatattatttatgtcaatataataatcggttatatacgtctcgctgaaatcgcagttacccgttttattgtttgttaaggttacattatagctgtgaacatagtcgctgtgagcagccgacggaaaagctatcccggcagaatcggcactgacgttgctgacggttattcccgcattttcgggaaataccggggcggttctgtcatttattcgtgcgtcggtatatacaaagctttctgtactaagcggaaggcttaatacccaaggtgcttttgcgtcctttaccgttttcggggatacaccgttatttatacgtttacggtttacggttattttccccgcgctttcgtccacattcacaagaaggctgccctgtgcctgataagcgtcgctcgggtttacatccggctctaacgaaacgtactgcattgaggtgcagtctatacaggtaaattcaccctgccaaatgcagcgttcgttttcgcagggtctgtgtgaatgagcgctgaaatataccacctgcggataatttttaagcagctcctttaaaagctttgtattacccgcgccgtgaccgctgccgtaggtagtttcaaatatcggctgatggcagcccacaaatataggtgcgttcggattttcctcaactgccgcgtcaagttgggctttaagccatgaaacggtggtttcggtatatcttccgtcaattgcagcgctttcgctgttaatgcctataaaatggtaaccgttcactttaacgttgaagttaagcgtatcgtatccgtaagcggtcatatacctctgctgcgcgtccgccacagtttcccgctcataataggcattttcaaattcgtggttgcccataagcacaagccgccgcggcgctgttttgctgtcggtaaaaacagcatcccacgcggttgtgaatttggcaaactgggtttccttggcactgttcgccacatcacccaaaacaagtatcgcgtcaacattctgttccttgtagtaattcagcatagtataaatattactgtctattccggtagtaccgtcatgaaaatgcaggtcgctcatgaccccgaattttacgccgccgctgccctcggcggaaacaggcgcaaaaacaagcgaagtgaaaataacagatagtgcaaagaaacaactcagaaacccggtaaaagcttttttcataaaccataaccctttcgtattttatttcgcacagccagatatacagtgttgcataatctgtatcatctttcgattatattttacaatattttgtggattataacaatgtctgaattttgcgggttatgtgtcttaatttatctttatcgtgttttataaaacatcattctgaaaaatttcatcatttcctttgcggtaattatgccgaacatcgacgcctgtacgccgaaaacaagattgttttagatatacttcccgaaagatacagaccgcattttacatattttttctcataaacaacaaaataaagaacaagcagccgcctattagcaaactgcttgcactcaatttctcattttaactctttaccccaactattgacaaagagccttttaaaatttatcctttttctatttaaaatatttcactgccgagcggaacattttaatatcgtaatttccgggaacgtttttataaaggtcggcagcatatctttcagagtgacccattttaccgaacactctgccgtcgggtgaagttataccctcaatagcatagtaagagccgttcgggttaaagtgaatatcacttgtagcttctcccttttcatccacatactgcgtagcaatctgcccgttttcggcaaggcgatgtatcagctcgtcgcttgctataaacctgccctcgccgtgagagataggcacactgtatatatcgcccacctcggtatccgcaagccacggagatttattcgatgctatgcgcgttcttactatttttgactggtggcgcgctattgtattatatgtaagggtcgggcagttctcatcggtatcgattatcttaccgtaaggcacaagccctaactttataagcgcttgaaaaccgttgcatatgccgcacataagcccgtctctgttatcaagcaggtcggtcacctgctctttaaccgcggcattgcggaaaaacgcggttataaacttgccgctgccgtcaggctcgtcgccgcccgaaaatccaccgggaataaacaccatttgcgcggttttaaggctgtttgcaaattcttcaacgctttttgccacattttcggcactgcggttgtttataacgaatatttcaggctctgcgcctgcgtcgcgcatggcctttgcgctgtcatactcgcagttggtacccgggaaaacaggaattaaaaccttgggctttgccgtttttactgcgggagaaacgcgattttcagccgtataagaaaatgtcagcatttcggtcttcgggttttccttattacagcggtaaacgctttccagtttattttcataaattccgagcagtctttcaagccttatttcctcgtcgttataagaaattttgccgtctgccgttatttcgccgatttctgcggcatctgcaatattctcggttacttcaagcaaaaatccgccgtagcaatagccgaaaatttcgtttgcggtcagattatcggcgaatttaaagcctaacgaattgccgaagcacattttcataaccgcctcggctataccgccgagggtgggcgtgtagcaggaaaccgctttgcccgagcgcaaaagcgcagttactctttcataaacatttaaaagcgagacggtatcgggcagaccgtttttatcataatcgggctttattaaaacaaccttattgcccgcttttttaaactcgtttgatactatgttttcggttttatcggttgtaaccgcaaaggagactaaggtgggcggaacatctaaattttcaaagctgccgctcattgagtccttgccgcctattgccgccgtttttagctcggtttgcgcctttaacgcgccgagcagcgccgcaagcggcttgccccatcgcttttcgtccttattaaggcgctcaaaatattcctggaaagtaaggtaaacatccttaaattccgcacccgttgcaaccaattttgaaaccgactctataaccgcaaggtaagcgccgtggtaggggcttttctcggtaataaacgggttgtagccccacgccataagcgagcaatcgtttgtgtgctttttctcaaccgaaattttctgcaccattgcctgtatcggcgttaactggtttttgccgccgaacggcataagcaccgtgcccgcgccgattgtggagtcaaactgctccgaaagcccgcgctttgagcaaatattaaggtcgtccgccaaggcaagataattttcggtaaagccgccgtccacctttttctcgtaaggctcaggttttgaaacaacggcggtaatatgcttttcggcgccgtttgaatttaaaaattcacggcttatgtttacaatcgccttgccgttccagttcattacaaggcggggttcttccgtaacagtggctacgggcactgcctgtaaattctcgctgtcggcaagctttaaaaattcttccacgtctgcaggggcaaccacaaccgccattctttcctgcgattcgcttattgcaagctcggtgccgtcaagtccatcgtactttttaggcacggcgttaaggtcaatttcaagaccgtccgccaattcgcctatcgcaaccgaaacgccgcccgcgccgaaatcgttgcagcgttttatcatacggcaggcagcggggtttctgaaaagcctttgcagctttctttcctcgggagcgttgcccttttgcacctctgcaccgcagctttcaagcgattttaaggtgtgcgattttgaagaccctgtagcgccgccgcagccgtcgcgccccgttgagccgccgagcagtattacggtatcgcccgcggcgggtgtttcgcgccttacgttgcaggcgggcgccgcggctataaccgcgcctatttccatacgctttgcggcgtacccgtcgtgataaatttcgtccacaattcccgtagccaagcctatctggttaccgtaagaggaataaccgtctgccgcggtggtaacaatttttctttgcggcagcttacccggcagtgtctcagatacctttttaagcggatcggcagcgcctgttacgcgcatggcgccgtaaacataagatctgcccgaaagcggatcgcgtattgcgccgcctatgcaggttgccgccccgccgaacggctctatttcggtggggtggttgtgggtctcgtttttaaagagcagcagccagtcctcgtccgctccgtcaacattcaccttgattttaacggtgcaggcgtttatttcttccgattcgtccagcttttcaaggcagcccttggcttttaaatatttaaccgcaacggttgcaatatccataaggcaaacgggttttgttctgccaaactctttacgcattttaagataatcgttatacgcgctttgcagcatctcatcctcgaaaaccgcgccgtctatatgagttaggaatgtggtatggcggcagtgatccgaccagtatgtatcaatcattctgatttcggtcatagtggggtcgcggtgctcggacttaaaataatcctgacagaatttaatatcgtccgtgtccattgcaagcccgtatttgcttacaaaatcggcaagacctttattatcaagcgaggtaaacccgtcaagcgttgccacggactccggtatattgtattttaatacaagcgttagcggcttttcaagcgccgcctcgcgcgcctcaacgggatttataacatactttttaatcgctttcagctcgtccgcggtaatatcgccgtaaagcatataaacctttgccgtgcggataagcggtctgtcaccccttgatataagctgaatacactgcgcggcggaatctgcgcgctggtcgaactgaccgggaagatattccacagcgaaaaccgccgcaccgtcgttttcaagacacaaataggtattatcaagctgcggttccgagaaaacggtttttaccgcgtaatcaaaaagctcttttgtgatattctctgcgtcatagcggttgattacgcgaagtgatgtaacgcttttaatctgcaaaagcgtatttatatcgttaagcagcgctcttgcctctgccgcaagttcccttttcttttctgtaaatatacggtataccatatcagttttcctttccggcgttaagcgcctttaagcctatatccttgcggtaaaacgcattttcaaacgaaattttttctgccttttcataagccgcgcaaagcgcctctttaagcgtgggggcggttgcggtaacgcccagcaccctgccgcccgaggttacaagcctgccgtccttattttccgcgcctgcaacg

SEQ ID NO: 2930 - DNA, 13247 bp, Unknown
  16S sequences of unknown bacteria
tgccggacatggtgcagccatcgccgtaggagaacatctcatggataatttccttgatggtcttgtcctggtagccgggttcccgggtcttgatgaagtaggcgttctccacgcagcgggtggcgtcgaacatcaccttgatgccatgcttgtgcgccagctcggatacggccttgatgttggcaatggataccggctgaccgcctgccaggtttacagtaacagccaggcagatgtaggggatatgctccgcgcccacttcgtcaatgagagcctggaacttggcaaggtccacattgcccttgaagtccagaatggcagtggggtcatgggcttcgtcaatgatcacgtcccggaaggtggcgccgttgcgctcctgatggaaccgggtggtggtgaagtacatgttgcccggcacatagtcgccaggcttgatggtcaggctggagaggatattctcagcgccgcggccctgatgggtgggtaccacatacttgaagccgaacagctcccggacagtttcctccaggtgatagaagttgcgggaaccgccataggcttcgtcacccagcatcaggccggcccactggtgatcgctcatggcgttggtgcccgagtcggtgagcaggtcgataaagcattcttccgacttcagcaggaaggtattgtagccggcagccttgatggcagccttgcgctcttccttgttgagggttcccatcttttcaaccatcttgatcttgaagggctcgggggcaaacttcatcatgtcttccattgttaaaatcctcctgtttctgtaatttcattccgatcattatgcgttatgtatgatgcatcacgcatctttcgatttcattataaccggactggcgccaatgtcaagaggtttttcagaaaaattaccaaaaatttttccgcaagggggatggcttgtgttttaatgggaagttttgtataataacttcaatcaccagagtaaaagcgaggccagtgaattatgagcgaacttctccagcgccgatccctgagcgaacaggtctatgatgtgctgatccatgatattgtcaccggacagattgccctgggggaccggctgatcaaccgggaactccagacccggttcggcgtatcgtccacccccatccgggacgccatcaataagctctatcaggatggtctgatccgggagctgaccaattccggcgcccagctcatcgactttgaccagcagtatgccgaggagctcaaccatttcattatgatgctggcctgtgaggcattggctctggcctcccagtcggaccagcaggcagagattgtccggctgctgcatgagtatcaggacgccatggaagccggccaggagaatgataccgaatacttcggggcggattaccggttccacaaggtcttctttgactactgcggcaaccgcttcctcaaggagacctacaagcgctacaaccgcatccggtcgctgctcatctccagtgccatgcgggcttcccgggatcgccagccgtcggtggaccagcaccggcggatcaccgctgcctttgaagcgggacagtttgacctggcccgggaacagatgcgggagcattatcagtacggcgtgcatctgcttctcgaccgggagaaccatgcgtaacaaaaaaagacctgtcttttccatgggaaagacaggtcttttctgatgccgaaaggcgccggacgacgccaaaatttcatttttgatgcggaaaccggagcacagctgatttctgggcaaaaggagttatttttacaattatagcaaaaaatcgggattcagacaagttcaatgttacaaatatatgaaaaactgcgtaattatgggaaaaatccggcgtttttgataaaatgcggttgggaaccacaaagcacttttactaaaatatcaattccatttttgtgaatgaaatgttacaatatgtcatgaaaaagaccttcctgcaggacgtatttcgttttttgtgggattgggaacccattcaccaagttccgggagtgtaagcccggcaacagaaatttggaggaaaagtatgaaaaagcttctgagtctgactctggctgcactgatggcagtatccatgctgtccggctgctccaatggcagcgacaacagctccactgcccagaacagcggagaagagcccaccggcaccatcaccctgaagatcgctcacaacatggacttcgtcaccattccggacgcggttctggctgccggcgagcgcctgaacgagaagtatgccgccgagggcaaggatctcaagattgagtttgaaaccgactacgcccgcatcgactggggcgagtactccaacaacctgatcttcgcccagaagaacggtgaaggcccggatatcttctcggtcagcgacctgtccagcctggttgaagccggcatgatgctggatatctccgacctgatgaccgatgactttgtagagggcatctacaccccttacatcgtggacggcaaggcctatgcaatgcctttcgacctgcctgtacgcgtgatctactacaacaaggctgccctgaaggaaatcggctggactgacgagcagatcgaagctctgcccacccagatggccaacggcgagttcacctgggagcagttcctggatctctgcaaggaagtgcaggacaagggcgccgctacctggggcctgacccatcgccccggttccggcagcgacttcctggatgtcatgatgaccctgggcggcgagtactacaatgacgaaggcaagctggtattcgacagcgaaggcctgcagcgcttcttccagcagatctatgacaatgccaatgtcaccaagatcactccccagaacctgacccaggtggcctgggataccatcaacaccatggtaggcgacggcaccgcctttgcttactacggccccctgtactcggccacctatgtagccggcgctgtggacaagacccccgagcagttcgctgaagatgtgggctttgccgtattcccggtatccgagtacaacgatactcccttctgcatcgcggctccccagggcatgggcatcaacgccaccacccagtaccccgagatctgcaaggatctgttccgggaactgtactgcggtgattccatcgatcagctggctcaccatgccgacaccatcttcaccctgtcgtcggtaaaggctgccaacgagatggaggacatcaagaccaacccgatcctggaaaaggtgggctacatggctgacctgtctgtaacacctcccaatgtggatggcctgaccacctacaccaacgagctgttcaagcagattcagctgctggaactgggtcagaccactcctgacaaggctgtatctgacatgaagacccagatcgagatcaacctcgatgctgacctggttgaatacaagtaaaccattttcctgaaaaggcagtgagaacagcataggctctcctcgcaagggggtctatgctctcattgttattatgcgtattttcgggacagcggcggaatggcttccgcccctctgtccccgggagggacactatgaagcaaaatatgcgacagaaaaatatgcaggcctatctgttcctgtcaccgttcctggtctttattacagtcctgtatatcctgccggcgatcctgaccgtcattatggcatttaccagtctggattccgcctttatctggaagttcaacggcatcaataacttccgcaagatcctcatggaccccaatacccccatcatcgcctggaatacaataaaatatgtgggcatcaccatctttctgactgtggtgctggatctgttctttgccatcatgaccacctattttatccgggacgagcgcaagggcaatatcttcaagggtatcctgatgatccccatgattaccccggctgtggtgtattcggtgctgtggatctggctgctggaggccacccccaacggccttgccaacaaggtatatatggcgctgggcggcagtgagccgctcaactggatcgcccagtatccgtttgttatcatcattgccgccacactgctcaccagcattgcctatggcaccaccgtcttttcctcggcggtgaagagcattcccgagaatcagttccgggctgcccgtgtggacggcgccggggaatgggagatcgtgcgcaacatcattctgcccaacctgcgcttccacatcacctttatcgccctgtgggagaccctgggtctgctcaccaactatgtcaccatcatgctcatcaccaatggcggtccgggtgtccagaccgaggtatgggcactgagtgcctaccacaaggccttctcggacagccagtacggctatggcgctgccatttcgctggtgctgatcgtggtggttatggtgctgatgcttgtgatcggcgctgtgatgcaccatcaggaaaaatcccgttcctaagcaaccaggaggttcgatatgaaatattcccagagacccaagtatgaacgccgcaatgaaaccattgcggtactggtgatgatcctcttgtgcatcccggttctgttcatctacttttccttctttgccaacgcctttattctggacagcaccggtgagctgacactgcagaacttccagttcctctatcagcccatccagctcagccagtataccgtggagcccatcggcaaggccttccgcaataccgtgatcttcaccgccattgccaccaccctggaagtgaccatcagctgcatggcaggctatgccctggcccggatggaattcaccggcaagcgggtgatttccttctcgctgctcaccctgcggctcttccccggtgtgctgctgctcatcggcgtgctgtatgtcctgctgcacctgggcatcctcaacaccctcaccggtgtcatcgttgtggcaatcgccctgcgtctgcccggcagtaccttcattatccgcaacttcttcgcggggattccccaggatattgaaaactccgctctggtggacggctgcaaccgtctgaccgccttcttccaggtcattatccacatggtaaagcccggccttgcttccatcagcatttttgccttcatgagcgcctggtccaactacctgctgttcaatgtcctgatcttcaacaccaaaacccctgtgcttgccacctatctgcgcgttctctcccggaacgaccagatgatcgctgactatggcgtattcgcggcgatggcgatggtctatatgctgccggtgctgatcttcttcttcatttcgcagcgtcagctcatgcagggaaccatttctggaggtaaaggtatatgatccgtattgaaaatctccgcaaggagtttgataagggtgttgtcgctctggacagcatcaatctcacctttgatgagggcagcttcattgccctgctcggcccgtccggctgcggcaagaccacaaccctcaactgtatcgccggcctgctggaacccaccagcggctccatctacttcgatgaccgggatgtcaccaatctggctcccaaggaccgcaacatcggcatggtgttccagtcctatgccctctatccccacatgaaggtcatcgacaacatcgccttctcgctcaagcagaagggcatgcccaaggccgaacgccatgaaaaggcccgtcagatggcccggaagctccagatcgagcacctgcttgaccgtatgcccggtgaactctcgggcggtcagcagcagcgtgtttccatggcccgtgcgctggtcaaggagccgcaggtcctgctgctggacgagcccatgtccaacctggatgcccgtctgaagatcgagatccgggacgagatccgccgcatccagcaggatcttggcgttacctccatcatcgtaacccacgatcaggaggaggccatggccatggcagacaagattgccatcctggataacggacgcatccagcagttcgatacccctgagatgctctaccacaagcctgccaacctgtttgtagcccacttcatgggcaacccgcccatgaacttcatcgatgcttcggtggaggaagaggacggcgccctctggctgcggggcggcagcttccgggtcaaggcaccggctgccttggcggaaaagctcgccggcaaggccggacaggccgtggtgatcggcgtgcgcagccatcagatgaatgtgctgctggctcctgctgaggagaccatggaactgcacctctcgctggtggagaacctgggcaaggacatcatgatctccggtgatctggacggcgccctggtgcgtgtgaccattcctgccaacttcgagggcagctatgagcagctgcgggagctgcgccgtcagggcggcagcgtgtatctgaagctgcatgaggactataatatctttgacagggaaagcggagtcaatctgctgatctgaacagggagggaccaagcatgacatttctggaacagctcaaggcagatcacggcaggaagctgatgatcggcggacaccggggccatctttcggaagtccgggagaacaccatcgaaaactacaagcagatcctgggcagcggcatcagccatatcgagatcgatatccagctcaccaaggacgatgtggctgtgatctatcacgattatgagctcagcgagcgcaccagcctcaccggacgcatccgggattacaccctggcagagctccgggctgcctttgagatcgataccctggatgagtcggtggcctggtgcaaggaaaatcatcaggctatcgcctttgagctcaagagccgggcactggatatgtacgacttcatgcctgagatcgcccgtcagatggtggaagtgctgcggaagtatgacttctttgatatgtgctttgtattcagtaccgatttccgcaccctgcgcatgatcaaggagatggagccccgtactcccatcggcctgatcgtgccctttatcccggctgacccggtgaagctcatgcgggagatggacgccatcatctatctggtgtacctggactccctgagccccgagatcgtccgcagcctgcatgaggccggctactatgtggacggctccatcgtcaacacccccgagcgcatgaaggcagccattgagctgggcgtggacctcatcgagagtgaccacccgctggagatgatgaagctgtatgaggagatgacccgatgatcgccaactatcatactcatacccgctggtgccgccatgccaccggagagatcgaggactacatccaggaggcggtgcgcaaggggctgagagctgtggcaatcaccgagcatgtgccccacagccagaactttgacccccgccggatgcagtgggaggagttccctgcctacaacgccgagctggaccggctgatcgagaaatatcaggatcagatccatgtcatcaagggattcgagtgcgagtactatcccttcgccctggaaaactacaagatgttccgggatcagtacggctataaactgctgatcctgggccaccataccaacaaggaccgcactgccgacaacttcgcccccaagggggaagcggagatgaagcagtatgccgacgaggtcattgagggactgcgcaccgggctgttcaccttcctggcccatcccgatgtgccgttctgcggctataccggctcggcagattttgccctggagcagatgggacgcatctttgccgtctgcgaggagctgggaatcccggtggagatcaacgccaacggctaccgggacggccgcgcctatcccgaccgccgggtgtgggagctctcccggcagtataggctcacctggcttatcaattcggatgcccatgaggtggcgcatctctgcgatgaggcgggtgtgggcggtaccgaagcctttgcccgggagctgggcattccggtcaccgagtggttcgactggtaaacccctttgctatcacaagagaagcacggaatcagcagtggttccgtgcttttttatttcccggggaaagccgggggactgatacggaaatcctatttacaagccctgataaattcggtattatcaatatagaatgcggaaaagaggaggaacaccatgaacggcatcaataccaccctctgttatctcaagcggggcgaggaatacctcatgctccaccgggtgaaaaaggagggagacctcaacaaggataaatggatcggcatcggcggcaagttcgaagccggggagagccctgaggactgtctctgccgggaggtgctggaggagaccggcctcaccctgcacagctggcggtaccgggggattgtcacctttgtatcggacgagtacggcaccgaatatatgcacctttttgactcggaggacttctccggggagatcaaggactgcgatgagggggatctggagtggattcaccggggtcgtctgctggaactgaccctctgggaagggggccgcattttcctgcggctgctggagaccgactgccccttcttctcgctcaaactgcggtatgaggggggtcatctggtccaggcggtgctggatgggcggcagatcctgccggaggcagaggcatgaggcggctggcggcacggggctgcctgctgctgaccctgtttctcaccggctgtaccggcgaaaccttcacccccaatgccgatgtgaagccggcgggcagtgagctgaccgtctggtttgtgagcgatctgcacctgctctcggaggagctcacagattacagcccggaatttctcaccatgatcgcccggggagacggcaagaccgcccattattcccaggagatcggacaggcgctggtatggcagatcacctccctgcccgaggaggagcgtcccgatgtgctgctggcagcgggggatctcaccttcaacggggaaaagctcagccatgaaacggtggcggggctgtttgaggagatcgaagccgccggcgtgccggtgctgaccctgcccggcaaccacgatgtgaacaacggcatggcctaccgctataccggcaatacggcagaacccaccgaaacggtcacagcccaggagttccgggagatctaccgggcctatggctgggaggacagtctgctgcgggataccgtgtcgatgagctatgtctgggagccggcggaggatctctggatcatcgccattgacggcaacaccgattcccacagcggctgggtggacgatgaaaccctcacctggctggacaaggtgctcacccaggcagaggaggagggcaaggccgtgctcaccttcagccatcagaatctggtgcggcacaatgcccggttcccgttcgggtacaccttcggcaatgccatgaccgtccgggaactgatggcggatcacggcgtgaacctcaatctctcgggacatatccatatccagcatatcggggagtttgacggcctccatgaggtgactacctcggcgctctccattgccgagaaccacatcggcgtggtggagatcgactcggagcggaacgcttcctatcagatccgggaactggacgcagcgggttatgcccggcaggcggggctcaccagtcctgacctgctggacttcgggacatacagccgggattacttccgggagaacagcatgcgcaccatgggcgagaagctggatgccatgggcgtttccgaggcggaccgggagctgatgctcgaggcagccggggaattcaatctgcggtacttcaccggacggacggtggactaccaggaggagctggcggcgctgccggggtatgccctctggaatgaactgcccgacggcatgggggattattttgcctttatcctcgactcggagaaaaaggacgaaacccagggggacttcggctccctctggctgaaaggagaaaacacatgaccggacgatggagcgcagtgctctttgactttgactacaccctcggggacaccgaacggggcattgtggcaagcacccgatatgccctggaacagatgggactgtcccagccgcgggaaggggagatccgccgtaccatcggcatgaccctggagcggagtttcaccgccctcaccggcagcaccgaccctgcgggacaggcggagttcagccggcttttcaatgaaaaggccgaggaggtcatggtggattcggcggtgctctatcccggcgcccgggagctgtttgactggctggagacccaggggatcgccgccggggtagtcaccaacaagaaccgtccccggatcgctgccattctggagcgggcggggatcagcccggcggtgctggtgagcgcccaggacgccgttcccaagcctgccccggacgggattctgctggcggcccggagtctgcgccttccgccggaacaggtgctctatatcggggacagcctcaccgatgaggcggcggcccgggcggcggggtgcggattcattgccctgaccaccggcgccaccctgccggaggaatttgccccggatacagagctctgcgaaaacctcatcgccctccgggagcggctggaacaggaggggagagcatgaccatccggcatctgcggatctttgcggcggtggtggactgcggcaccatgcacgctgccgcccagaagctctatctctcccagcccaccatcacccaggcggtgaaggaactggaggagcactatggctgcctgctgtttgaacggtacgggcggcggctgatgatcaccccggcgggacaggaactgctgggccatgcccgggaactgctgggcgtctatgagcggatggaacagagcatgaagcagcaggcgggacagaagctgctgcgcatcggggcgacggtgatcctggcggaacagctgctggtgccgctggtccgggcgtttgagggacagaacccggaggtgcgggtggaggtgctggtggacaattcctcggtactggagagccgtctgctcagcggggagctggacgctgccctgctggatgccgccggacgcagcggggagatccagctgcgtccctttctgcgggaggagctgtcggtggcggcggcgccgttctatcccctagcccagtgtccggcgccggtgacagcccggcagctggcagagtgcgacttcatcatgcgggaggagggcagcatgccccggctgcgtctggcagcgttcctggggcagtacggtctggccccgcggatcaagtggtcctgcaccaatctgcacacagtggtgcaggcggtgaaggcgggcatgggggtatcggtgctctcgccggtgctgatgcgggaggaactggcggcaggcaccctgcgggagatcccggtggagggctttgtcgaaacccgggagatctcggtggcagtgcgccggggccggagcgactatgcacctctggagcgttttctggacttctgtcaggaacagtccgcccagttctgagcccggcttttatcaggataaagacaaacaacgcaaagaaaccccgggcagatccggggttttttgtatgttgtcacgaaactgctgttttgggtaaaaatccgctgaaaacccattgcgtttccccgataaacctgttataacatgggtagtgatccgcatctggcagacggactgtccgggtgcggaatcccaaaagtgagaagaggctgttttgcggcctttctttttttgcgccattttttcagtattactgccgaggagaggtacgattcacatgagcaatgagatgacttcccagaaccagatcaccgaaggcggaatcctccgcccgctgctggctttcttcttccccatcctgctgggcacctttttccagcagctctataacacggccgacgccgtggttgtgggcaactatgtgggcactgtggctctggctgccgtaggcggctccaccggtatcctgatcggcctgttcgtcaacctgttcgtgggcgtggcgtccggcaccacagtaatcatcgcccagtgctacggcgcccgggacttcgacggcgtccgcaaaacggttcacacctcggttgccatcgccattgccggcggcctgatcgccatggtgatcacgctcctcggcgcggaacctgcccttcgtgcaatggggactccctctgatgtcattcccgatgccaccctctacctgcgggtctatgccctgggcatggtgccctctttcctctataatataggatcgggtatcctccgggctgtgggcgataccaagcgtccgctctacttcctcatcatcgcctgtctgaccaatatcgtcctggatgtgctgttcgtcatgggcttcggcatgggagtactgggcgttgccaccgccaccgttatttcgcaggtggtatcctgtgtgctggtcatgctcatgctcatgcgcagcaccagtgtattcagcgtgcaccgcagtgagatcggctttaccgattacagcacccgccgggttctgcgtgtgggcctgcccgccgccctccagagcaatatgttcaccatcgccaatatcattatccagtccagcatcaactcctttggaaccgataccgttgccgcctggaccgcttacggcaaggtggacggcctgttctggatgatcatgggtgccttgggtatttcggtcaccacctttgtgggacagaacttcggcgcccagaaataccgccgggtacgccgcagtgtgcggatcggcctgctcatgggctttgccattgccgctctgtgcagtgtggtgctgatgacattctcccataccctgctgagctggttcaccacttcggaaaatgtgctgaatatcggtatgcgcaccgtacagctcaccattccgttctactttacctatgtgagcgtggaagtgctctcgggcgctgtgcgcggcaccggcgattccttctggccgatgatcatttccgccagcggcatctgcctgctgcgtgtgctctgggtcttcctggtggttcccatgttcccaggtttcgacaccatcgtcattgtcttccccatcagctgggcggcgacttcgctgatctttgccgcctactatctccagggcggctggatgcgccggcgtatctccatcatgggctacgcccccgaggaccggagcaatcccactcagggctgagtataaaacagaagaccgtcggaaaattccggcggtcttttttgttggggtcagacagtctgctccgaaccggcgggaacacgggcggccatgacacagccgatgcgctcctccgggggttcctccggggcc

SEQ ID NO: 2931 - DNA, 32759 bp, Unknown
  16S sequences of unknown bacteria
aagcgtgtgctgggataaagaaaaaacagccggaaaacggctgttttttttgcgggaaaaaggagctaggcccggatgccctgtgcgggctcgtccaacgccgaggtgcagtgcgggcagcgcacggcggccagggggatctccgtacagcaaaacgggcagggtttggtggtgggggcggcttcctcctttttgcggccgacggccaatagacggctcatggcgcgcatcaggcagaagaggatcagggccatgatgaaaaagttgaccacggcggataaaaacgccgacgcaaacccggcaatctccgcccaggaataggtggcggccccggtaaggaattgcaagatggggttgataaaattatccgtcagcgaggtgacgatgccggaaaacgcgccgccgatgagcacgccgacggccatatccatcacgttgccgcgcagggcaaacgccttgaattgcgagatgaagtttttcatgatgttccatcctttcgtttgtcttttgcatgcattaggataccataagggagggcggcagggccagagacccggcagagaaaaacaaaacagccggaaaacggctgtttttgcttaaaataggggccttaggcaaggccgcagagggctaaaacctccgcccggacgcggtctgtgatgcggcccaggcgcgcatagtccatttcgctggtatagaaatgctccagcttatcatgaaagcgcttggccgtagcgatggactgcacggcggcgtccacgagcgaagcgaacagcgcggcgttttgctgcaaaacgggctggtattccgagagcgcatcctggtctatcaggggcgcaaaatccagcgtgcgggccacgccggccggcgatacgcggtggtagtccgaatcggtggtaacaagcaggcccttttccggcaggtataggtgctcgatgcgttccgggtcgatggcgcagtggtaggtttccacctccaggccgctttccagcgcgcggcgcacaaggacctccagcgcccattcggcgggaaaggcccaggggccggccaaacgccagcattccgtgcccttgagcgattccagcgtgcaaacgcagccgccgggcgtgacggcgccggcaaacagcttgcgctccctgcccgggccagcgggctttgcgggcagcttgagcgatttgataagaggcgcaagcgccgcgtttacggcggcccggtcggtatgctgggcatagagggcgtgggcatcggcgcgcacctgggcggcggcggccaaataccggtacgcccgctggaactgggaggagatgcggcggtttgtttcaaagatctgctgggtcttttcgtgtagggcggtttggttcaggcattcgccgaggttgacgatgccgtccaccgcgccgggcagcacggggtctacgatgtgcggcgcggtgccgtctaccatcatgacgccggcagagggcacgacgatgccgtctaagctgtcgttatccgaagagcagtgcagaaactctacgtccctatgctctgcgatctcttcgcccaggcggcgcatcagggtggatttgcccactcccgggcccccctttaggataaagatgcgcgtggcggcctccggacggatgacctggtcatagtagctgtaaaacccgcgcgacgtattgccgccggggtaaagatggcgaatgtgcggcatgatgcggtacctcctgcaaagattcggagcggcgctccaagggtaggatatgcagggacggccccgcgcataccggaatacggaaaaaaacgccgggcggaaaaccgtgccaaacgctgcggcttgcttttggggcggcaatctgacgaccgctatagaagggccgggcatggcgccgcctactaggcgaaaggggaaaagggcgcagcaacaggcccctccccggggcaggaagcttgccgaccgctatagaagggccgggcatggcgccgcctactaggcggtcagcccagcgcaacgtctaaaatcatcatgacgacaaagccgaaaatgacgcccagcgtgccgacgtggctgtgttcgcccagatgcgcctcggggatcagctcttccacgacgacatagatcatcgcgccggcggcaaaggacaaaagccagggcatcaacggctggatggagcctgcgatgagcacggtgagcacgccaaagataggctctaccacgccggataggctgcccatccaaaacgccctgcccactgacttgccctcctggcgcagcggcagcgagatggcggcgccctccggaaaattttggatgccgatgcccagcgccagcgccatggctgcggtatagcccgctgcttggcccccctgggccgccagggcaaaggacaggcccaccgccatgccctccgggatgttgtgcagggtgacggcggtgaacaaaagcgtggtgcgcttccagggggcggacaggccctccggctgctttgcgccgatgtgcagatgcggcagcagcgaatccatcgcgattaaaaaccctacgccgagcaaaaacccgccggcggccggcacccagcccaaaagcccggcggcctcggcctggtcgatggcgggaatcaaaagcgaccagacggccgcggcgatcattacgccggcggcaaagcctaaaaacacccgttgcaggccggcggaaaactgcttgcggaaaaagaataccaggcctgcgcccagcgtggtcatcaaaaaggtaaaccctgtgccggccgcggcccataaaacggcggtatgcatacatcgccctccttacatggaatggataggttagccaaagctaattttcttgccttcactatatcctattttgcccaattgtcaacggcagcgtaaaggaattttcattggttacactaaaccgggaggtgaaaaagcatgccggatacctatgacgacgtatacagggcgctgcggcccaaagagcaggactttaccggccttaccgccgaggacgaggaaaagcagaccaaggctttgtttgatatcatcgcctaacgcaaaaagcagccgtcaaggctgcttttctagcattacgattggagaaaggagagcagcggcgctaggtagcggggctctacccagttggcggcgccctggccggcctccagcagcgcctgctcccacggcgccagcgtgccggccggcttttttgccacggatctttgcagcatccggcagagggtacggtccacccgtgtcatacgcgcggggtcccaggcgccccggccgtaaaacagcggcagcgtctgcgccgctttgggcaggcgggcgcgcacggcctccaacacgtctgggccgggcggcgtagcgccgacagcaaacacggcagcccgcttttggccaagcagcgcagcgtgctttttcataaacggggctatggaaagcccgccggcatacaggctgccgaacagcgcaaggcaccgcgcctggccaagggtttgctctgtggcctgctgttctgtgcaggccaagccgcccaggcgctcggccgccatttcggcgtaggctttggcagagccgtatttggaacggtagatcaaaagaacctcatgcatggggcgcagcctcctttttttgggcggagagggcctggatgccggtgtgcagcttggccatcagccgatacagggacaaaagctcttcgggggtatagcaggcaaacagcgtatccagcacttcgctgtggaaggcggcgcttttggcaaaatactgttcggcagccggcgaaagggccacgcacatggcgcgcccatcgcacggatgcggacgcagcaccgccagctgtttgcgggccagctggcaggccagggttttgacattttgccgcgaacagcccaaaagcacgcccaggtgcgtatacgtggtttcctcctgccggcaggcggcttggcgcaccatcacgagcagcaaaaactgcttgagcgtgacgccaaggttgcgggggtcgtggtcaaagagggcctgaagccggttttgcagcaaaaacaggttggcaaaaatgccgcgcttttgcatttcctccgtgcgctcataggcacgggacagcgatgaaatcatgcggacctcctatttacgcaatatattacctaaataatagcataccagtccgcctttggctagaggcagagccccaaaaaaacaaaccgggcgcggcaaaatggatacccctggatacctttcggcggtgcatactcaagacaaagacacaaagggggctttggcatgaactatatcgagcagctaaacgcattttttatcaaaaaggagcaggatgcgctttccagccgtgcgcagtgtttatactttaacctgctggggctgaataaccgctaccgctgggcggcgtggttttccgtttccggcctgcttttgcaggggatgacggggctttcgcgcaaccagctgacgcaggcgcgtgcagagctgatgcaaaagggctatctttgctatgaaacggggcggggcagccaaacgggccggtatcacctggaggatcttgcggccctgtaccgggacgaatttgggccgcagggcggtacgcaaacaaagacacaaacagagacgcaaccgcagcgcagcacggccccccttctaaaaataaaaacaaaagaaaaagaaaaacaaaaagagacaaagggcgcgcacgcaacagagccttctgtggcggaggtaaaggcgtttgtagcaaaatctggcagcgaggtggacccggagctgtttaccacctattaccaggcgcggggctggcaggcaggcggacagcccatccgctcttggcaggcgatgataagagcttgggaccgccgtgcctcgctctgctttcggggccgggagccggcagccaacccggcgctgcgctatgcccagcgcgccccggccgagcaggcggcgctgaacgccctggtgcagtattagccaaaaaaagggcgccttccatagacggaaagcgccgcgggcaagcaggcggaatttaatccagcgtatagcgggcctgcacaaaggaagcatccatcccctgcaccatctcagatacgagcagggaaaggttttcgatatcgtccagatccgccacctcggtggtggaatgggcatagcgcaccggcgcgccgatttcgatgcaggcggggccgtcgccggtgagctgggaataggcgttatcgcccagcgaagcgtagcagacataatgctgtaggccggtgctatgcgcggccgcggtacgctctgccagggcatacaggccgggatgggcgatggtgccgttgtccgcgccgtcgctgtagttgtagtgcgaagccaccgggccttggcccacagaagcctcaaacacgccctttacatctggcgtatcgccggccagcagcatatccatgctgatggcggcaatggggttgatgcggcgcacggccatggcggcggcgcgctggttgtattcctcccacacggtggcggccaggtaggtggtgcgctgcgggcgggcctggtacagctggcgggcaatgccgaccaaagcggcgacgcagccgcagttatccagcgcggtggcggccacgcgccggccgccaagccgccggtacaccggctcatacaccacggggcagccgatggcaaagcccatctcctttgcctgctcggcgctgtctgcgcccacatcgaccagcagctcacgcatgggctgcacgcgctgcttttcctcctccgtcatcagatgattgcacttggtgcccaccacgccgtactgccaagcgccggagacggtgcgcacgagcacacggctgccgggcagcaccttatccggcacgccgccgatggcctgcaggcgcaaaaaaccatcctccgtaacaaaggatacgatcatgccgaccctgtccatatgggcgtagaccatcaccggctttagcgcggggtccgtaccgtcgatgcgggcgatgacgttgccgacattgtccaccgtaaggctgtcggaaacaggagagagatacgccttggccttttgcgcaatgtcgcgctcaaaccccgaggggccgggggtggtgcaaaggtcttgtaaaacgtcgttgagcactggtttcataacaagggcctcctttggaaacaaaaaggtgtgttgggcaaattatcccaccttttgtgcggaaaagcaagggggcaggcccggccaaagcgcccctttgcccgccgggggaaaaacgctttgatgaaaacgccctttgccgggcacaaagcatgccatgcgcggcagaaaggcaggatatgccgccgcctactaggcggcatggaacagcggcagagcgggcggcgcaaaggtaaacacgaaaaacagcgcgcacagcgccgccgccccaacacagcacaaaaggccccgggcgggcgccgggccgccggactgcatcaggcggcgggaaacggcgaacataacgagcacccatgcaaagcaactggcaatatccacccataggctgtgtacgccgaatatcccggtgtaggtatagtaaaaggcgatcatcagcgccgggcccagcagcagcgcacagcttttggccgcccaaaaccgcagcagaggcggatgcagcagcaaacactcggcgcatgccgccagcaaaaacgggaaaaacagcagcttgccgtgctcccatacgctttcgctgacggggcaaaagagcccgacaaggggattttccccggttaggcggtatagaaaatggcaaataacacacgccgccagcacgaacagcgcgctgtatcgttcggctttggcaaaggcagaccggtccacaggcaatccctcctaaaacatatgggttttacagtgtatccgatcttgcgctggcctatgaacgcatgggcaaaaaaacagcgcaggagagcctgcgctgccacgggaaaaaacgcctaggcgcgctttcggcgcataaggctgagcgctgcgcccagcgccccgcccagcgcggcgggcagcacccagcacaggctgctttggtacagcggcaaaatatgcagaaaatccgtgagaagagggagggccaggccggcggattccagcgcgtataaaacgctgaccaccccgcaaaacgctacggccatggggtagcacagcggcgccttgccgcatacacggtggcacaggcccagcacgatgagcacgatggccaccggataaagggcgtttaagacgggcacggagacggccaaaatggcattgagcccaaagatggagaccgcatagctgaccacgccgaacaccaatacccacgcccgataggataggcggggaaacacggtggcaaaatattggctgcaagagctgaaaagcccgatgcaggtattcaggcaggcgatgacaaaaatcagccccagcagcaccgagcccaccgggccgtacaaaaacgataccgcgcgggacagcacctccgcgccgttttccgcgccggggaacgcgccgccgctgaccgcccccacatgcgccagcagcgcatacaccaaaagcagcacgccgcccgccaggtagccggcgcgcacggtgcagcgcaccacgggccggccctccggcacgccgcgggcctttaggttgagtgcgatgacaatgccgaaatttagcgcggcgatggtatccatcgtttggtagccatccacaaagccgcgggcggccgccccgctttggtaggcgcccagcgccgggccatagccgccgggcggatgcacaaagcagcccaccacgatgcagaggatcaaggccagcaggcaggggccggtgattttgccgaggcggtccgtcagcttgtccgggcgcagagccagcgccatggcagcggcgaaaaacgccagcgcgtacaccggcagcacccacccgggcacggacgggaaaaagggcgtaaccgccatttcaaacgacgtggaagcggtgcgcggaatggccagccccgggccgatggaaaggtagaccagcagcgtgaacacaaacgcaaaccgccggcccacccggctcaatcagcacgtcatggtgatcggtgcttccggcacgggaaaatcccgatgctttatccgtcctgccgtcttccaagccgtcaaacgcaaatatggcaccgcccagggggaatccgttatcattacggatcccaaaggggaactatttaccgatctatccgaattcttgaaagaccagggatacctggtcagggtattcaacttggtcaacccagcacacagcgatagctggaactgcatggccaatctgcacggagatccattcatcgcacagattctggtagatgcgatcatctccaataccagccatgacaaaggcgatcacttttgggattcgggcgaaagcaacctgttgaaggctttgatgctgtacgttgatctcgatcccacactggaatcggccgataaaaatctatcgtcggtgtaccagatgctgatccagcatactgaacgccagctttccttgctgtttgatcggttacctttggatcatcccgcccgagcaccatataacctatttgcacaggccagcgacacggttcgtgccggtattgtcctgggactgggtacacggcttcaagcgcttcaatccccagccatccaacggctaatcagcggttccggcatcagcttgatcgctccagcacaacagaagtgtgcgtattttgtgattctgagcgaccaacatgatgcgtttgatttcctatcgagcttgttcttttccatgttgtttatcgagctaattcagtttgccgacaacatgccggacggccgttgcccggtacccgtcaaccttgtactcgacgagctcaataatctgggcaccattcccgcgttcccgcgccgcgtcagtagctgccgatcgcgggcggtacaaatctatatggctatccagggattgggacaacttcaaaatagatatccggacaacctctgggcagcaggtccgaccgttcgttccaatttatacggcgcagccaaaccaccggaagacttttaactttattttatttatataaaggaggtaaacaaattggctactcaagagactgaatttgatctgactgctgtggattcgcccgaagataatctcgtgactcaatcggacgcggatgagggagcgcgaagtacagaggtcgcttctatcaaaccgaaacgccgtacccgtaaaaaagcggaggaggtaccctcagaaccagaggccgttttgccgcagcgttcccctcgacaacgcgaagctatcgtcgctatagacgactaccgcaccgttgaaaccgaagaagataagcaacagaatgacctgttggatcttatggaatccctcaaaaccaagaagcgattgacaggtaccattcaaggtgtagaacgaagtgcaggtacagccgaaagctatgcaatagtttaccacggcatctataaaatcatgattcctgccagcgaagtggttaatccaccggcggatttccgtggtagggaacctgctgatgtaatgcattatttgctactcaagcgtatgggggcagagattgactatatcgtactgggcattgatccggaaggcttagcggtaggcagccgattgcaagcaatggcctccaaatgccgggaatcctattttgctacggacaacgacggaaactatcgactccatgaaggggtatgcgctgaagctagagtagtttcggtcatccgagcaggcattttcattgacctgtttggagtggaatgctatattccgctacgtgagctgagttaccagcgttacttggacgcatccacccattttgagccaggacagcgcgtgttggtgcatatcaccagtctggaccgcagcgaccgcgaccatatccaagttacggcttccatcaaacaaacccaacaagatccatacgagcaggccatgcgcaaatacatggtaggaaaccggtatgttggtgtggtgagcgtcgtcgataccaacggcgtcttcgtggctttagacggtatcgactgcctttgtccataccccaaacgaggccgtccgcccaaaggggcccgcgttaccgtccgaattctcggtatcaaccaagaatctcaccgaatctggggtgtgattactcatatatccacccaaatttcctgaaaggaggctctatcatggaaaccgcactcagccggcaggaacaggtgcgccggcgcaatatttccattgccacccgcaagatggtcgagcagctgcttgatgtagaggaatccgacgatacatccatcatgctcaactatcacgggttctacttgcagctctcgttttccgaagcgcatccgttgatggtcatctacctggcacacggtttatcccatgccattacggttaaggatgcacgccgaatcaacgacatcaatcagcgcagcattttgggcagccactcggtcaacagccagtttgccctccgtgcggaaacggaactcgtcgctgcggatggtagcagtattccggcagatgggctcattgaggtgatagggttagacacagaacataaaggagtgttcacatccgatttgccttttggccgcttttatgcgcaggagctggctacagacaatcattatatcttgaatgatacccgctaccccatcatttttgactatgcgggaccgaacactgacaccgtccatatctcgatacatgatggcgagcctatctccaatatcctgaaacgtggcaagatcgacggccgtaaaatcaatccaaatggtgatggcttggaaggtgcagtcattggcctcttccctgagtccgtcaccacatttactgaagaaacggcactcatgaccacaaagaccgaaaagggaggagccttctcgttcgccaacgtacccatcggacattggcagtgtgtagaaattgctccggccacaggctacatacttggcaatgaaatccatcacgtctacgtgacggaagatggacaaaccattcccattcagctaatcaacgcgccaatcatggggcatgtacggctaacaaaagtcgacgcagactacccagacaacaagctcagcggcgccgtgttttatatctatgaggacagtaacggcgatcaggcctgggataaaacggacgagatggtgggacagatgcaggaaaccgaaccaggtgtttatgagctgagggacctgctttataacgggtatttctgtattgagcaggaagcgccaactggctttgaactggatcagacatcacactattttcgcatcgaaaaccatggagaaactgttgaagtggagaccgaagccggcaaggggctgttcaacaacgcccagaaaggaagcctgcgaatcctaaaaacgtccagtgatggccgcaaagaaggatttgcgttccgcattaccggtacggacatcaccggccatcgttacgatcaaacgtttaccaccgactcctcaggtgaaattctggttgaaggtctacgcgttggcgagtattcaatcaccgaattgcgaaacgaggcatctgcaggatacaagctggccgacgcagtcaccgtggaaatcgtacccaatgagacgcttgaggtgaaagtccacaatgatagagtcaccgtggaaataccaaaaactggggacaccgccaacctgatgatctgggggttactcttgtgcctcgctggtacaggtataatagctgctatggtgcatatgattcggcatcggcatcaaatgattcagcccaaaaccaaaaactaaaagatgaggcagagaagaccaaccatcgtcttctctgccccttttataacccatctttttgaaaggagctttttatgaagaaacgaatcgcacttctggttgccatatgtctactactttgctgccctatcgtctatgccgacaccgacggtaccgagccgcaggtcatagaccagccaagcaagctgatcctccagttgggtcctgagtgggcgggcgtgtcctttcagctacacacagacgccggaacatatccagatccgatcttggtagacgatacaggattattgaccatggagttgggaagcagcaaaacgtatacgctcagatgccttagctctgacatccccattccggtaccgaatgagcaacaacaaccaagtgggcaaatagcgcaaacgccgaattcgccagcgcctaccgatgacgttactccgtcccccttaacaccacaaccggaagagaccgatatccctacagcgcatcttttcctctttttaggaggactggccgtttgtatcggtgcgctcattgccatgcgcatccataaaaagcacagacagcaacgcgaggtcgatgattgggacgtttaacaatgtcctggaaggaatcaatcacatgtccatcaaatttttttgaaaaagtttctgcatactgacttttaattttacaagctttattttccatgctacgctcgaaatgaacccggagcgtcccggttccgcttgcgagcaggctttcggtacgaataggggcaggcacccatcgtcaacacacccagcgaaggtgtggaaccgttacggatcttagagaagaaagaatccagatactgcaagcgataatttcatagagaggccggagggccgctaaaacacttcaagagtcaaggctggtgcgacaccactatccagcgctttactttgttgtaccctttagcggttccttcggcctttttagttcaaaaaggaggcccaattgccatgaaaaaaagaaagaaaagaaagggaatctcaacgctaccaggcatgcggtctatgcgttgccccgaatgtggcagccctgtcgtcctcaaaagcgccgatggcatttatcataccaaccccgaccacgtccagctctatgtctgttcccggtacccgcaatgcgatacctatgtccgtacccaccctggcacgaccatcccgatggggacactggccaaccgccagctgcgccggctgcgcgtgcaagcgcataaaagttttgatcggctttaccgtagcggtctgatgggcaaggacgatgcgtatcgttggctggccagcgtagtgcaggcgcctatgtcctgcgctcacatcggatatttaggcgactattattgcaaaaaagttattgatgaaagcgatgcgctcttcactcaactgcgtagtcgagcccggtatccgatagcatcgggaggtgaataaggatgatgcagctcacacctgcccaacaacagctggtggaagccaacatgggactcgttcacaaagtgctggcagatcggatacaccctcgcgcctgggaacaaagcgtgtatagctatgaggactatcgccagattggctatgtcggcctatgcaaagcggctgctagctataagcctggtggcaaagcgaaattctcaactgtggcctatgtctacatacggaacgagatctatatggcgatcgaatacgctacaatacggcggcgagagatcactgtcgaggaggtcttcgcatccgatgaacaccagaggtttgatacgcctgaagccatgggactggatcgtatcgtaaacgatgctcagaagatgaccgatggcgtgttgagaaaaggaatcacagctttaaagcttcggacgcagggatatacagccaaggaaatcggtgaacggatgcatgccccggctaaccatgtcacggcctggatctcccgtgctcgcaaatacctacagtcgaaccctgctatcgccgaactgaaagaactatgaagtataaacgattacttcgaaattgggctgcacccatcgggtgcggcctttttcttttgttggtatttcggttcgtgctgtttctgggatacgttccttcctcttctatggagccctcgttgcaggcaggctcctatatcctggctttaagggtgtttgacgaaccaaagaaaggtgacgtggtcgtattccagcatgaaggacggctgttggtcaaacgtatcgctgctgttccaggtgactgctatgttcgcaccggtgatgtcctatgtatcacaaaaaatgaaggagtgatggtacctgcccagtgttacctagtcttgggtgacaacgcatcctgctccatagattcccggtattggtcagatccatatgtccaacatggcgatattgtcgcggtagttcttggcataccggacaaatgaagaatgtcaaagcagctcaagttctcggctaatatttggagattgcaaaaatcagccgaattccatgttgtaaaacaaggaagtttcggctataatataaagtaaaccaagattagccgaaatttattatgggggtgagcgatcgaatgacatatattcaacgacacatggaagaccgaatcctggaattgagcaagagctatgctgcaatcttgctgaccggtcctcgacaggcagggaaaaccactatgctgcagtctattgcggaaaaggagaacatcgggcgtgaatatatcacactggatgacttgaacttgcgggatatggcgaagaatgatcctgcgctttttctacagctgcataagccgcctgtgttgattgacgaagttcaatatgcgcctgaattgtttgtatatatcaagatgcatatcgataagtaccataaccctggtgacttctggatgacgggctcccagatcttccgcctcatgcgaggtgtgcaggagtccttggctggccgtattgcgcttttgcatatgtcccccctgtcgcaaagggagatcatcggcgcaccttgtgtcccatttacaactgattttgatgtgttgcgcaaagaaagcgaaacgatgacgccggtcaccacgcctgcgctatttgagcgcatttggagggggagcatgcccgggattgttagcgggcagtatacggatcgggatatgtactattcctcgtatttgtccacttttgtggaacgggatgtacgcgatctttcgggaagtattgatgcactgaagtttaaccgatttgtaacggccgtggcggctcggacctcacagctattgaactatcatgcgctggcagaagatgccgatatcgacatccagactgccaaggcatggatgaacattctggaaaccctaggcattgtttttttgttgtacccgtattccaacaatgtcttaaaacgcaccataaaaacgccgaaagtgtactgttacgacaccggcttggtctgctatttgacgaagtggtcttccccggaagttgccgagagcggcgcgatgagtggtgccctgcttgaaaacttcacggtatcggagatcatgaaaagctatcagaatgctgggcgtgagccgtacctgtatttctaccgggaccgcgatgcaaaagagatcgacatagtgatggaaggcgacggaaagcttttccctctggagatcaagaagactgctacgccggaccagcgtttgatcagagcgtttagtgtgctcgataaatcgccgcttcaggtgggaactggtgccgttctgtgtatggctgagcggttcggtgctttcagccgagataatctaatcgttcctatctggatgatataagaatgaaaagagcagcgttagctgcacagaaaagcgggaacagtaatggaaaggctgttcccgctttttatcattagagccgatttgctttatctagcatttcttttcgactcggatgcgtataccgtttggtggtgcgcggatctttgtgcccggcctgttgtgccgttttgatgtcagaataccctacttcctggcatcgggacacgaagaagtggcggagatcatgtggtgagattttatctgtgtaatatcctagtacctggtttgcacgttgacggctcatgtgttggccctgtctgctggggaaaataaatggactgttctgcatggttgccccgggtgttgtcttacgcattttataccactctgccaatgcgtgaatgattttgtcattgatgaacacataccgtgctttaccacccttgccatcccgaacaatgagttggcggagggaaaggtcgatatcgtccacgcggagacggatggcctcgctgattcgtaatccagcataggccagaatcgtcacgagcgcatagtcccttgctctcaaaaacgggtttgtcgttttagcacctaccaagattgattgccggagctgttctacgtcggtgacgctgattttgcatgggctatatagctcaggctggatagggataagatctcccttcagcacggcgacttctttctgcaaattcatttcgaacagcagtgcattgtattggagcagggcactcatataggaattgacggattccggtttgaggcgccggatattcatcaagtaggatcgaaaatcctgcacattggtgcgataaagcttttcgggaatctttccatagctttcttcacaccaagtatagaatctgcgtaggtgccccaagtaggtggccacggtatccggctggtagttctctcctgtaagggtttcggcaaacaatgacaaaatatctggcacaattctttcctccgctttccttatattatatattatagattacatggatagcagaggccgaaagcaaagaatcaaatataagagagctttcccaaagagaatagtggaagaattatccccgagaggcgatccgttttgagtttgacataacaggaattatgttaaactcaaggctcctccttggtcgaaaaccgcgagtgagtttgacataattgcagaaaaaccatggcaatacgagtttgacataaatgttagagggtttctgcgcaagaaacgaaactatgaaatagtaaagggttacaaagaaattggagcttgtcgaccctaaaacactcagcgacacgctgcgctgtgtaggaaaaggcggtattgtctgcgatacggacattctcggtggtgtttataccctgaacggctttgatcccattaaggaaattccaaacagcgtatacctcatcagatttttcccaaatttcccgacgcagcgcaccatcgagaatatttttcctttatcaaccgtcaccacatacaacccgccatcggagctatctattcctttgagaatattgcaaatacgctttccgatataaaccaccataaataggacggaaaaattgtaggaggaggtttagcaaaatgaaaataatagacattaaaggaagtgcgagaaaagacggaaacaccgccactatcatacaaacagctatttctggcagataagtatccatcaaatattacaccctaataactatatgtgtataatagtaaaagccacctgcatttctgcaagcagcttttacttcgaccattatggtctttacattatgcctttttataaccacatttcggacatatgccgttttcgttcaatgcaataccgcacaacgggcaacgatcaatattgttcttcgtttggaattctgccgaagcggcattgacaccgctggtgaaggtgattttggcgatattcagcttgtccttcagcagatcatagacaatcttgatcatgccttcaacggtcattgtttctttggtaacaaccaagcggcaatcgggatatgcggtcgccagttctgtctgaaaagctggacctttcatcttgttctgtggcgttccgtttttaatcccctgtttttcatacacatctaaaacggcaggcaacagcggatcgtcctcccgcaggatcagtgcgtggtcaaagtttttcaaaacctcccaagcggttttctgaatctcgttgcaggggaacaccatgttgacgccaggctctaccgaatcttccacttcaatggtcaaaactccagtatgaccatgcaggtactgggcttcacccttgaacccatagaatctgtgtgcgtattgcagatctaacgtggtaatgcttctcattttaaattctccttaatctgatatgtttataagatttcctgtgtagtgtagacaaatattagtagttttcacagttcagttcgaaatagctctgtggatggttgcaggtagggcatacatcgggtgctgcggtaccgacaacgatatggccgcagttacggcactcccaaaccttaacttcgcttttggcaaaaacttcggccatttccacattgtgcagcagcgcacgatagcgctcttcatgatgcttttcaatggcggcgaccagacggaactttgcggccagttccgggaaaccctcttcttctgcagttttggcaaagccgtcgtacatatccgtccattcgtagttttcgccttcagcggcatgaagtagattttcaacggttccgcccaggccgttcagctctttgaaccacatttttgcgtgttctttttcattgtcagcagttttcaggaacaaagcggcgatctgctcatagccttctttctttgctactgaagaaaaataagtgtatttgttacgggcctgagactcaccggcaaaagccgcttccaggtttttctcggtctgtgttccggcgtatttgtttgctttcggcgtctcctcgatcttttcaaaggaagaagccggctgtttgcacacaggacagataaaatctgcgggcagttcctctccctcgtagatgtgtgcgcatactttacatttccatttgctcatgatttttttgcctccttcgtttattatcgtgtcattgcaggggagcagatccaaaagtttctttgccgcctcaaccgggaatccggcggaaggcggattttcaatccagttgcggagcaggtcatgggtattgccgctttgcggcagcatataaccggcttcacgaagcagatcctcatttaccagccgaacagatttggaaatagcggtcatcaaacggtacagggagtcgttgtccgcactctcggctaattgtttagaaatcttttcctgatccgccttactctttgcaagcgtatgagagagagcaatgacttgctcggcctttttctgctgcggaggatactccacaggaaccatagaaatcgccccgctgggacaagcgcctgcacaaacgccgcagcccagacatttgttgacgtcaataatgctgttttcggtatcagttgcgcctgtagggcatacatataagcataaacaatcttttgtgcaaagacgcagattccttacggcgatttgtttcataccgcgaccctcctctctatcttttcaaacttccacgaaggaactttgcagactggacagagttccggagcagagtcccctatgtaaacgaagccgcagaccgtacagacccatacatcggtattctgcaaaaaggcgtcgccttctttctcccaacgctgcagcagcgtattcagaattgtcgtaactttttctccccaaacgcaaatacgctgtgtgccacgatcggaattggcagcagcggtagagtgcagagcgggatagcctccgtttaaatccctttgaatcaattcagccaattgcgtcgtatcggcgttcggcacatcaggtgtgacagaggcaaaataatcggcgatctcacgaaacaacgctgcttctccctgcttgtactgtttttcacagccgcgtgccaaattagagcaaagtgcggacaattctccggccgataattttttcatgtcttcatccatttggacgggaattaccggagcctcaactttcttggctttttgttctggaccaaacgcagactttgcagccccgcacagcggacacacccacgaatccggcaggtcggtaaacagcttgccttccttcgcttcatcgtaaacatatccgcagacagaacagacatacttcatagcttacgctcctttcataatagttttctttatgctgctgtttcatagcatacagactaaatagacggttcgaagggctgcgctttccggcactccggacagatataaaatattttcagatcgtaagaaagaaagtcatctccaaactgcttttgtaaagcggacgttaaatcatcgaaacagacgtcagaaagccttccgcacttctggcataccagatgatcgtgcttttcgatccggtcataacgatcaggtgaatcctctaacgacacccgacgaatcaactttacgtcgcacaacttgttcaaattattatatacagtagcacgggcaacggcaggataaatcttttgcagttcttcataaacctgctcggctgtcatgtgtttacgagaggcgttcacaatatcataaatttgcttttcatatttggtcatacggtctcactccagaaattagaacttatccaattaaattataatgagtccaaattggaaagtcaagtattactttggccgactggatagaacttcaagttttcagtgtaatcggtgaaaccgccgggataagcaatatacgagcactcctttaaaataaaaaaaatatccttgacgaatctttttccagaagcaaatcttgcaggacttcgtacgccaagaggaataccccaatactaagattctccaaattaaaaatcgaatcttccaaaattctttgattttttatgtgcttttgcccttatgagctgaaacaaagttgcgccctgtggttactcgttccacagggcgcatggttatgtgttatttgctgtattttttcttgtggttgtaaaggacgatcccggtcaggatcatgccggaagtcagcattgtcacaatccaaaaggtgaacttgctggtttcaccggtttttgggacggaaggcttttttcctctgctgaaaaggcagtaaaagtacccttcccccccgccattgccgctgccatcattgccgccagccatttcttctttctacaaattttactgagtcgtgacagaaacagacggaactattgtgcttgcttgctatgattgtcgcaactaccgccatccctgtaacctcttctattgcataattatttttttgtattttcatatgaaaatcaggcgtttttcaatgccctttcgagaaaagaacagatatgctattggccattcaaatcaaacaatctatcctactgcgaagatatttagagggcaaatctacatttccaagataaataaacagacattgaagaaataatataattgtaggacgatgtaaccggtgccttccttttctggggagcgccggttttctgtttatagaaggcattcagcgaaaaaaaggatggagcgtaatgggctatggtgattgagaaataaagtatcatacccccttgtaatggtggtgtatagagaaagcgtggccatttaaaatcggccgctgattaaaatgtttcaatatagaaaataccaaaattcaaggaggaatgatatatggaggaaacaatattcggctacatacgggtatccacaaaggagcaatgcgaggatcgccaaatgattgcattgcgcaatttttccgtgccggagaatcaaatttttatggataagctcagcggaaaggatttcaatcgtccccaataccaaaagctcctgcgaaaactgaagcgggggcatgtccttgtggtcaagtctattgatcgtttggggcgcaattatgaggaaatcttgaaccagtggcggattattaccaaggaaaaacaggcagatattgttgttctggatatgccgcttctggacacacgacggacaggaaaggatttgacaggtacctttgtagcggatcttgtcctgcaaatcctctcttatgtagcgcagacggaacgggaaagcattcatcagaggcaaatggaggggatcgcagctgccaagctccggggcgtacggtttgggcggccgaggaagccgataccggagcgtttctttcgactaaaagcgcagtgggaaaaaggagaaatcagttcccggaaagcggcaaaggaactctgtattgcacaagacacattccttcgctgggttcgtgaacaacgctgaaagaaatagtagacatttgcgttcagctggtgtacaataaaaacaatatagatttgccagtataatttatggtgtctatgaaaaacctgcgagaaatcgctaaaatacactgtaaaacttgaagattgagaagcgaccgaaattctctgattttttggtcagggcaaagccggcgaaagccggtgacgcaaaagccaagggccttgcgggtataacccggtggcagccggtgtaattttcagcggatgaccggcatttatgccggttatttctttatccggaggaagacaattgtgttggaacaaccattgcaatattgcagcgcagtgacaggctatgagggacaggaggttggagcgatcatttccagtttccttgacaaaattgcgcaggagttatcggaaggccacgcggtagatttaggggcttgctttggaatttttactgtcaagctgcgtacagggcagcttcaaccgggttctccaagaacgccgaaagccgagcgttatcatgtcgttttccgggaaaacagtgggcttcggaaacggctaaagcgataggaggcgcagcgatggaagggaataaaacggaaatgtcgggcttattggaaatccttgcgtttaagacgagctgtatgtacctatccaatctgagaaatccggaactacttcctgcaatacaacgcgcaatacaaaaaatccctctgacacaatttagcctgtgggaattatgcgacgctgttgaatatattatagggaaagcaacttcttttgaaaatgtggaagaagcggccctgtatctgaagcagcattgtgctaaaaagaagtagatattcaatggccaaattatggcatggcacattttattgaaagtcccctgcatccatattgtaatcactgtttcggggaaagcgaggttagcggtttggattatttgatatatgcgaatattgcgctggacattttctgcataatattatccacactgccaattttttacctggtcagcaatcaccgataccggcaaaagctgaatcaattctttttgggcgcatgtatctccaatattgttatgattgccggggatcttccggactggatatttcccacgattgcatcattcccggagaggatcatcctatcagccgctacagcgctttactacgtagcctctgcgttcgtcctgtatttctttataagatatatcatggaatatctgcaattaaccggacgcgccaaaaaagtttgcctgatttacgctatggttttgtgtggcatacaaatcgtgtttgcactcataagtcctttcaccggttccatcttctatgtaacaacggatggttatcagagaggacctttgttcctgatttcgcagtttgtgccattgttttgctatctgctttttatggcattgatcattatctaccgaggaaaattgctcagacgagaagttatctttttcctgttatatatcttcatctcgctgggctgcggcgctgtgcagatggccatgcggggcattgcgattgtcaatgcgggcgttacaatcgctacgctgattatcctcatgaacgtacaatttgagcatgaggtaaccatgaaagagcaggaaagggaattggcggagcaccggatcgatatcatgctcagccagatccagccgcactttttatacaattctctgggagctatctatcacctgtgcgaaagcgatccgaggacggcaaggaaggcaataaaaaatttttcggaattcctgcgcggtaatatggagagcctgaaatcacgcgagcccattgcgtttgaagcggaactgaatcatgcggcaaactacctatacctggaacagcagcggttcggcgataagcttcaggtcatctaccaaattaccacagaggattttctgatcccaccgcttacccttcagccgcttgtggaaaacgccgtgcagcacggcgtcttgaacaggagaaatggagggacgattgtcatccgtactgaaaagacggacgagtgtgccgttgtgatggtttttgacaatggggtcgggttggaaaaagcaaaagggatccattccctgggagaccgagcgcatatcggaatttccaatgtccgcagccgtttgaaggaaatgatgggcggcagtctggatatagaaagcagcggtgaagggaccacggccattatccggattccctggacggaagggggcggcgcatgaatatattagtcaccgatgacgagcctttacagcttgaggaattggtcaatgttttaaagtggatacgtccaaacgcggacatctttccttatgcctggccagatgatgcgttagaggcggcgagacagcacccgatggatgttgcttttctagatattcaaacgggcggtatgaacgggatccagttggcggtagagctgaagaaggtgaagccggatatacatattatctttgttacggggtactctcaatacgctgttgaggctttttccatacacgctaccggctatcttttaaagccggtcacagaagatgcggtaagccgggaacttactttcatctaccgggagcgccaaccgaagaggcgtattgaaatcaaaacattcggtgggttcgatctttatgtggatggtcaactggttcggtttggtcgggcaaaatcgaaggagttgctggcctatctggtggatcggagaggcttgtccgttacaacgggggaagcttatgctacactttttgaagatgcgcaggataccctctccggtaagtcgtattttcggactatccttcacgagatgatcaacagcttgaaaaaagccgatgccgatgagattttgttgaaaaggcacaatagctatgcggtaatcccggaaaaattcgactgcgactattatcgatttctgcaaggagaccctgtggcggtaaatgcgtttcaaaacgactacatgccgtcttacagttgggcggagattcgaaacgccgagcttggattcaaaggatattaaacagataaaatcaaagggaaatccggtgtttaaacaccggattttttctttgctgtcaaccggatttgttgcgcttttgttgcgctcgggatgctatgctggatccacaaaaagatattggagaggggggctgttatgacaatcctgctcgtcgatagcgataaaaaggcactggacctggcaatgcggcgctttacacagcggccgtttgcggtcactgtttcgctgcacagcagcgcaaacgatgcgattcggttttctatgtgccatgacgtggatatggtattcaccagagatgtactggtggatatgacaggacaggaactgatcgaaaagatgcatcagatcaatccaaaagtggagtgtcatatcctttccccaggtgaggaggtcccgatcagtcagttgctggggcagccctcaaattttccgggtaaggggagcgtacaggcccgacccttagagaaagaaattaaaacaaaagatgcagatatggtggagaacaggcggccggaagcgaccggttgcttctttcaaacagaacgagaggaaggcgatagatcaatgacagagcaagaattacgaagcctaaatagaaaagaactgctggaaatcatgattgagcagggcaaggagatggaaaccagtaaagcaaaatatgaagaggatctggcctttctgaaatccgagcatgaaaaggatatggattatttaaggaccgaatacgaaaaagaaatcgcgacgttaaaaaaggacctggagtgtgccagggcggcgttgcagagcaagaagatcgccatcgatgaagcgggttccattgcggtggccgccctgcagatcaatggggtcttcgaggccgcacaagcagccagtcagcaatacattgagaatatccgcagcctgagcgaccgccaagcctctatctgtgccaaacgcgatgctgaaagcagggcggaacaggagcgtcgtttgcaggagacaacggctaaatgtgaacagatggaatgcctcagcaagaaaaagtgtgaagagatggaggcggaagcaaaaagaaagtcagaggcctactgggcggaagtttcccaccgtctgcagtccttttatgaaagccatcaggagctgaaaaagttgttgaatttcagcgcccccaatattttgttataaacggggcgccgttatgaaccgcaaaccaacttcttcctccctgcctacggttgaacagctggaagcggagctgcaacgggaaacaagccggaaaaggcaaaaacgatccgtcaaaacgacggagaagaaggatccctccccgtcttttgtggatcagttggaagaggaactgaaacgagatacctacaaaaaacggtactggcatatgcttggcagcaccgtttcgatattgattgtaatagcggcaatcgttgtgctcatttcaaatctttttctgccggttcttcagatttacgggtcttccatgacgccgaccctgacaaacggtaacattgtggctgccatgaggtacggcgactatgaccgtggagacgtgatcgctttttactacaacaataagattttagtaaagcgtataatcggcctccccggagaacaggtggatattgatgagaacgggaacgtctcgattaacggcgagccgctggaggagccgtacttggaggagagggcgcttggagagtgtgatattgaattgccgtaccaggtgccggacggcagatattttgtaatgggagatcatcggagcgtttcgagcgattcacgaagcagccaggtcggctgtatttcagaagaacagattatcgggaagttgtttttgcgcatctggccgctcaatgagataggaacactcgaataagattcagaagggaggctctccatgaaaccagaaagctggaaaaataaagtgcaggaatacatacaggagcataagctgcgaagacgctggctgaagataacggcctctcttggagcttttgccgtagttgtgacggcggctgccatgatcctgccggccattacgatggaaaatgccccgcagatgttggagtgtcagattggcgtccatacgcacaaagatagctgctatgacgcggagggcaatatcgtctgcggatatgcggactttgtcgttcatacgcataacgattcctgctacgcggaggatggaactctcatatgtccccttgacgagatcgagacacatacccatgatgcatcctgttatcgggaaagccgcgtgccaacctgcggattggaagaaggatcggggcatgtccatgaagggcatatccacacagaagcatgttatgaagtttcaaatgtactcacctgtggccaggcggaagcagcgccgcatacccatgacgagcattgttatgacgcggacggcaacctgatttgccagcaatccgaagaaggccatactcatacggcggagtgctatgaaacacaaaaaacattgatttgtacgcaggataccggctgttatgatgcgaccggcaacctgatttgtcagcaatcggaagaaggacatacccacaccgatgattgctatgaaactcaaaaggagctggtctgcaggaaagaagagatcatcctgcatacccacaccaatgcttgttttgatgaaaacggaaacctgacctgcggcatgccggaagtgaaagagcatatccatgatgaaagctgtatgccccaaacgaaatacattccatctggttctagctgggccaccgtgtccaaacccgatgatacgctctccacggaaaatgacaggcagccgagttccaataggatgttttttgccgcgccccaggccgaaacggggagctatgatttttctggcgatatcacaagcgtcaccgtggaacggcagcagggcggtcaatggatccagagcgatacctttacggacggcgataccatccggattaccatccgttatgctatcccccaagggacaatcaatgaaacgcagcggaatatgcactatcaactccctgacggcattgccttggaacaggatgagacaggcgaagtgtatttggaaaatggtcaaaaagccggcacttacacgatttcgaccgatgggctcatcagcatcgcatttgacgagcactttgccaatggcgaagctttttccgggaacctccactttcaggggacgattgccttggcagatctggatgagggggaagaaatcacattcggcggagatgggggcacgatcaccgtcgtacccgaagagaaaaaatacagcctccgcattgcgaagataggcgtttacgtcaagaacgaagacgaggcggagatttacgggcaatacggcttgggtatcgatatcctgccggaacacctgctctatacgatagaaattggtgcgaatgcaacttctgacgggagcgacggcacaattactgttacggatcaatttacccataatccagcggatggggtggttacttacgacgaaggaaatatagcgatctttagggttacgcccacactagacgggccgccttccgcggtgagaatcacagagtacgaactggaatacacgcatcagcagatcgggacaggagatgcccggaccagcagctttaccattaacggtcttccggcgctgcagcccggcgaatactacagcatcaattacagtgccagtgttgattttgatacggtcaactcccccaacggctatctatccgtgcccaacgaagctgccgcaaaagacaactcgcagacagcgaccgccaattccaatgtggagatcagcaaccgcatggtgcacaaagaagcgagcgccaatgagggcaccggcaacgtacggtggacggtcaccctgaatgaagacggccgggagctgggcggccggacattccgggacgagatgacctatacgttggacggcgccacggcaacctatgatctggcggatattacaaacctccgagtgacggcctacgaaatcaacgatgccggacagcaggtgcccaaaggcgatgtgacggctgtatttgaagctttgcttcggtttgaaggtggcgcgatgacggttgcgttcccggcggctggcatgtggccggatggcctttcctccaactgggtctatcgaatcagctatgagacgcctttcccggaggaggcggacaccggagctcaaattgcttttgcgaacaccgcccggctggatgcataccacataaccgtgtactggaacggaaacgtgcctgacgtcggttatgggctggtaaaaaggagcaccagttccaattcgaacacggggacagatattggcacgatcaactgggagtccacaataagctacccgtccaatcattttgaactggaacagctacagtataaggattgggttttggacgcctattacgaccaaggcggacggtttattccgggaagccattacaccacggctgatacgctgcgcagaacgctgaccgtaaaaaccgcgctgggagagacgcttgcctggggagaggactacaccgtaagcgtcgcatacgcagaggatatgcccgaacacacaatattcgatgaggcatgggctgacgacgaaattttcaggcagcccctgaccgagctcacggacggagcggacctcgacaaacctattgcgctgttctgcatcacctttaccgaagcttcccgcgataaacttgaaggcggtcggcagctctatataagctatcagaccatcgtgaaccgccagggcgttacgaatggtcaggctgtaaccatcaaaaatacgggtgccatcccggcgcatacagacacgcttgacatacataccgccttccaccggcagctgaacaagcaggttagcaaaacgggcatagcgcccagcggcgatgattttgccttggattccgacgtttatgtggacggccccgttgacatcgatcttggggataccggcggcagaatttactaccgtatcctattttataactacggggataccatttccttccacgataatctgttacagcagtttgacgggaaatgtgcatttgatcaaaatatacggatctacgacgtgatcaccggtgaaatgaagacggtaaaaacctgggactatctcgacagctccggaaagtatcatggcaattatacattgcatgaccttgggcagttcaaggactgcatcatcggcgtatactactccgttgatgtgagcggtgatgaagcgctggcaggcctggatgaaggagaaacctacgcctacaccaacactgtggagtgggcggatattgacgaggattcctccacggccaatgttacgaacagcgaagtcaccctgagaaagaatggttaccagaccaacgagcgcggagaaaatttggtctattactatgtgacgatcaatccgaaaagccggaatttgcacccggacagcggcagcctggaactgcaggatacccttaccctgcctgccggcgcctccgctaccctgcgcctggagaccatcgggctgtaccactacgacgcccaaaatgaagagggccactatttgggcgaagaaataacagaggaggaatttgaccgatttgaagtagtcccgacaaagggaacggtcaactcctataccttcaccatacccgatgagatggcctgcgtcgtggtatacgcctatgaaatcgacccagggaccagcgccctggaggagattccggtgaacaatactgccgcattgctgggccgggcggtcatctccgccggagatcagataaaaatcgacgcccagcagtccggcggccaggtgaatagggccaccctgaccatctataaaatcggcggtgataactacgccaaccggctgcaagatgtgctctttgacctgttccggtatgaaaagcaggaggacggaacctaccaatgggtcagaaccgacttgacggcggtggggccggaagcggacgatggaggtcgccatttcatcaccggcggcgacggtgtggaaggcgcgatcatcctgaatttcctggatgaaggggaagaggggcaaagctcctactacaacaccctttaccgcctgacagaattccagacgttgcccgattatgagctggacgaaacaccccggtattatgtgtggggtgaaaatggaaagacggaagatcagaccgctgcggaaatggccgatatcttgaaaggtgcaaatgtgacatgggatgaggtcacgttcatctcctttggtgagagcaagacagaatatatcaacaacgagcccgttacaacctccatcacggccgccaagcaatggcgggatatgtacgggaaggaaccccccatagaggagctgccggagaatatcaccctcatcctctaccagcacgtagacgatacgaaggctccgtatggtgaagcggttaccgttacaccggatgcaaacggcgactggacgtatacttgggaaggtctacccaggaaagatgcaaatggaaccccctatacctattctgtggaagaaacggccatcggcggagagacagatatgaatggatatgaaacttcctatttttatcccaacgatggcaatgcgaacacaggcattgaccgaggtgagattcggattaccaatacccaaaccgccaggtttgttttaccggagaccggtggcgttggatcggcaacctttataatcgcgggactgctccttgtgggaatgtccggcgttggatacctatatatcgagcgaaaacgacggaaaggaggacacgtgcactgagcaccccgatagcatgatgatttctagttttccaatattaaaacccgaaaggagacacaatcgatgaaaaagataaaaagcttggtagccatcttgctgtcgttgactatgttgctgatggccgttccggcttttgccgccggcgcttactccatcacgatccagaacgacaaagaaggacatacgtatgaagcctatcagatcttcgccggcgacgtggccagcgatgaggcccaggggggcaatgcggaaggccccatcctgtccaacatcacttggggcaatggcgtgaacggtactgcgcttcttgcggcgttgcaagcagccgatgccgacaagtacggcgaatgcgaaacagccgctgacgtagccgaagcactgggcgccgagaatgccaccgcagccgatgcagccgcatttgctgaaatagcggctctacatttaacaaatgtagaggggactgcaaccgagcctgtaggaggaaattatgttatcaacaacctggccgccggctactacctggtgaaagaccagaatggcagcctggagggcgacgccgatgccgccaccgaatatatcgtccaggtgctgggcaacgtgacgatggaacccaaggacagcgatatccccactgtggagaaaaaggtttcggaagaggactatcgtcgggatgatggatatggagctacctacaatgacgtggccgactgggacatcggcgattccgtacccttcaagctgatcggctctatcccggatatgtccgcttatgacacctatgaatacatcttcaccgataccctgtctaacggcctgaccttacagccgaataccatcaaagtgtatatcgcccgtgagaaaaatgatgaagtgaacaactatactccgctgacccagggtgtacattataccctaaatacgcaaaatatcggcgagaatggcggtggtagctttacgatttcctttgctgatctgaagaccgctccctatgtcaacgaagaaggacggaattacgtcatcgtaacctatgacgccacgctgaacgccaaagcggagatcggtcttcctggtaatcccaacagcgtggatctccagttctccaacaat

SEQ ID NO: 2932 - DNA, 13791 bp, Unknown
  16S sequences of unknown bacteria
ttatcctacatcaggggggattttgtctattgtccagtttttctggttctgtccacgcttccacggggcttttttcatggaactcccctcccgctctggacatggacaggccgcgcatggtatacttcgagcataaggctcggacagggccgcgggggatgcccccgcgtcgatttgaggaggagtttcatggggcggtatgtggcggaatacaccatcgggcagccggatgattttattcggctggtcagtgaggattatttccagaaggaagggttcaagctggttccctataagggagaaatgctgtggaaaaaggggcgcggggtgctgaccgctccccagtatatcaagctggcctacgggcaggggattgtgcacgtggaggcattcatccgctggaccatcctgccgggtgtatacgtgggcgaaatggcgctggacaacgggttcgtgggggccattcccaaaagcatgctgatggacaaggtgaacaccctgctgcggctgctcagccagccgatgccggccgcctcgcctgcgggcggcccgatgcctgcagcggcgccgggggctggagccccgcaggcggtgcccatcccgcaggcggctgttccccagcctatgcccgcgccgggagcgccgatccctgccgcgccccccatgccgggcgcgtatccgggagcgccggctccatatgcggcggcgcccgcttacgcgggcgggccggttccggtggcggtgcacaaccccaccggaaaggcgaccatggccttggtgttcggtctgctgagcgtcctgggggcggtggccttcccggtgggcatcgtgttctccatcctgggaatagtgaacagccggacggggatgaaatccaccgccaagggcatggccgtggccggtctggtgctgagcatcctgttcctggtggtcagcctggtggaatgcgcggcgatgatcctgcggttttggctgagcctgatttgaggaggttggattgatgcgtgctatgaacatacgggccacggcgctggtggtggctttcctgatgtctctgccgctgctgggcggctgcaacaccattctgctgacgcgggagctggccgccaagacggaggaagggaatactccgcagaccgtcgcgacccccgacgggcggtatgaggtgactgtgaccggcggctggaccgaggacagcaagcagttggagaatccgcaggcccttcgagtaatccatacgcgcagggacatggtagtcatcgtgctggcggagagcaaggaagagatcgggctggacatagggatcgaggaatatatggacgcgtccctggaggtcatgcaggaggatgcacaagacgttacccataccgcgggcgtaccggtgacagtgggcggcatgcgaggcttatctgctgaaatgcgggaggaaaccgacgatttggagctgatatactggctttatttcctggaaaatgacgacgatttcgtccgggtagtcggctggacgacggccgaacgggaagccgataaccggcaggccgttcagaatgtgatgcagtcggtgaaaacggcggagctcatcggataaaagggggatcggccgatgaacaggacggatcggctgcggctctggtacgaacgggcagcttcccgatgggaggagactctgcctatcggcaacggcagcctgggggccatgatctggggcggcgcgccctgcgaggtgctgggcctcaacgaggaaagcctgtggtccggatggcagcgggatcggaacaatcccggcgcccgcgcgcatctggaggaggtgcgccgcctgatccgggaggaacggtacggcgaggcggaagcggtggccgaagcccatatgctgggggaatacggcgagagctatctgccgctgggcagcctgcatctggcgttcaaacacgggccggcgacggattatatgcgggagcttgatttggagcaggcgacggcccgggtggcctatacggccgatggcgcgacctacgagcgggagtatctggccagcttcccggcccgggcgatacttgtccggctgacctgttcgcagccccggatggccctgaccctttcgttcgaatcgccgctgtcctgccggacgcggacggatgaggacgggctgatcatcgaggggcaatgccccgagcatgtggatcccccctatattcccgacaggccggaggcggtcattcagggcgagaggggccggcgtttctccgcacgggtgcgggtgctgtccggcgacgggacggtgcgcgcgcgggacggccgcctgtccgtggacggtgcgtctcgtctcgtcctggcggtgtcggcggtgcgggagccggaactgcccgcgggcgcttcgtatgaaacgctgcgcgaagcgcatatccgggattaccgcgccctgttcgacagggtggaactgtggcttgggccgcagaaagctatgcccaccgatcggcggctggccgtcctgcgggagggcggagaggatccggggctgtacgcgctgtatttccagtacggccggtatctgctcatcgcctcctcccggcccggcggcctgcccgccaatctgcaggggatctggtgctgggagctgcggcccccttggagcagcaactggaccaccaatatcaacgcgcagatgaactattggcctgcccagagctgcggcctgtcggattgcctgtccccttatgtggggctgctgaaacggctatgcgagcaggggcaaaagacggcggcggcgcactacggctgccgcggcttcgtccatcaccacaacgccgatgtctgggccaacaccaatccggtggggatcccctacggcggcgcggcggggcagccaggcagcgcggaatgggcgctgtggcccatgggcggcgcctggatggcggcggagctgtacaaacactatgcctatacgctggacgaggcgttcttgcgggaaactgcgtatcccttgctgcatgaggcggcgcggttcctggccgactggctggtggaggtggacggccgatacgagacctgtccctccacgtcccccgaaaaccggtttatcgggccggatgggagcgcccattgcttggccatgtccacggccatggatttggccattatccgggaggtgttccgggatttccgccgtgcctgcgaggtgctgcacattgaggacgggctgctggatgagatagacgagcggctcgggcgactggccccctttcaggtgggcagccgggggcagctgctggaatggcacagggagtttgaagaacgggaaccggggcaccggcacctgtcccatctgtacggcctgttcccctccgatctgttcgccggggatgcgcggctgaccgaggcgtgccgggtgtccctgcgggagcggctggctcacggcgggggacataccggctggagctgcgcctggattatcaatctgctggcggtgctggaggatggggaagggtcctacgcctatttacgtactctgctgacccgatccagctacgacaatctctgggacgcccacccgccgtttcaaatcgacggaaatttcggcggcacagcggggatcgccaatatgctcgtgcaggatcggggcggcgaggtgaagctgctgcccgccctgcccgccgcttttccgcaaggctatgtccgggggctgcggattaccggccgccgggcggtggatatccgctgggaaaacgggacaatgacggcgcatcggatttacacggtggattgaattcggagagagatggtcatggatttcattcgatcggttctgccgacggcgacgttgctctttctatacgccctgatcctggcggctgtcttccgcttcttgggaaaccgcctcgtcaactcctccgtctgtaaattcctatgggaaaagctatgcggcctctttcataaagcccagtaacaaccacgcgccgaaggaatcttccttcggcgcgtggttgttgttttaccgcgattccagctcgatatagaattccaccccatcgccgtgagcgctgcggcagttgtaagcgccgtagggcatgccgtgggctttcatgatggccgccaccaccgacaagccgatgccggtgcctccgtaggcgcgggtgcgggccttatccaccttgtaaaagctctcccagacgcggggcagatcctcctcgggaatatggctgccggtgttgaacacggtgacacggacccggccgtcctccttggggatgatgcgggcctccacccgtcccccctcgttgacatggttgagggcgttggacaggaaattggtcaggacgttttccatgaggtagtcgtcggcccagacatataccggcccagactccggcaggatgggaacgatgcctttttgggaaaagcggatgctcattttgttcatcaggttgtcgagcagctcggtgatgtcaaaccgctcgatcaccagctgctctccgccggcctccagctgcatgagcatggtcatccgcttgataagctccgacatcttctgtgcctcatcctcgatgacctcgcagtagtagtcgcggttggccgccccgtcggcgatgtcctccttcaggccctcggcataggtgctgatgagggcgattggcgttttcagctcatgggagacattggagatgaaggcgcggcgggcctcgttctgctggttcttttgctcgatgtcgttcatcagctggcgattggcggttttcaggtcggaaatggtgcgctccagggagatggacatggagttgatgctcgcccccagatcggccagttcatcccggccgccgccggtgtaccggtcctggaagtccaggcgcgccacgctgcccgccactcgggacaactcccggatgggccgggtgaaccggcgggaaaagaaaaagaccaggagcaacgagaccagcagggtgacggcacccgaaattagcaggaactggttggtgatgcccacgctttccttgataccctccacggaggtgcgcatctcgatgggaaacccgttgctcaaagcgccggtcagggtgataaagctggttttcagcttggtgtcctgcaccaccgtcacctcgcaggagccgggcagataggtcttggtggggcggacggggattgcctgggtgccctccgcgcggtagcgggcgatcagccggctgcccgcccagatggtgctggatatgccgtcgttgttggccaggctgtccagcgtcaggtcgatgatttccaaattggcggtatagtcctgggaaaagaggctgttgacctcggtgaaggccatctgcaccgcgtcggatttttgccggcggtaatagctttccagcgcgaaattgttcagcagccagttgacccctagcagcagcgtgatgcacagcaggaaccagcccgccagcttccacacgatggaatggcggggaggcagcagggcctgcaggctctttttcgataggcggttgtccgcaagcttgtccataggtctgtccctttatccggcgtcgggctcgaatttgtacccaatgccccgaatggttttgatgcagtcgccgtgacggcccagcttgctgcgcagctttttgacatgggtgtccaccgtgcgggcgtcgccgtaataatcgtaccgccagacgctgtccagaattttgtcccgggagagggcgaccccgctgttggtcatcaggtaggtcagcagctcgaactcggtataggtcagttccaccggctggccgtccaccttgacctcgcgccccaccggatccaccagcaggccgtccaccacggggcgggccgccggctcctcgggcgcgccccggcggaacaccgcctcgatgcgggccagcaaaattttcaggctgaagggcttggcgatgtattcatccacccccaaggaaaagccctgcagctcgtcgtcctcctcggaacgggccgtgagcatgataatgggcacctgggacttggaacgaatatggcggcagacctcccagccgtccatgcggggcatcatgacgtccagcaggatgaggtccggacgcccggattcaaacagactcagcgcctccacgccgtcccccgcctccagggtttcataccccttgatgtgcagataatcagcgatgacgcggcgcatgcggatttcatcgtccgcgataagaatggtttttgacgcagtgttttccatagcaaacgccccttcatctgatccgtcggaccaacagccagcagccgtccggttttatggagccaacgggatatagtatgcgatatccgtgtgataaccgtgtgaatttccgcttgaaattttatgacggtactaggtaaacgataaaaagatcatgcctgactgctcagcggcggcttggcgggaaatcccctgggggaattcttctgcaccgatctaaccactggctttttcatcatcgcttacctagtataacataaaatccggccaaacggacagtcgccgctgaaacgaatattttttcttttttcggaaatactatggcaagcggttgattatatacctctatatatccggacaattttctatggataatccgataaaacaggcaataatacgaaaaagtatacaaataaaaattacattataaaaaatattgcaataaaaaacaagataaccgcttgacatgtcaagcggttgatgctatactgcaattgtagagaacagagagcggctgaacgccgcgatccgaaggcgggaggtaccctttatggacaataccattatgctcatcacctacgcggacagcttggggaaaaacctgaaggagctgggcggggttttgcgggatcacctggacggggtggtcggcgccgtgcacatccttccctttttcccttcctccgccgaccggggcttcgcccccatgcggtacgacatggtggatccggcttttggggatttcgaggatatccgggccatcgcgcagcgccacgctgtgatgtttgactttatggtcaatcacatttccgcccactccccctattttgaagatttcttgaaaaacaaggacgcctctccttatcgggatatgttcatccggtataaagacttttggccgggcggagcgcctaccgaggatcaggtggataggatttataagcgcaagccccgggccccttccatcacggtcaccttcgccgatggaaccacggaagacatctggtgcaccttctgcgaggaacagatcgacctgaatatgaacagtgccgtcgcccggaagtttatccgcagcaccctgcgggacatgtgcgaaaaaggcgccgcggtcatccggctggacgccttcgcctatgcggtcaaaaaaccggacaccagctgctttttcatcgagccggagatgtgggagctgctcgaggacatcgaagaggtggtcaagccttacggagtggatatcctgcccgaaatccacgagcattacaccattcagcagaaaatcgcggacaagggcttctgggtgtacgatttcgcgctgcccatgctggtgcttcacgccctatacaccggcaagggggaggaactggtgcactggctgaacatctgtccccgccggcagttcaccaccttggatacccacgacggcatcggcgtggtggatgtggccgatctgatgtctcaggaggaaatcgacgccaccaaggaggcgctgttcaccaaaggcgccaacgtcaaaaagatttacaacaccgcggcctataacaatttggatatttaccagatcaactgcacctactattccgccctgggggaccaggacgcggcctatctgctggccagggcgattcagtttttcgcccccggtattccgcaggtgtattacgtcgggctgctggccggcggcaacgacatcgagctgctggaaaaaaccaagcagggccgggatatcaaccgccactattattcccgggaggaggtggaccgggaagtccgccgcccggtggtgcagaagctgtttgaacttatgcggctgcgcaacgcccatcccgccttcgccgtggagggagaatgccggccggagatgctggatgaaactaccttgcggattacccggtgcaacggggaaaaccaattgatgctgaccgccgatttggccactcacgcattccagataaccgaaggcgatgcagtcctgttttcccaagaggtataaggctaaagacgctcgtgccaagctgccttggccccgcgttgatagggcggggattctccccgcgaaacaacacaaatttgataaagaaagaggtaatgaccatgctgaaacgtatcctggcggtaaccctctcggcggccatgatcggcgccgtccttaccggctgcagcaatgacaaggaacccggcgccgaaagcaagatgaagctcaccttcctcaactccaagggtgaaatccaggacggcctggaggccgtggccaaggaatacaagaaaaagaccggcgtggatatcgaaatcctggtggcgccggctggcacctctccctccgagcggttctcccagctgtacaactccggcacgccgcctaccatgtccatgctcgacaccaccgacgtggtggacattggctgggacaaggcggtggacttgaccggtgaaaagtgggtggccgacgcgggcaaccaggcctaccgcatcaacgacaaagtgtattccttccccatgggggtggagggccgcggcctgatttacaacaaaacggccatcgagaagaccctgggcaaaactttcgatcccaaggaatacaacaccatggataagctcaaggcccttctggaggagctgaagagcaaggggatggccaccccggtcgtgatttccaaggaagactggtccctgggctcccactatttcggctatctgtatatcacccagtcggacgacgagggcgccagcgcggcgtatattgacaagatgaagaagggcgaaatcgatctgaagaacgataagcgcttcaatcagctgctggacaccttcgatctgctccgctcctacaacatcaacggcaaggcgcctctggacgccaaatatgaggtggatccctcctacgtggtggatggagaagcggcgttctggttcaacggcaactgggcgtggcccaacatgaaggaattcatcaccgccgacaacaagaacgagttcggcctgatgatcctgcctctgggcaacgacgccagcgattttgtcaacaccaagatgctgggcaccgcgtccaagcagatcatcatcgataagaccaaaacctccgaggaagagcagaaggctgccaaggacttcctcaattggctggtgtatgacgaggcgggccagaagggcatggtggaaaccctgcagctggtgccggcgttctccaacatcaagctggagcccacggatcccctgggaaaagccctgaaggtttatgtggacgagggcaagaccagccccgactgcatcgtcccggcggatcactggagcaaggtgggcgcggccatgcagcaatatctggccggcaaatccacccgtgagcagctggctgccaaggtgctggagtactggaagagcaaagcgtaatagccccataaacggcaccgcttcccggacgcggaacgccgcgtccgggaagcggcggccgatacatacggcggccacccggcgggattcccacgggcagccatgcagaaagaaggcttatcatgagagaaaaaacaaaactgggcaacctgaaattgtttttgatatttgccgggccggccgcggttctgttcctctgcgtggtcgtcatccccttcctgtacggcctggtgttgacctttaccaactggaacggcatttccgacggggcgggcttcgtggcgtttcagaactatgtgaccgcctttaaagacacggcgttctggcattccctgctgctgaccctcggctacgtggccgcgtcggtgatcctcatcaacctggtggcctttttcctggcctatctgctgaccagcggcatcaagggtcagaattttctgcgatccgcctttttcacccccaacctcatcggcggtatcgtcctcggcttcatctggcagtttgtgttcaataacgcgctgaccagcttcggcagcggcatcggatccgatttgctctccagctcctggctgagcgatcccaccatggcgttctgggcgctggtggtggtgacggcctggcagtattcgggttatatgatgatcatctatgtggccggatttaccagcgtgtcccacgacctgcttgaggcggccagtatcgacggctgcacggcctttcagaccacccgctatgtcaccctgcccctgatggtgccctccttcgtcatctgcttgttcttgtccatccagcggtgctttatggtgtacgatgtcaacctgtccctgacgggcggcggtccctacggcaccaccatcctgtccgccatgcatgtgtaccagaagaccttcgtgtccaaggaatacggcgtgggccaggcggaggcgctcatcctcttcctggtggtggccattatcagcatcacccaggtgtccttgggcaagcggaaagaggtggaggcgtaacatgaaaacgagcctcactcgggatggaatccgatatatggccgtctgcgggcggcggaatggggggatacgatgaaacggcaggttatcggcggcacccgtacgcggatctgggggatcgtcaagacggtgatcctgtttgcgctgcttctggtctatatggtgccgtttttcatggtgattatcaacgcgttcaaaaccaaccgcaccatcctcaaggaaccgctcaagctgctggagccgggcggcccgatcttcaccaacttctcttacgcctttgataaaatggatttcctgcgcgcctttttcaattcgctgttcatcacggtgctcagcgtgctgctgattgtgatcatcacctccatgaccgcctatttcttcgtgcgggcggattggaaaattaataaggtgtttttcgccctcatggtcgcggccatgatcgtccccttccaggtcatcatgaccccgctcatctccatctacggcagcttcctggggattcttgatcaccggctgaccctggtgttcatgcacgtgggcttttctatcagcatggcggtgttcatctatcacggcttcatcaagagcaacattcccctctccctggaggaagccgccaccctggacggctgcagccggacacagaccttcttccggatcgtattcccgctgctcaaacccatcaccgccactatcatcgtcctcaatgttctggccatctggaacgactatctgctcccttccctggtgctgaccaaaaaggagctgttcaccctgccgctgtccacctattccttctacggcagctatctgaccaactacggcgcggtgatggccggcctgatgctgacggttctgccggttatcattctgtatctgttcctgcaaaagcagatcatcagcggcgtgatttcgggcgcggtcaaggcataattcgattgcgttcattggaaagccctgttataatggcggtataagcggccgaaaggagcggatagcggcatggcgactctcaaggatgtggcggagctggcgggcgttacggtgaccacggtctcccgcgtgctcaacaaccggggctacatcagcgataaaacgaggcaggcggtctatgaagccatgaagcggctggactaccggcccaacgagctggcccgttccctctccaaacggcgcaccaacgttatcggggtcatcgtcccctcggtggcccatccgtacttttgccgggtggtcagctttctggagcaggaggcggcccggcatgggtataaaatcatgctctgcaactccttccatcagcgtgagaaggagatcgaatatatcgatatgctcaaatccaataaggtggcggccatcgtcctgtgcagccggacgccggacatcggggcctatctggacatgtccctgccggtggtcaccttcgagcgcacggaggagggcaacgtgtccgccgtgtcctgcgataattaccagggcgggacgctggccacccggcaccttattgggaagggctgccgccgcctcgcccatatcagcggaagcagcgaggtgcatatgcctgcggatcagcggtgcgcggcgtttctggatgtctgccgagaatataatctgaccggcaaagtgttcgacacggcggaggcccagtttctttccatggattatggagcatttttggatcggattctgatggaaaacccggagctggacggcgtctttgcgagcagcgacgtcatcgccgcccagctcgtgcaggcctgcgctcggtgcggccggcgggtgccggaggacatcaaggtggtcggtttcgacgatgtggatatcgccgccctgaccacaccgcccatcaccaccatccgccagccggtggagcagatgtgctccttcgccgtgcgcaccatcctgcagcagctcgaacagggctgtacggcggtcaaaacggtgctgggcgtgacgctggtggagcggggcacgacgtaaggaggcggaaagacgcgatgcgtgatttggtttctctcggcgagttgctggtggatttcaccccggtgggggaatccgcggcgggcaacccggtttttgaacgcaacccgggcggcggcccggccaacctggcctgcgcggcggcccgcctgggcgtgaacaccgcgttcatcgggcaggtgggggatgacgccttcgggcgggctttgaaggggattctcgcagacagccgggtggatgtcggccgcctgaggctgtccgctgactatcagaccaccctggccttcgtgcatctggacgcgggcggggagcggtccttcagcttctatcggcgacagggcgcggataccatgctcgtcccggaggaagcggatttcgccctggcggctgattgccggtgctttttctacagctcggtgctcatgaccggcggcccctcccgccaggcgagctttcagctggcatctcatgcccgggagcggggggccgctacggtctacgatcccaatctccgtctgaacctctgggacagcccggaggaggcccggtcggtcattctctcggccatgcaatgggccgatatcgtcaaggtgtctgaggaggagctggtgttcctgacgggtgagccggatctggataaggcggcccggcagctgaaagcggcttacggcgtgaaggcgctgctggccaccctgggggccaagggctgcttcgccctggtgaatggggagcggatcgacgtcccgggctttgcggtggagacggtggacaccacggcggccggcgactccttcaccggcggcttcctgtacggcctactacagggctgcacccccatcgaggagcgctccgccgatcaaatccgagatatgctgacctttgccaatgcggtgggggcgctgactaccacccggaagggcgccatctcagccctcccctcctacggcgaggtgctggagtttttacagcaacaaggccatatgtaacgcagcttcaagccccggcggatttttccgccggggctcagcttgtcgataaagtcgacaagctgctggacggggacgccggatcacggcggctcactgacgttcgccttgttccatctgtccccgctggcggagcgttcgctccgcccgaccacgccctgctcttgaaaaccggcggaaacacgtgtgtttccgccggttttcgcctataaggtgtgtttgcgaggcacatgtcctcgca

SEQ ID NO: 2933 - DNA, 32759 bp, Unknown
  16S sequences of unknown bacteria
aagaggtccccaacattgtgctggatgcgctgaatgtggggatgctgatgatggggcgcaagccggaagcagaagtggaaaaggcgataatagagtttgtcacccggtacggtctgttggggctaatgaccgccttgcctaccacaccgtcctttatggactatgaggcggtgtacctgccgaaaaaccacttcatcaaagaagaatccatggcgacagacaaatacctgtccctgttttacccctttgatcaactggacttggtgaagaaaggcattacatccacatggaacgtgtccggtgaccggacgatggttgccctgaccatgaccttcatggacgagccgatggcaaagaacatgagcttccagcgggaatatgcggaaccctatgactgggtcgcacagcagttcaaggactgggcgtttaccctgtccacatcaatcctgtactataatgactatagttccatcgatgaggacgcaaggggactgtaccgcaaggccatggctgcgttcggcggaatcgcccccagctaccacattgaactgctggataaacccaccatctattgggacttccgttcgctgttgttgggtatccagatgatgttcagcttcatgctggtggacgatgaccagcccctgcgcctgtgcaagcactgtcagaaggtgttcctgggcagccgatccaatgcaaccttttgcagcccacggtgcaagaaccagtataatgtctataagagccgtgacaaatccaagggggaaacgaactaacgagggctctttcgctgcggcgggacgggggatgatatacctttgcttccttttccggtcaggcggattttgccccctgtgcaaatcccaattttgtccgtgtccgtacaaaatccgccagccctactgcccgccgagaagtgtctgcccgctgcccatctgcccaggttgcagatgccgcagacagccccttcccggcgtcagccggaagcaaaggtataacacactagactttccgtgggaaagtcgtgtgccaaggaaggcgctgccctcctttggaaacctctcgccaaggggaacgctgttcccctctgggctccccgcctgtccgtgcagtggctatccatcctgttctcacacgatggatgcgctcctgcccgaacaggtaaaacaggcacagagatttgcccgggcggtgggcaaatttctgtgcctgtttctgttcagcggcggctgggcaaagcatacgcagaaccctcggtcttggttggagattttcgtattggagtgcgaaaactaattgtcctaagcccctatatctggtataataaaacagtcgaattctctgaccggaggtacccatatggccatctcttacaataagctctggaaactgctcattgaccggaagatgagcaaggcagacttacgccgagcggcgggaatcgctcccaatactatgacaaaactaaaccgcgataaagaagtgaccctagaaacactcgggaaaatttgtggtgtgttaaaagtcaatgtcggagatattgtggatatttttcctgatgctccataacaagatagaaagagagggagatctatgactccatttgaaattgtaactgccattttgaacttgcttgcacttatcctgattcccataatagccgtgataattggtcagcatttgcaaaatgtttcagcaaaacgaaaagataaaatggacgtgtttaagacgatgatgatgaacagaatcggctggtccgttgaaagtacacgagccatgaacattattgatattgttttttcggatgataaaaatgttcgacaggcttggagtgaatattatcatgctctttgtgtcaaggacccagatgaaatacagttaaagcaaatgcagcaagcacaagataaattacttgagaaaatggctatttctcttggatataaggataaaatcacatgggaaaccattcagaatccttatgttccgaaagggatgatggaggcaatggatcagcaacagatcatccaaaaaggacagacagagcttgcaaaggtagctggtgcgtttgctcaaatgatcaatactaacgcagccaatcaagcgccaaaccgacaggaggataatccccatgccaacacttgaatggattggaaaagataaagtggtaaaccaccaccaggaggtgccttatcgggtgctggagcgccagtacagctatgatggagctgggcagcacgccgaggacaacggcagcgaaaacatgattatccatggcgacaatctggaggcgctaaaagccctgctgccccagtacgagggcaaggtgaagtgcatctacatcgatcctccctacaacaccggcaacgagggctgggtgtacaacgataacgtcaatgaccccaagatcaaaaagtggctgggcgaagtggttggcaaagagggcgaggacctttcccggcatgacaagtggctgtgtatgatgtatccccgcttgaagttgttgcagcgactgttagcggatgacggagttatttttatcagtattgatgatactgagtatgccaatttgaatctaatttgtgacgagatttttggaagcagctgctttgtgtcaagcatttcatggcagcggacatactctacccgaaacgactccaaagggattgtgaacgaggtggagcacctgattgtttacagtaaacagccaggctggaatccaaataaattacctcgtacagaggaaatgaatgctcgatataagaaccctgataatgacgatatgccgtggaaaagcagtgatgcttttgccccaggagcctccacacatccaggcatggtatatgctgttcagcacccctttactggaagtttgatctatcctacgaatgggcggcattgggcatttgggcaggagcaagtgcttgaaattatgcttggatggggcaattatgagttacgtcaaattggcgatgatgagcggcgggcagaaatatgtggtgtcagtgtcgatgatgtacgccatgatgtgatggccataatgcttacagatacaatagatgtagctcgtaaaaaagctttgcagatttacgatagaggtaaatggccactcttgtgtttttcaaatcgagggaaaagcggtattcgcagaaaaacatatcttgacggagttggaggaaggttaccaacaaactattggtcttttgaggaagtagggcacacagatgaagccgcaaaaactctaaaatctattttcaacaataagtctcctttcgacactccaaaaccctcccgtttaatcgagcgtatactcacaattgcggggaatcgaaaggccctaattctcgattcgtttgctggttccggcaccaccgcccatgctgtactcaacatgaacaaggccgacggcggcaaccgtaaattcatccttgtggaaatgatggactacgccgacagcattaccgccgagcgtgttaaacgggtgattgatggctacggagagggcaaaaaagctgtggaaggcaccggcggcaatttcagctactatgagctggggcctgtgcttctgctgccggacggcaacctcaatgaagaagtgggcccgcagaaaatcagggaatacgtctactacatggagaccaaagagcccctgtctgccgaacagcctgtggacgagccctacttcatgggcctgtgccgcaacaccgcctattacttctattatgagcgggaaagcgtcaccacgctggactacgcctttttggctaccatccagaccaaagccgagggctacaccatctatgccgacctgtgcgccatctcgcaggagacactatacaagcacaatatcacctttaagaaaatcccccgagatattgcccggctgtaaaggagcgtgaagaaatggaactgaaatcctatcagaaagaagtcattgccgatcttgcacgctacctggagctggtggtggaactgcaaagcccggcaaaggcgtatcaggccctctggaacgaaaaaaatgttctggtgggcttcggcggtatgcccaattatgtgaatgcgctccccggtgtgccccatgtgtgtgccaaggtgcccaccggcggcggcaagacctatatcgccgccagttctcttcggacgatttttgacgccatgccccagcgccgggccaaggccgttgtatggctggtgccctctgaggccattctgacccagacccgtaaggcgctggaaaatccagaccatccctatcgccagcggctggatgtggattttggcgggcgggtgcaggtgtactccaaggaacaggccctcatggggcagaacttcaccccctctgctgtgacagaacagctttccttgtttgtgctcagctatgattccttccgcaccagcaaaaaagaagggcgcaaagcctatcaggagaacggttatctggccgagtttgcaaagtggatggatgatccgtcggttctactggctgataccgatgaaacggcgttgatccaggtaatccgctatctgaatccggtggtcatcgtggacgaaagccaccatgccacttcggatttgagtgtggaaatgctgcaaaactttaatcccagctttgtgtttgacctgaccgccacccccaagaagaaaagcaatatcatctcttttgtggatgctgcacgcctgaaaaaggccaacatggtcaaactgccggtcatcgtctacaaccgtaaatctcaggccgatgtgtatggggatgctatcgccattcgtgccaaactggaggcacaggctaaacgagagcaggaaaccagcggacgctatattcgccccatcgttcttttccaggcccagccccgcaacaatgcagacagcaccacatacgaaaaaataaagaaaacgctggtggacggcggcatttccgaacaggaaatcgccatcaaaaccggcgataaggacgagctgaaaaatgtggacttgctgtccccagactgccccatccggtacatcatcaccgtgaatgccctgaaagagggctgggactgcccctttgcctatgtgctggccacggtggcaaaccgcacttctaccgtggatgtggagcagattttgggacgggtgcttcggctgccctatacgcagaagaacagcagcgaggtactgaatctctcctatgtcatcacatcttccgcagacttccaccagacgctggagaaggtggtggccgggctgaacagcgccggtttcagcagccgcgactaccgggcacaggatgtggacgtgcccattacggctgcgcccacccaggagccggagcaacttcctattgtcccgcctcccgctgacgaaccagatctgccggaggtagacggctcggatttgaaggcgcgttttgaagcagccacacaggaggcggagcaatccgtgcaggatggaacgatgcagtccgaccccatgctgtcacaggctctgcagcagaacaaaacctatgaggacgagatcaaccaggccgacaataccgctttgagccaggctccatcggaggtgcgcgacaaaatgaatcagttccgaatgaatgaggaatttgcagacgaagcctctgccttgcgcttcccccagtttatgctggagactggccccagtctgttttcggaagcccacgaaaccctggaactggagcacttggagggtggcttctctctgcgggacaaagatgctcatgtggatttcaccacggtcaacgctgagatggcacgggtggatgtagacgacagcaaagacagcaccgcaaaggcgtggcgtctgtccggcggcgacagcgcctttttccgagagtggttcaacacccagccctcggaaaagcggctttctgtgtgtaagagcattatcaagcaaaagctttccaaaatgaactgcgtcaatgaccgggaactggatgaatatatcgaccgggtgatcggcaccatgagcgacgatcagctctcagagttggagcagtcaccgtatccttatgtcgtaaaaattcaggggaaagtgaaggagctgattgcccagcatcgctccggcgtctttgatacctggctggagcaggacaagatttcctgcctgcccaactatgcgctgccagcggtgatctccccaacggcatttacctcgatggtgccaaaatcgctctataccgccgaagaagatatgaacgagtacgagttcaaggtggtgtgggcactgtcagcgttgggcaacgtcaagtggtggcaccggaacatctccagactgggcttccagattaacggacctgttcatgcttaccccgacattatcgtgatgctccacagtggaaagatactgatggtggagactaagggcgatcacctggataatgatgagtccaaggagaaagccaaaatcggtgaccagtgggcgaagctggccggaaaacagtacaagtattacatggtgttcgagaccaagcagccggactatccgggagcgtattctatggagcggtttatggagattgtgaagggattgtaacaccccaaaatatatgttggaggtttaaataatgggaaccattaaatcagaaataatgaatctctttctggccgaacatcctgagcaagaaagtatcctgaagccgttcctaaacggtttcgacataaattatgcagaagtgaagtccatcaataacactacaatcttttcatatatgataaagccagaagactttatgaaagaagcttttggcctggagaaagaaattttattagtatattcgccttttgatactttagagccacgcgctctacaggctgcaaatatgctgtttaaaatgttcccatacatgaaccgaatagatacacttaacttttttatggtttccaaagatcctgcaatacaaaattatgcaggaataatgtctttttctgaggaagaatctcgttcgctagttccctttttatattctgatttaatttcaagtactagcgataactggtatgttagaaaaatcttaaagaaaaacttttatgacgtagatttgtttggctatactcttccgattagagacgaggcttcctttttttgggcggcaccaaattgctgcacgatacattgatgcgattcgccgatgcgaaaaccgaggtatctttgggctacgcaaaacaggtaaaacatcctttttgtttaagattgatcgaattattcgggaacagcatcttgggtttgtatttttttatgattgtaagtctccatcatacagaaaacttcactggaacgaactccttggagaaatatgtagcaatgtagccaaacgattaaaaatacgcattcgaaaagaatatgatgaacaaaacatcattaagagttttcgatatgttgtgaaaacggcatcagataagaacataaagatcattattatgtttgacgaaatcgaatatatttcgttcaaatctccgcttgatgaacactggaaaacggaatttatagacttttggcaaacaatttggtctgttcaaagccttcatcggaatctggtattcatattatctggtgttaacccaagtgttacagaaatcgatacaattaatggcgttcaaaatccgctatttagtatcgtgcaatcggagtatttacatggattatctgaagatgaagcgagaactatgattcggactttagggcgcagaatgggtatcagatttgaatttgattctgtgaaacttttatacgatcaatttaatggacatcctatgcttctgcgcctagcgtgtagctatattaatcgtcagtataatgacccggataaacgccccgttacggttacggcagataacttaaaaaagctacaagatgatattgatgtagaattagcttactatttccgtcatattgtctcagaaatccaaaaattctacccagaagagtatgagatgtttgagttgctagcttctggacaaacatcggattttgtggagttatctgcaattacagagtatacaaaacatctgtacagttacggcttagttggtcgtgagaatggaaagctgccatatgttaaaatgcctgtagctggaagatacgtagctatggaattagccaagagagaaaagagaacaaccctatatcgaattgttcctcttgaaaaacgaaatcaatgggtcgcgcagcgtgtgaagtcaattatacgtgatttgcgtcaactggaaacagcaatatctaatgcaggaacgtgcaaactttttggcgaaaactctttccccgaggcagatagattcgtaaatgtaggaccagtgtctaacgagccagaatttgaaaatttcttcaatatttgtaatcgttgcttcgttgagtcaatcgaaaaatacggcaaatcattggggaaaaagaaatatttctggaatgaaatcaagtcaacatatccggctttgtttgacgtactacatcgaataaaggtttatcgccattctagcgaccacctagaactaaaccccgatgtcgctaagaagtataaagaattttggaacgaggatacagctggcgttaccgactttgaagaacaacggtttgtgattcaacaaaagctattagaagcctttttgtccgcaattcaaacagaaatagattctatatcctaaacaatactccgcccaaagtatactttgggcggagtattgtcaattttacattgaatctattatttagtacctgctaaatcatttgaaaatgctttagcgcatccataattgcagcttccttttccagcgggcactgcggcactttggcatcttccttcttcgatagattatagttctgccccacatctagcccgcacgtccgcttaacctgggagatatacaggctggacaccttcaggccgtgcttttccagcacataggctttgatctcatcataggtggctttactctccgccgctgtcaaatccagctcatccagattcaactctacttcgatatgctgcttggtattgagtttggacaaaagtactaccgtctccacattggcggtgcgggggaacagatcaaaagcccggaccttttccaggcggtagcccccttctgtcagctggcggatatcccgggccatggtggccgggtcgcaggagacatagaccacccggcggggattcatgcgcagcagaatctcccgggccttttcgtccaggcccttccggggagggtccaccaccatcactgtgggacggaatccctcttccagaagctgctgggccgcctgccctgcatcggcgcacaggaagcgggtgttggtaatgccgttttgcctggcattttcccgggcatcctccacagcctggggcacgatctccacccccaccgcctcccggcagtgccgggccatcaccagggtaatggtgcccgtgccgcaatacagatccagcagcgtgtccccgggggaaaaggcggcatattccaccgcctgctcgtaaagccgctgggcctggggctggttgacctggtaaaaagacagaggggacagggaaaattccacgccgcacaggctgtcttgcagccgtccttcgccccaaagagtgcggcactcctcccccagcacccggttggtctgccgggtgtttttgttcagcacgatgcccaccagagaggggcagctttcccggcaaagggccatgagctgttccggctggggcaccttccaggaagtgaccaccagagtgagcaaagcgccctgctttccggtgcgcacatagatatggcgcagaaggccccggccggtttcttcctcgtagatggaaacgccgcagctttccgcccaccggagcaccccttctttcagttgatcggccagaggggattggatggcgcagttttcctgggggatcacctgatggctgcgccgccggtaaaagccggccgccggtctcccctcttcggtggcgcaggggtacatggccttgttccggtagtggaagttttcgccccccacgatttccagatccgggacactctggccgcccagccgctccagggcgtcctgcacccgctggcgcttggcgaacagttcttcttcgtattgcatgtgccagaagtcgcagccgccgcatttgggaaaggcggggcagcatggctcctggcggtggggagaaggctccagcagctcttcgatgcgggcataggctttgtttttcagggccttgacgatgcgcagacggcaccggtctccccgcacgcctcgctccacaaacaccacctggccgtccaggcggcatactcccataccgccgctttcatagccggtgatgattccttcgtgtatgctgtttttttccaaactcatggccgcagttcctccgtcagattgtcccccagctctgtgaaggggatctcaaaaagcatggggcctgaggtatagggccccagggcgtattcctgaaagaccaccaccaggctttcttcggtcaggtaccagtcctcctgccacacatcccccatggtctcctggtagttttcgtaaaacaggcccggctgggcttcttcctgctgcttggcctgctccaaagcctgttccatcaccaaagcccgggggtcttccgcgccggggagaatgtccgtcagagagagcaggtaatagtcccccgcccggaaaagccagttgtcccccatgatctgaagagagccatgaacgccgccggtgtatcggctccggtcccggcgaatggagagataattgcctttgttgcgcataatggcaaactcttcatcccactggaagttccccaggaaatccccgtcctgctgccgctggcgggccatgggcaaaagctcctctgtgatggacagcagggctttttctttattgttatcgtagtaattgccaatgttcatcatgggctctccctgatagagcacctggggagaggaaagagaatagcgcaaaagcaaagtgccgtcctgggccttttcttccccggaggacacatcctctgtgacggtgatgccgttgtcttccggctggggaagatcttccgactgctgggtttctttgggagagggctcttgctgcttttgcaggtcctcccgatggcaggcgctgagcaaaaaaagaagaagagccagggccgccaggatttgttttttcatgttgttccgcctttccggggtggggatgatgggccgtgttttccccggcccccgcaggggaggggaaaatggctgtaaaatataaaatagtataccataaaagtgcagtccggcccatctctttttcatgggaggcatagaaaaccgtggaaaggggaacaatggttatgacaaaagccccagctgcgctttcaattccagtacccgcaaaaccgcctcgtccagccgctccatggagacccggccctcttccaccgcccggcccagggcggcgtagtctgtgggcaggtcggaaacgatgagcagatcggccccggccgtcagggcctggggagcagcgctttctccgccgcagtaatcctggatggcccccatcaccagatcgtcggtgatggctacgccggaaaagcccatttcctcccggaggtaccggtaggtctggggagaaagggaggcggggacgccgctttccaaagcatccaccacattgtggctgaccagcacgcaggcggctcccgtccggatgcccgcctggaaggggagcaggtcccggctctccagctcttccagggtgcggctgtcccagctgaggccggtgtgggtgtccacattgctgccgtagccggggaaatgcttcagggccgaggccaccccttcctgcctggcccaggtgaccgcctgccgcacaaactgggcgacttgtcctgcatccccgccaaagctgcggggatggatgaagtcctggggatcatcggagaggtcggccacaggagccaggttgagccggatgcccaaagcgttgagaagggcgcttttctcccgggtgtcctgccctaccttttcccagcctccttgggcataggcctgccggggggagagaaatttttccgcccgcagccctgggtttccactgacgcggcacaccgtaccaccttcttcatccacggcaaagagaatgggcgttttggcattttgctgccagctttcggtgtccgctttcacctgggcagcgtcctttccttcaaaatcccggccaaagagcagcacgccgccaggggccagggcctccacttccggacgctcttcggccaaaggacagcggaccaaaaagacttgccccagcttttcttccagagtcatttccgaaagccgctgttgggccggagacaaaggagagtccggtgagggtgtgtctgtcgtttcgttttccgtttcggcctttggggatttttcttcctcttttacaggggaagcagggggcgggacaggccgggtgtccagaaaaaagcaaagactcagcatcccaagacccaggaaaagggcaggaatgatccatttcatggctttcatcaggcgttcctcctttgggggcatcttatcacaggggactttacagtgcaagagaccattttacttccattttacccatggcggcttacgactttacaaacttgttttactatatggccgtagcgaacggacaatataaagtgaaaacgaaaggtgaaactgaaatgaacacaaaacggaaactttctctgattctggctggtctgatgaccgcttccctgctggctggctgcgctcaggacgaagctgacagcggcaacggtggcggcggcaacggtggcggcggcaacggtggcaacaatggagatgacgtcatcaccgtagtcactcgtgaagacggttccggcacccgcagcgcctttgtggaactgaccggtgtggaagaggacggcgaggacaagaccaccgaagaggccgtggtagccaaccagaccgaagcggttatgactcaggtcagcggcaatccgggcgccatcggctatatctccctgggttccctcaatgacactgtcaaggccctgaaggtggacggcgccgaagccagcgcagagaatgtgaagaacggttcttataaagtggctcgtcccttcaacatcgccacaaagggcgatcccagcccggtggcccaggacttcatcaacttcatcatgagcaaggaaggccaggaagtggtggccgatggttacatccccgtggatgatgccgctcccgctttcgaaggcacccagcccgaaggcaagatcgtggtagccggttcctcctccgtcactcccattatggagaagctccaggaagcttatgagaaggtcaaccccaatgccaccattgagatccagcagagcgactccagcgccggtatgtctggcgccatcgaaggaacctgcgacatcggcatggcttcccgtgaactgaaggacagcgagctgtccgagctgacagccactcagatcgccatggacggcatcgccatcgtggtgaacaaggacaacagcctggatgacatctccaccgactccatcaagggcatctacaccggtgagatcacttcctgggccgatgtgaagtaagcaaaaccaaaaaccagaaacctcccataaaaaggccgccgagaacttctcggcggccttcctgctatgttttcctatagggggaagcaaaggaacaaggcagacaaacggcgcactttccgcaggcatcggcgggaaggtccagaccccgtttttgctgtaccggctggttttccatgcacatggcatagcacttttcccggcagaagccttctttggtcaaagcgccgcccacgcattgtttgacgcacaagccgcagtcttttccctggtaaagcaggcaggcgggctttgcagggatggggtctccggtcaggggcagggtggtcactagcgaggtatagtagccgcagcagcctttggaggtgatgagcaggttgtgctttccaaaggtgcccaggccggccaggaaggcgatatgccggtgggaccagcggcttttgtaaaggccgggggcggcgtagccggtgtctttgggaatgacggcccggaagccctcctcttcagcgatggcctggatcagctggcccacaggggccaagacctgagccgagcgctggtaggccatcacccacagaggggaggcatagcgtccttcctggttgctttgtatcacctccagggaaaaaggaagaaaacaaactgcggctgtgcggcagccgggaaggagctcctggggcaaagcatggtccggcagcacggcctggcgcagccggagaaagccagggtggtctgttgaggcaaagccgatgaggggccgccgccaaaggggcggcagctgatgttcttcccgaaaagacaagagaaagcgccagatgcgctcctccatctgttgccgcaggacttctttgtttggtgctgtttgcatcggtgatacaacctccatggaatgacaaaaaacggacgccgggaaggcgtccgttttgatttttaaagaaaagatgctaggagagatagggcatggggttcaccggagaaccacccacccgcacttcccaatggcaatgggggcctgtgctgttgccggtagagcccagcttggcgatctgctggccctgggctaccttctcccctacccgcaccagcagtgcgctgttgtgagcgtagagggtctggaggccattgccgtggtcgatgatgacacaatagccatagccaccgttccagccggcctggatcaccgtgccgccgtcagcggccaccaccgggctgcccttggttccggcccagtccacaccagtgtggaaaccacggctgcggtagccatagggagaggtgagaatgccacggaaaggctggatgaagtagcccttggaggatgtggtgggcttctccttggtgccaaccacctttacctcattctgaggctgctgaacgacctcccagctctggatggtgcgttcctgctccacgccgtcgatgctgaccacattggccaccacctgagcgacgccgttctggccttcggtgacgatcttgctttcgttttcatacagctcgtcgctgtactggacttcgctttcataggcgatttcctgagtgtattccactgtggtggtctttttcaccgacagcagaggctcgctgttctggagggtgatctcctcgcccacatggatgcgggccgggtcaatgtggggattgagcccctgtacctgctccagggtcatgccgtagttttcggcgatctggctgagggtgtccccctgctgcaccgcataaaccttggtgccgcttttttcgccggagagcgccagttcgatttcttcgatggaatccaccgcgctggtgggaacggtcatctgttcaatggtcacatcctgaacgaattccgcctgagcgttttcgtcctggccaacctgggcggagagcatccgctgcttcagcagttccagagcggttttactggggttgacgccgatgacctggccgtccaccgacagcacatactgggtagagacctcttccacctgggcaaacagagcttcttcggcctctgtttcgtccagcagccgatcaggctgcatatagcccagagaatatgtcaggtcggcggaaagagtataaggatggcccagatagccgccggtgcgttcttccaccttgtcgatgattttttccatatcctctttgctggacacaaagcccagggactgaccgtccagccacacttccacgccgatgccgaaataggtggcggagaagagcatgatggtggcggtagccaggaaggcacaggccggcacacggctgcgtttttccttccgggcggagaggagatattgggtgcgtgcttcttccaggcggcccaggacgctatggccctgctgcgccaggtgagaggcggtgcggccgaaggtcttctgcagcccttcccccaccaccacgccggccataccggccagatggaacaggctgtctgccgcttgagcggttttgccagccagggtgcggatcagttccttgccgctttgggcaccgggacgattggcgccgatgcggcacaaacgctccagatgggtcttgcatttgacctgctgccggcggaccctgcttttgagagatcccatgttcttgaccttcaagaagcaggcctcctttcgtaaaaatgatagtcaaaatccgaagattacaaatcggtgtgttttgattacaaatcggtaacaggtcttatcataatataaatggcttggtttgtcaaggggaaccggtggattgttgccgttttgcgtatttttacgacaagaacttcctccctccgtttatcatggtgaaaacagcagacggaaaggagcaaaagcaggatggggaacatttatggatacatccgggtgagcaccaaagagcagaatgaagaccggcaggtgctggcgctgaaggggctgcaaatcaaagaggaaaacctgtttgtggacaagcagtcgggcaaggattttcaccggcctcagtatgaaaggatggtgcggcagctgaaaaaagacgatctgctctatgtgaagagcatcgaccgtctggggcggagctatggggacattctggagcagtggcgcatcctgaccaaagagaaaggggtggacattgtggtgctggatatgccccttctggatacccgctggggcaaggacctgatgggcacttttttaagcgatatcgtgctgcagattctgtcttttgtggcggaaaacgagcgggtcaatatccgccagcgacaggccgagggcatcgccgccgccaaggcccggggcgtgcatctgggccgcccggccactcccctgccgccggggtttgaagaggcgctcggcaaatggaaaaagggcgagatcaccggcacccaggccgccaaaatatgcaaaatgcccctctccaccttccgctaccgggcggaacgctgggagaggggcaaaaaatgatcaaataggaacaagtttttctgcaaaaaggtgtaccttcttgcaaatcgggattttcttcctgtcaaaacctattatatattggaaaaatcaaaaagtctagcagtttttttgatttattaccatttctgttggctttaaaaacaaataccaaaaactacacttttgtgtaagggggaataaatatggacgaggggcttaaaagcttaatagcaaaagcagagcagggagatgttaaatcaatggttatggtgggcgactgctataatcgtggattatatacgaataaagacgattccaaagctcaagtttactataaaatggctgctgacaatggacatcctggagcaatgtttatggtgggtttagggtatttaaatggaattggtgtagagcaaaatatggttaccgctgtaaagtatatacaagatgcagcaaataaaggtgttgctaatgcgcaatatatagcaggatcattgtatcatgctggaaaagcaggaactttttttaagaatcggaaggcaatcaagtattataaaatggctgcgaaacaaggacacgcagatgcacaatatgagcttggaaaaatttatttacttaaatggagccacggaagtaatcggcactttgataaaggattgttttggatactatgcgcttcactgcacacaagtaaaaaatcagcagaagttagtacaaaagcgaaggattatataaaccgtatcataagtgagcttggttttccgaaagaagctgtaaagtggaaaatagaacaaataaagcgtgagcatccggggtacatcattgaccctacctactaaaaaggagaaaatgacatgacttccccaaaagagttaaaagaagcaaactatgtccatccagatgttgaagaatacaatagcgatataaatttatgtggccttcccccatgcgatcattcaaaaatgataaaagatgaaagaacaggagaaaaacatcgctactgtatgaaattgcaaatgcccgttgaagaatacgacttctgtaaatatcacagcgatgaagagtggacgaagttgatcggagagatgggcagtcttcttcaaatacaagacgaagcattgaaggcggggaagaggaaaaagcggcagaaatattggacgatggcgtcaatcctggtcgtactcgctgttttggtttatgcattgataaaatagaggtgatttaatgccaagatggaaaaaagaacaatacatggatgcatccggggcgtggagaatgcctgatgactactatattgattattccggagcatggcgttctcctgatgactactatgtagatattacaggggcatggcgaggcccaaatgatgaatacatagatgaggctggtggatggagaaggcctggtgaacaatatatggatcattcaggtggatggcgttattagaaatagaaagaggatgataatagtggaaaaatttgcaagcggcttgattgtttttgcaatatattcatttttcgctttgcgatggggcatccgagctgtagatgggcgatggcagtggcttgagcagccgaatcataaggctatcaaaattgtgataggtgctatttttggctatattttagctgcgttttatttcatattttggtgcgttaaaatgctcactgttacattacccaaatggctcagctaggatatggatattttgaatagtgtgttcaagcagctcgtatgctcacttccgtgcccaccaccagaaagaggtgggatcctgggagggcaagatggagttatttccacatatgccattgatgatggtttgcaaggatttgactgctatgcccagtattaccctaatgtaaaaaaattaaatgaaataataaggaactgggaaaagcaacatattgttttttacgggatatttcattcgcattttccgggaggcaatcaattatctctgggagatgaaaggtatattcgccaaattatgatggcgatgccgacagaggtgaatactctattctttccacttgtgatccagacaagcatggtaggatatcgtgcagacagatgcggttctcaaatccgtatttgctgtgatgatataaaaattatatgagttggaggttgcagtttatgaacaaggaaatggaaaaagaccaaaaaatcaacatccctgaaggtaagttctgtggcggtaattgtatagattgtgtttattatgaaccgcagaataaggattctagtgggcggggatactgtaattactacaacacacactattatccatcagagagaaatggttgccttagccgtagagagtattaaaaactgactgtcgtttcgttatagtatgagatgacctcaggacacagcgacttcaaagatactacttaatgaaagcgaaaaccacacacaaacaaaaggcctgggacggaatccgtcccaggcctttgtttacccggttatttgaacaggtctttcattttttcaaagaagccttttttctccttgtactgggcctcctcggcgctgtcgtcgaagcggcgcagaatgtccttttgctcgcttgtcaggttgcgggggatctcgatcttcactttgacaaactgatcgccccgaccccggccattcacattgggaatgcccttccctttcaagcggaaaatggtgtccggctgggtgccttccggcatatggtaagaaatcttgccgtcaatggtgggcacgatcagctcggcgcccagggtggcctggacaaaggtcaccggcatttcgatcatcacatcctgcccacggcgcttgaacagcggatggggcttgacgctgacggtgatgtacacatcccccgccgggccgccgttctgacccatatgcccttccccacgcatggagatggtctggccgtggtcgatgcccgccgggatcttgacggtgagggtgcggcttttccgcacagtacccgccccatgacaggtgctgcagggctccttgatgatcttgcctgtgccccggcagcgggggcaggggctggaggaagaaaagacgccgaacaccgtgcgctgggtggtcttgacctggccggtgccgtggcagtcggggcaggtctcggcagaggtgcccggcttggctcccgagccgttgcagtcagggcacttttccacacggttcagggtgatcttcttttcgcagccaaaggccgcttcctcaaaactcagattcaggctgacctggatgttttccccacggcgggggccggtgcggcgggcctgctggccgccgccgaaaaagctgtcaaaaatgcttcccaggtcaaaatcttcaaaccctgtgtactggccgccatatccggctccggccccataggaggggtccactccggcatggccgaattggtcgtaccgggcctttttctccgggtcggagaggatctcataagcggcgttgacttctttcatcttttcctcggcggtcttgtcgccggggttcaaatccgggtgatatttttttgccagcttgcggtatgcttttttgatctcatcctccgaagcgccccgctgcaggcccagcacttcgtagagatctcttctctcttcgggcatagaattttttctcctttggcaaaaccaccgtcaggcggccgccattgcggccgcccgacaggctatcatcccttgcttatttgctactttcgtcctcgtcaaccactttgtagtcggcgtcatacacattgccctcggcattgtttgcatcggactgtgccccggcctgctggccctcctggggagcggcgtccttatacagcttttcggcgatggaatagaaccgcttggtcagctcttcggtctcctgcttgatggtttccacgctttcgcccttcagagcttccttcaccttttccatctgctcttcgatgggcttcttctcttcatcggtcaccttgtcgcccaggtccttcaggctcttttcggtggaatagaccaggttctccgcgttgttgcggatgtcgatctcttcgtgacgcttcttgtcctgctcggcaaactgctcggcttccttcacggccttgtcgatgtcttccttggacaggttggtggaagaagtgatggtgatcttctgctccttgccggtgcccagatccttggcggacacattgacgatgccgttggcgtcgatgtcaaaggtcacttcgatctgaggcacgccacggggagcggcaggaatgccgtccagatggaaccggcccagagtcttattgtccgcggccatctcccgttcgccctggagcacatggacctcaaccgaggtctggccgtcggcagcggtggagaagacctgcttcttggtgataggaatggtggtgttgcgctcgatgatccgggtgcaaacgccgcccagggtctcaatgcccagggacaggggggtgacatccagcaacagcaggtccttgacctcgccgcccagcacaccgccctggatggcagcacctatggccacacattcatcggggttgatgcccttgaaggggtctttgccggtgatgctcttgacggcatcctgcacggcggggatacgggtggagccgcccaccagcaggaccttggccagatcattggtgctcaggccggcgtcggacatggcctgcttcacagggcccatggtggcttccaccagatcggcagtcagctcgttgaacttggcccgggacagggtcatgtccagatgcttggagccggaggcatcggcggtgatatagggcaggttgatgttggcgttgagcatgccgctcagctcgatcttggccttttcggcagcttccttcagacgctgcatagccatccggtcaccggacaggtccacgccctgctccttcttgaactcggagacgatccagtcgatgatccgctggtcgaagtcgtcgccgcccagacggttgttgccggcggtagccagcacttccacggtgccgtcgccgatgttcaggatggacacatcgaaggtgccgccgcccaggtcatacaccatgaccttctgctcgttttccttgtctacgccataggccagggccgcagcggtgggctcgttgatgatacgcagcacttccagaccggcgatcttgccggcgtcctttgtagcctggcgctggctgtcggtgaagtaggcaggcacggtgatgaccgcctgggtcacaggggaacccagatagctttcggcgtcggccttcagcttctggagaatcatagcggaaatctcttggggagagtaatccttgccgtcgatatggactttgtgatcagaacccatctcacgcttgatggagatgatggtgcggtcggggttggtgacggcctggcgcttggccacctggcctaccatgcgctcgccggttttggaaaatgccacaacggacggagtggtccgggcgccttcggcgttggggatcacattgggttcgccgccttcaatgacggccacacaagagttggttgtaccaaggtcgataccgatgatcttagacatagtgtattcctccaaactatatgagtttattttgactttgttatgaaaaaggcagtgcctttttgacatattgaaaaggggcttttaattggccacctgcaccatggcgtggcggatgaccttttctcccatgatgtagcctttgcgcatcaccagggagacggtgttttccggcaggccttcctgttcgatgtgcatgacggcgtcatggaagcggggatcaaagggctgatcctgggcggcaatctcggtgacgcccatcttttccagtgtttctttgaactgcttggcgatcagctccacgcccttctggtattcttcgtcggcgcacttttgttccagcgcccggtccagattgtccagcaccggcagaagctgttccaccgtcatggcctgggcgtcggaaaagacgctgtcccgctccttctgggaacgcttgcggtaattatcatattccgccagcacccggatatatttgtcgttcagctgctggtactgctccttccagtcctccttgggctggggggcttccgcctctgccgcctccggggccggctggttttccgggcaggagcaggtttcctgctcagcctctgtctgctgtgtttccttttccttctccatgttgtccatgcttttccacctatctgccctgggggctcgttgtctgctgtttattggtcttctttattctgcccatttggttcctgtgggaaacggatgggcatgagtcctcccagcgtccggctgagaagcagcagccgggaggcgattttgctgtaatccatgcgggtggggccgatgaccccgatgatgccgctcacatcctctcccagatcgtaggaggtaaagacgaagctggcgtcttccatggggccctggccgttttccggcccgatgcggatgttgagcatctggggcttataatcccgggccaggccgaataccttttccttgtcgcccaaaagctccagcaagggctgggccttctgggcatcgtaatattccggattgcccagcagccgggagacgcctttaaccaccatgtcataggcatcggaaggctgctcgatctgccacacaaattccgcggcctgggtgatgagctggtgaaggggcgatgcaggaggcaccgactgccccagttcatccagccgcagagaaccgccctcttttgctaaaaccaggtttgcggcccggcagaaggcatcgatctcctccggctccaacgcctgggaaagatgcaccaccttattgttcaccgccgggggcaccgtcaccgccaccaaagcgtagtcgctttcggcgatggggatgagctccaggcgcttgacctggcggcgattgtggcgggacgaaagggaaacggtgggctggccggtgagttcggaaagaatggctgaggcctcttccatggtgtcgtccagctcctggatcttgctttccagcgcccttcgcatctgctcgatctcccgggctgtggtgcggcagcggttcatcagctcatccacatacagccggtagcccagaggagagggcacccgcccggcggaggtgtggggcttttcgatgtagcccatttcctccagttcgctcatctcattgcggatggtggccgacgaaaccgagcccttggcctcggcggccagcagcttgctgcccaccggctctgcggtttcgatataattttcaatgatcgctttgaggatcttcctcttgcgctccgacaggtccatccaaaacaccgccttttctgattgccttacggtgcgttagcactcttcatcctcgagtgctaactcaatcctatcacaaactttcaaaatgtcaaggactgaaaatcaagttcacaaattcgtttcaaatagggcaaggattttaaattttttcacagagtatccgggacatcttgtatttataactagattcgtgtatactcataacaaacaagcggaattttatcaatccttttttgcaggaggcgtttcccatgaaatacaaaatcctctccgacagctcttccgatgtgacccaggcttttttcgctggggagaccgcttttgaatatggagtggtccccatgtccatcaacggccccggcggtttgtcctatttggatctggaccccaccccggcccggtatttcgtggaaaaaccccgggagatcaagggtcagtggagctcttcctgtccctccccggccgcctatctcaaggagatgcagggcgccgaagagatcttcgtggtcaccatttcctcccggctcagcgcttcctattccaccgcctgcatggccgccgacatggcccgggcggaaaatcccgatgtgaagatccatgtggtggattccaaaagcgcttcctccggcatggctctgatggtgttcaagctggccgaactgtgccgggagggcctgccttttgaggagattgtggaaaagatcgaggaattccgcaagagtcacaccctctatttcctcatcggttcgctggagaccctggtcagtgccgggcggatgaaccgggcggtggggatgatggccaccatgctcaacatccatcctctttgcggcgaggacggagacggcaacatcaaggtctatcagaaggtgcggggcatgacccaggccctcaaccggctggtggagatggtgggcgaacggggcgagaccctgggacggcatctggtgatcagccagtgcaacaacccggaagacgccgaaatgctgcgcaaggcctgccagcgccggtatcagtttgccaagatcagcgtgctggaaatgcggggcctggcctccttctatgcaggagaccggggcttgattctggcctattaaaaagaatattccagcccggcaaaattttgccgggcttttcttttgctcactcataaaaattttgtccaaatatttctgtgaacattctttgaattccagaaaatccttcccattcctgtgctataataagaaaaccgagaggggcggcttggccgccgggaaaggagaaaaagcctatgcgcctgatctcatggaatgtcaacggcctgcgggcctgtttgggaaaaggatttttggattattttaaggaaagtaaggccgatatcttctgcatccaggaaaccaagatgcagaaagagcaggcggaggtggacacccccggctattttcaatattggaacagcgccgaaaagaagggctattccggcacggcggtctttaccaaagaagaacccctggatgtaacttatggcctggggctgccggagcatgacaccgagggccgggtcatcacctgccggttcccggagtttttcctggtgaatgtgtatacccccaactcccagcgggggctgacacgccttccctaccggatggaatgggaagatgctttccgggactacctgctccgtctcaaggagcagcagccggtggtggtatgcggggacatgaatgtggcccacaaggaaatcgatttgaaaaatcctcgcaccaatgtgaaaaacgccggtttcaccccagaggagcggcagaagatgactgagcttctggaaagcggatttgtggattccttccgttttctccaccccgatgttgtgggcgcctattcctggtggagttacatgttcaacgcccggcagaacaacgccggatggcgtatcgactattttctcacatcggaagagctgaaagaccggattaaaacagcggagatccattcccaggtgctgggcagcgaccattgcccggtgcttttggagctggcctagggctttttccagcaaaggagtgaacgaaattgaaggatattctttattatggcggccctattctcaccatggccgagcctctttatgccgaagctcttctggtgcgccgcagcaagatcgtgttctgcggagacctcaagacggcggagagcatggccgaagagggggcagagcgggtggatctcaaggggcggacgctgatgccggcctttatcgatgctcacagccacctgtcccatgtggccgatgccatgaactatgccaatctttccggctgccagagcgtggaagagattggagagcggctgcgccagtgggcggaggaaaacaatctggaagcgggaaagtggatcatcggctcgggctatgaccacaacgatctgcccggcggctgccatcccaccgcaaagcagctggatgccctggtgggagaacacccggtgctcatcactcattcttcgggacatatgggggtggccaacaccctgggactgcgggagctgtccatcagctgcaatgtctccgatcctccgggagggcgcattggccgggacgaagagggcaacctcaccggctatctggaggaaaacgccctgatccagcgcacccggcagatccccaagcccacccaacagcagcggctggacaatctgaaaaaggctcagcaggtctatctccgcaacggtatcaccacctgtcaggacggcaaggtgaaccaggccgattttgagtttttgtcaaacgccgccaaaagcggcctgctggaaatggatgtggtggcctatgccgatctgaaaaacaacgaggaactgctggatcaatacgctcagtaccgcacttatcagcggaatctgcggctgggaggttacaagatctttttggatggatcgcctcaaggccgcaccgcctggatgaccaagccctatctgggaggcaaggaaggctataagggctattccatctataccgatcaggcggtggaggaattctgtgccacggcccttcgccggggcgtgcagcttctggcccactgcaacggcgacgcggcatcccagcagtttatcgacgcctatgaaaaagccctgggcgcctgccgtcagaaggagtccatccgcccggtgatggttcacgcccagaccgtccggcccgatcagctggagcggatggccgctttgcagatgatcgcttccttctttgtggcacatacctattattggggcgatgtgcaccggaagaacttcggggatgaacgggccatggccatcagccccactcacaccgcattggaaaagggcgtgctcttcaccttccatcaggacgccccggtggtgccccctgatatgtggcacaccgtatggtgcgccgtgtgccgtcagagcaagggcggcgtcattatgggagaaggcgaacgcatcccggtgctggaggccctgaaggccgtgaccatcaacggggcttatcagtattttgaagaaaagaccaagggttccctggaagagggcaaatgggccgatctgatgatcgtggacaaagatccgctgaaggtggaccccatggagctgaaagacatcaaggtgctttccaccatcaaagagggcttcaccctctggcaggccgaataaccaaacaatgccccggcgaaagccggggcatcaaacagtgggaaaatcatatagtaaaaggggatttttttgttccacccttaaccaatctgcaaaaagccgcgacctgtgcgtggctttttgcacttctcaaggggcaagtgtgcgccgaaggcgtgcatgcagtccattgcaaaaactcgaaaaagtggattatgccactttttcgacaggccagcgccccggcggaagccggggcgttttcttttttggcattttatgataccataaggaaagttttgaaacaggaggaatgaccagatgggaagaaatagagggaaaagactgccggcctttttgctggcagtgtgtctgcttctgcccttcttgccccagaagagtaatgcagccttttccgatgtacaggaccagtggtttgcaccggcggtggaggaaatggcccagcgggggctgatcggcggctttcccgatggcaccttccgcccaggagactgggtcaagcggggggaaggggccaaaatgaccgcccaggccgtgggccagctgccctataccctgccccagacgggaaaaggtgattttgccgatttgcaaggccattggtcggccaaatatgtgcgccagctgctgatcgaagagatcatagagccggaggattacgggacaaactacggccccaaccaaaacctcacccggctggagatggtgcggatgcttctgcggctgctgggctttactccctcgaaaaattgggtggacagcggttttcccgatttggcctctttggatgcagaagatcggtactattgtgaaaaggccgtggagatcggcttgatccagggctattccgacgggttgttccgtccggattaccccctgtcccgtgcccaggccgccgtgatgttccagcgggccctgcctcttctcaccgtgtcggtggaggggctgtctgcctacggggaagcacgcaccattccccaggctgcagagtttttccctgtggtgaaaaacagccaggtttccggccagggagaataccaagggcggcccttgtccctgtaccgtcatactctgacgagctgggaggaagagaagttggaaaagggcctgaaggaatatgagcgggtattggcctatcagcaatataccctggtggaggaaagccgggaagatggggtatggtccctcctttttgccgatttgcggggaagtcagtgcttgctggtggtgcttcgtgaaaaggaagaggataccggccttccctccctcaccgcagggctgttgcagcataccggaggggcggaaaactatgcctccttctgccaggctttggggtgccggatgctcttttccacaagggggatggctccctcccggtttttgcctctgacagggccggagggtcagagctgccctaccgagtggtatgacgctggccttttgccggccggggccagccagtgggtgcaggatgccttgaaaagcgccggttatgaagataccggtgaaaccattttgctggatggccgggaagggattttgttccaaaaggaaggggcccgggcggcggtgtgcctggatgaggattacctgactttgtcctatctccctcaggcagaagagtaaaaaagcgcagagccgtcaaaggctctgcgctttttttgccagtatgcggtgatagaggggactcccctcttccggcgcggtcaaaggctccaggcggccctgggcaatccactcttccagacgcagggcccagaaggcatcctccatacccacggggtattggcccagcagccggccgatgaggacggcctctgggaattgctccggcagtttcaagagctcctggcggagaaagccatcgtaaaaatcttccggcaggctgaaaatctgcccggcgatcacacctcgcaacggggcattttctcttttcagcgctttccacttccgggaaaaggccgccgcttgccagggttccagcgcttctgttttctgagagagtgctccccagagccagggcggcacttcgccccagccggtggggacgaaaggctgttcttctccggggagaagcgggggcagccataccacatccacctgaggagaaaagggctccagacgctccatcagccagtggaaagcacaaagctcctctggattctggctgacccatacccggatgggttggccggatttggcgccttcttccagggcgcataggcttttctggttctggagggtcagctcttcggcggcctctttcccctgggggaaaatatccatcaggcgggaaaggaccttttgccgtttggggccggttccctcttcgtcgatctcccccatggtgagggccagggagagggggcagatgttctgccgatttcctgccagtggaatggcctttttccacaacgcctgccgtcttgcttcttccttacggagcaaaacttcctgttctgcggaagaaaggggctcttccccgggagaacagatcacaccgatggcactggccagggtgtggtccttccctgaagcggccatggcataggccagagttcctgcggcgctttcggaaaataccgcttccagatggctcatagggacttttccatgggaatatggggacagtgttcatcgtaaaaaatttccccgcagggatggtagcccagctgttcataaaaggtctgggcatgggtctgggcgcccagatagatgccctttcctcccagctgccgggccttttcctccaaggcccgcaccaccttttggcccagatggcggccacggtagggtttgcgcactgccacccggcccatcacatagaccccatcttccccatccttggggaacagacggccggtggccacagcctcgccatccaaaaacaaaagcagatgccaggcccgctcttcttcttcgtcaaattccgtgctgaagccctgttcctgcaaaaagatttcctcccggatgggccgggccaaaggggcattctggagcccttggacaatggtgatttcctccatgatcgttctccttttcccttgggggaatgttttttcttttattatatcctgctcccctttggctgacaagccgtttgccctgggggagaaaaaagagtataatggcatcagaccgggccacaggccctttgcacaaaggagttctatcatgccataccaaaaagagatcattgcacagcaatatgaatgtgatatccacgatgaatggccggtgggagccattctccgccatgtgcagcaggtgagcaccgaccattgtgatgccgaaggcctgaccgcagaccggttccgggaaaccggtacggctttcgtcatggccaaactggcgctggaatacgtccatcccattgccgccggaagccatctgcgccttgtcaccgagcctgccgttccccagcgggcggtgtatcgccgctttaccaccatcaccgacgaagcgggccgggaggtctgccgggtggatgcccggtgggtgctcatcgatgtgaagcagcggcatattctccgcgctcatcctgaggcactggccttccccttttcagaggaagcaaaccgtaccctggatctgtccattccccggagcgcagagcttcagtccaccggggaatataccgccgcttattcccgcaccgaccggaatgggcatctgaacaacgcctgttatgccgatctggtttgtgatgtgctgccgccggaggttttgtgcaaacgctccatctgccgcatggccatttcctaccatgaggaattgcggctgggagaaaccatggaacttttcctgggccagaccggggaagacacctattatatctgcggcaaaaaaagggggcggcgctgttttgaagccagcgttaccctgggagaaagagagaaggaggaatcgtgatggatcatcctgtgatcggccgtattctggaaaagctggaaagccgggggctgctgccgctggaaaagcaggcagctttggaggaaaagctgctggaagagcgtctggctctgctgcccgatctgatgaaggagaccgggctggactgctggctggtgctggcccaggaaaacaacgaggacccggctatgaaggccctgatgacctgggaccggcgcaccgcccgccgccagaccgccctgctgtttttccggcaaggggatcaggtgcacgcactcagctgggggatgccttcccaggtgatggccaagttctataccccctccaaagaaggggatgaaaccctgtgccagggccttgcccggctgttcaaacagtacgatccccagcagatcggcgtcaatatggcgccccaggccggcggtttctgcgacggcctttccgccggattgtatcagatgctggaggaagagctgcccgccccctggagaaaccggctgtgctcggcagggagattgtccacccgcttcctggagaccatgacagcgggagaacacaaggtgatggaaaccctggtggaggtcaccgaggacatcatcaaggccgcctattccccggatgtgatcgtcccaggccagaccaccacccaggatgtggagtggtttatgcgccatgtgatggctgcctgtcagctggacttctggtttggccccgatgtggatctgcagcgccaggggctggagagcctttccaatgaaggagtcattcagccgggcgatctgctccattgtgacattggcgtcatgctgaaatacatcccggtgctcaccgacaaacagtggatggcctatgtgcggcgtccgggtgaaactgccccgccccagggcctggagcagcttttctcccagtgcggccggttccaggacatcacccgcagccatttcctctccggcataccgggaaatcaggtgttccacaaagcggtggatcagggcaagg

SEQ ID NO: 2934 - DNA, 13168 bp, Unknown
  16S sequences of unknown bacteria
gggcggcgcatgcctgccgtcggccttcttggcgtatacgggaaatgcccgttcgcaatagatctccctgtgttacaaaccaacaaagtatttgtcggggcatttcgccggggtcaattcaatttaccaaaagagaggtaacatcatgtacgaagacaagactttagtatgcaaagaatgcggcgcggaatttgttttctccgcaggcgagcaggaattctacgcagagcgcggcttccagaatgagccccagcgctgcaaggcttgccgcggcgcccgcaaaaatgcagcgcgcggcccccgggaatactttacggctacctgcgcggcatgtggcggcgaagcgcgcgtccccttcgagccgaagacggaccgtgctgtctactgcagcgaatgctttgcaaagatgaaggcacagggctaattcatgaatttaaaaaaggctgccgtgcgctgcggcagccttttttctttgctgttgcttgaaatagcagctgcattcagtgtaccgggccggtaccggaaggggggcgcagccgatgctgcatatttttgagatggagaccacaccgcagcgccaatcggccgatgctcaagcgctggcccggcgggcttttgcgtatttgttcggcgaggcggccccgctggtctgccggtcggcgtcgggtaagccgtattttgacggctccagctatgggctgtcgatcacccataccggcggtgcggcgctgtgcgccattgcggatgcaccggtggggctggatgcggaagcgccccggcccgtccggccccgactgatggagcgctgcctaactccggaggaactggccgtgtgccgcgctgcgccggaccctgcggcggtttttttgcggttttggaccttgaaggaggcatacggaaaatatacaggccgcggcgtcatcggctttcccaatcagtggcgctttactctggacggccctgccgcgtatctggctgggtcggacctctggtttcaaaccttgacagcgggggcgctgacgatctccgtctgctgcgccgcgccgcagacaccggtgctgcatccagccttttgcgaaaagaaataaacgcaagaaaaactgcaaaaattcgaaaatttttgttgacccgctctttcgtttgtgatagaataattctacctgtgaaaaaggctgcttttttgcgcgctttttcagcgccggaagggcccggcctagactgggaccgctaaatttttgatagccggcgcaatacagggaggcaaatttttaaggaggtgccgaaatgcgagtaaagatcacgttgagatgttccgagtgcaagcagagaaactacaacaccatgaagaacaagaagaacgacccggatcgtctggaaatgaaaaagtactgcagattctgcagaaagcacacggttcatactgagacaaagtgatgagttgcgtctgactcggaaaggatgaatgcaatggcagaagaaaagaaggttccggcaaagggcgcaaaaaaaggtaatttttgggttcgcaagtttggtgcgatcgggaagtttttccgggacaccaagagcgagctgaagaaggtcgtgtaccccacgccgaagcagatggtcaataacacgctggtagtcctgctgtgcgtgcttgtcgttggtgtctgtgtttgggtgctcgatgccgttggcggcttggctgtcaagggaatcgtatcgctggtgcaggggtaacgccctatggccgaaagtgcaaagtggtatgtggtccacacctattccgggtatgagaacacagtaaaggccacaattgaaaagacaattgagacacggcagctgcaggacctgatccacgtcgtctccatcccgatggagactgtcacggagatcacggataacggcccgaagacgtacgaccgcaaggtcttccccggctatgtgctggtgaagatggtgatgaccgacgagagctggtatatcatcaagaacgtccgcggcgtgactggctttgtcggctccggcacgaaaccgacgccgctgacggcggaagaggtcgaggggctgggcgtggacaagcacgaggttgtcgttgcctacgatgtcggcgattccgtcatgattacggacggtccgctgacgtcctttgtcggtgttgtcgatgcactggatatcgacaaaaataaggttcgcgtggtcgtttccatgttcggccgcgagacgcctgtcgagctggagctcgatcaggtcgaggttgtttctcagtaagatcgctttcgatcagaacgtgggaggggagcgattccccgccagaaatacgctgcggcgtattaccacatttcattcaggaggtgctttttcatggcacagaaagttactggttatattaaactccagatcccggcggcaaaggcaacggcagcgcccccggtaggcccggccctgggccagcacggtgtcaatatcgcgcagtttatcaaagaattcaacgaacgtaccaaggatcaggtcggcttcaagattccggtcgttatcacggtatatgcagaccgcagcttctccttcatcacgaagacgcccccggcccccctgctgattctcaaggcagccggtgtggaaaagggctccggcgttcccaacaaggaaaaggtcgccagcatcaccagcgcccaggtccgcgagatcgcagagcgcaaaatgcccgacctgacggctgctacgatcgaggccgctatgagccagatcgcaggcaccgcccgctccatgggtatcacggtcgtagactgatggatcatctgccgaggtaattagactgcgcagtcttacctcacaaatgtgggaggattattccgcatcaccacttcaaggaggatataacattgtttagaggtaaaaaatatcaggatagcgcgaagcagatcgaccgcgctgtgcaatatgaagtagcagacgccctggcactggtttgcaagactgctactgcaaaattcgatgagaccgtagagatccacgtcaagctgggcgttgactcccgtcatgctgaccagcaggtccgcggcgctatcgtcctgcccaacggcactggcaagacccgcaaggtcctcgtctttgccaaggacgaaaaggcagatgcggcaaaggaagctggcgctgactatgtcggcggcatggacatggtcgagaagatcaccaaggaaaactggttcgacttcgacgtcgtcgtcgcttctccggacatgatgggtctggtcggccgtctcggtaaggttctgggccccaagggcttgatgccctccccgaaggctggcacggtcacgccgaacgttgcgcaggccgtcaaggaagtcaaggccggtaagatcgaataccgtctggacaagaccaatatcatccattgccccatcggcaaggtttccttcggccccgaaaagctgcaggagaacatggatgcactggtcggcgccatcgtgaaggcgaaacccgccgctgccaagggccagtatatcaagtcctgcgtcctggcgtccactatgggccctggcgtcaaggtcaacaccagcaagtattgataaaaagtgcagatattgcttgacttgtcgggcaatatctgctatactaaacaagttgccagagacagcaggtgctgcgtcgtaaggagagcttctccgcctgccgaggctgaaaatcgtttgattccggcgtgccggtttgaaagcaagttttctgtcctcatgtcttttggcatgaggacattatttttatcggaggtgacaccatgcccaacgcaaaggtactggaaagcaaaaaagcaattgtcgatgcattggctgaaaaaatgcaggccgcaagcgcagctgtatttgtcgactataagggcatcactgtcgcacaggatacggagctccgcaataagttccgtgaggccggtgtggaatacaccgttgtgaagaacacgctgacgcgcttcgccgccaataaggtcggctacactgcgttcgacgatgtcctcaacggcacgacttccatggccagcaccacgggcgaccccattgccccggcgcgtatcgtatgcgaatttgcaaagaagaacaagctcaagaatctgaaaatcaagggcggctttgttgaaggctctgtgatgagcgttgaacagctcaacggctttggcgaactgccctcgaaggatgcgctggttgcccaggttctcggcaccatgctcgcaccgatctccagcttggcatttgtcctggaccagatccgggaacagaaggccggcggcgctgctcctgcagaagaagctcctgcagaagaggcttaattcacgtatttccaaggaacaattaacaggaggattttaccatgtctgaaaaaatcgctgctttgatcgaagaagttaagggcctgacagttgtcgaactggctgagctggttcatgcgctggaagacaccttcggcgtttccgccgctgccgctgctgtcgctgctcccgctgctgctggcgaagctgctgaagagaagaccgagtttgacgtcgtcctgaaggacatcggcgccaacaagatcgctgtcatcaaggtcgtccgcgctctgaccggcctgggcctgaaggaagccaaggagatcgtcgacaacgtcccgaagaccctgaaggaagctgtctccaaggacgacgccgagaagatgatcaacgacctgaaggaagctggcgcaactgcagaaatgaagtaattgccggtctatccaaagatcgcacctgccgctgccgcggcggggacccaaaatctatatggatgatgcaaagggcgctgatttttatcagcgtcctttttatacttgtctatctataattgtcaaaagccttgcagcatctgcgacagccgaaagtaacgtgaatcaattgacacagagcggggaatatgctaagataagaaaaacaaggtttggagtgggtcagatggaacaccgtgtggcaatgatcagcattatcgcccaggagacggagggcgtggagcagctcaatgcgctgctgcatgaatacgcgccgtatattattggccggatggggatcccgtaccggcagcgcggcatccatattatcagcgttgccatggacgcgccccaggacgcgatcaacaccctggcgggcaagcttggcaagatcgaagggatcagcgccaagacagcatattccaatctgacatttcccgcattacagaaataaaataagcatcctgacgccgaaaatgcgatttgaggcgaaaggatacgcgcagcgactgtattgttttgcccaagtgcgccgtatcctttcggatgcggcgcttttgctatgcttatgacgtggcgagaaaggttgcaggtgcaatatgaaaaaatcaaaatcgcttgtgccgggcaggctcagcgggcaggcacggcttgttttatggctgctgccgccgctgacgctgttggtttgcctgtgcctgggccggatcccggcgccgcccggcgcgctgctgcgctgcatcggggcaaaactcggcctttgcgcagcgcccggcggccaatatgtccagatcttttggtccatgcgcctgccgcggctgctgctggcgatcctggtcggcgcgggcttgtctgtcgcgggctgcgtgttccagagcctgtttgctaatcctttggcgacgccggacacgctgggcgtggcctccggcgccagctgcggcgcggccctggccctgctgctgggctttggcctgacgggcctgcagctgacggcgacggtgttcggcatcggcgccgtcggcctgacctggctggcagccagcgggaaaagcggcgggcgcagccgcattgtcctggcgggcattatgatcggttcgctgttttcggcgctaatctcgcttttaaaatacgtcgctgacccggagtctcagctcccggccattacctattggcttatgggcagctttgattccgcgtcctatgggacgttggcgctgggggcgatccctattgtgctggggagtgggatcctgctggcgctgcgctggcggctgaacctgctgccgctttccgacgaagaggccaggacctccggcgtgcgcatcggcgcactgcgagcggtgtgcatcctctgcgccacggccatcacggcggcttgtgtctctatgagcggccaggtgggctgggtcggcctgttggcgccccacgtgtgccggatgaaattcggcaataatcatctgtcgctgctgccggcgtgcatcagcctgggggcagtttttatgatgctggtcgatacggcggcgcggtcgctgtcggctggggtcattccgctctctgttttgacggcgattttcggcgcaccatttttcattgttctgatgcgccggtccggggggtggcagctatgaaactagaagtccggggcggctgctttgcctatccgaaatgcgaccgccagattttaaaagagatctccttctgcgccgcgtccggccagaccgtggcgatcctcgggcccaacggcgcggggaaaacgacgctgctgcgctgcatcatgggtctgctccgctggcagtccggcatgacatatctggatggcgctgcgctgcgggagttgcctccggcacagctgtggcgtacgatctcctacgtgccccagatgcgggcggcgtcggcggcctataccgtcgaagagactgtcctgctggggcgcagcgcccgcattgggccgtttgccttgccggggcaggcggatgtgcaggcggccgaggcggcaatggaccgactgggcctgctgccgctcaggcggcaaaaatgcagcgccctttccggcgggcagatgcagctggtgctgctggcccgggcgctggtcaatgacccgcaggtcctcattttggatgagccggagtcaaatttggattttcgcaaccagcttttgatgctggagaccattgctgatctggcgcggcaaggcgtcctgtgcctattcaatacccactatccggcccacgcgctgcgctgggcggatcatgcgctgctgctggagcagacggggtgctatcaatatgggcccgcagcggaggtcattacccaggagaagatcgaggcggcctttggtgtccagacgctgctcggagagtgggagacgccggaggcggtcttccgggatatttttccggtccgcctggcggagcctgcaaagccggcggcggatgctgcgacacgggccatcgccgtgctggcgctggtgttcccggaccgagaatgcgccggggcgatcaatgcggttctgcaccgctatcgccacgccgtcacagggcgcatgggaatgccccggcaggacctgggcctgcatctcatcagcgtcagcctggacgcgacccggggcgagatccaagcattgacggatcagcttggccgtatccccggcgtcagcgtgaaggcggcttatgcaaaggagtgggagatatgaagtgcgaaaagctgctgcaggcgctgcagcgggcgcaccgcctggccccggaggaatggacgtttttgctggcgcattggcaagactgcaccgatgcggcgatggcgcttgcacggcaggttgccgtcgctcggttcggaacgaagatctttttccggggcatcattgaatttacaagctattgccgcaacgactgcctctattgcggcctgcgccggtccaaccaggcggcggaccgctatcgcctgacgcaggaggagatattggcctgctgcgaggcaggctacgcgctgggtttccggaccttcgtcctgcagggcggcgaggatggatactggacggatgaccggttggtcgccctggtcgcggccatccggcggcactttccggactgtgccattacgctctccatcggagaacggagccgggcgtcctaccagcggctgttcgacgccggcgcggaccggtatctgctgcgccacgagacggcgtgcccggcccattaccgcaggatccatccgccggagatgcgctgggaaaaccggctgcgctgtctgcgtgaccttctggaaatcggctaccagaccggctgcggcatgatggtcggtacgccggggcagacggtgcagaccctggtgcaggatatgcagctgctgcagcagctgcggccccagatggtgggtatcggcccgtttctgccccatcgggacacgccgctgcgggatgcaccccccggcgacccgcgcctgacctgctatttgctggccttgacacggctgctcctgccagacgcattgcttccggcgacgacggccttgggtacggcagaggccgacggcagaaagcagggcgtcctggctgggtgcaatgtcgtgatgccgaatctatcgccgcaggcggtgcggaaaaaatatatgctctatgacaacaaagcggggacggacctctccgctgccgcgggtgttcagctgctgcgggcgcagatggcggagatcggctataccgtcgtcacaggacgcggcgactttgcgccggggcaggaggaaatgaaatgatcaaaattgcagtatacggaaagggtggcatcggaaaatccaccacggtctccaatctgtcggtcgcgctggccgagacggggctgcgagtcatgcagatcggctgcgaccctaaggcggactcaaccctgagcctgcgccagggccagccgatggagacggtactggacctgatccgcaccaagcccggcggcccgcagctggaggagatggtccgcatcggctacggcggcgtcgcctgcgtcgaagcgggcggcccgacgcccgggatgggctgcgccgggcggggaatcattgccgcgctggaaaagctggcgcagcaaagggcttatgaggtctataagccggacgtggtattctacgatgtcctgggcgacgtcgtctgcgggggctttgccatgcccatgcgcagcggctatgccgaccgggtgtttatcctgacgtccggggagaatatggcgctgcatgcggcggccaatatcgccatggccgtcgaacagttccgcggccgggggtatgcgacgttgggcgggctgatcctcaactgccgccaggtgccccgggagctggaaaaggtgcaggagctggcccaggatatcggcgcggacctcacgggcatcctgccccggagccagaccgtgcaggacgccgaggcgctggggaagaccgttttggaggccttcccggatagcgagatggcggcatgctaccgccgccttgcccagacggtcctgcagcgctgcgaggtggcaccatgatgcggcaagtggggggcggcgcgccgcctgtgggaatcgcccttggcaaggcagcctttccagcaccgtttcctggcggactggagtacagtgccccggcgcggggcgtctggaatatcgtccatgccgggatgctggtgccccaggcacatgagatctatgtctgcgcccagggctgcctgcggggcgtcgtcctgacagcggcggagatgggcgcgtcagcgcggttttccacggtgaccattgaagaacacgatctttatgacggtgacatggagtcgctgttgatcgagggcgtgacggatattctgcagcggctgccaatgctgccgccagccgtgctggtctacagcagctgcgtgcatcactttatggcgacggacctggccctatgctaccgggagctccgggcacgctttcctggcgtcgcgtttaccgattgctacatgaatccgattatgcgcaaaagcggcctgacgccggaccagctgatgcggcgtcagctctacagcctgcttgcgccgctggagcaggatggcggggtgaatttcgtcggcagcttttatgccttaaaccgcgacagcgacctggtgcagctcattgccgcgtccgggcggccactgcgggagatcactgcctgcaagacctatgaagactatttgcaaatggcccgcggcagcctgaatttgatcacccacccggcggcggagccggtggggccgtatttgcaggagaagctgggccagcggtatttatatctcccggtggcctaccgggcggcggagatccgtcagcagcaggtgcagcttgcgcagacgctggagcttccagtgaatacgccgcagttggatgcggcccaggcgcaggcgatgcaggcactggacgaagcccgggcgtgtatcggcggcgcgccgatcgccctggatcacacagcgacgatgcggcctctggcgctggtccggctgctggtggaggcaggcttctgcgtggaacggctctattgtgatagcttcgcgccattggaggcagcggatttttcctggctccagtgccacgcaccggagatcaccctgctgccgacgaccgcgccccgaatgcgggtggagcccaggaaaagccgggaaaagaccctggctatcggccagaaggccgcgtactttaccggcagtgcgtattttgtgaacctggtggagggcgggggcctgtccggctttgctgggatcgcccacttggcaggaaggatgcgggaggccttcctgcatccaaaggatacgcaacgcttgatcgaacaaaaaggctttggctgcgggtgctgcttatgaaaaaaatacaagagaagatccaaaaacagacgcagaaaatcctatcgacctacaccgccgatgtttccggcgtctgctcggccctgtttgagctgggcgggatgaccgttatgcacgacgcctccggctgcaactcgacgtacaacacccacgatgagccccgctggtatgacagcgacagcctggtcttcctctcgggcctgacagagatggaggcgatcctgggcgacgaccagagactgagcgcggatatcgttgcggcagcgcgggagctgcagccgcggtttatcgccatcgccggttcccccatcccggccctgactggctgcgaccttccggccattgcggccagcatcgaagccgagacgggcatctgcaccttcggctttgcgacgacggggatgcagtcctacgtgaccggggccgggatggcgctggcggcggtcgcccggcggctgacgaagccggtgccccgggcaaagacgccgacggtcaatctcctgggggcgacgcccttggacttccccctgcacggggccattccagatatgatcgcgtggctgcaggaggcgggctaccgggtgcagagcacctgggccatgggatcaacattggagaagctgtgcggcgctggagcggcgtgggtgaacctggtcatttccagcaccggcctgcctgccgcgcaggcgctgcaggagaaattcggcacgccctatgtcgtcggtaccccggcagggcaggcgtttgggcgtgtcctgctggagcacctggcctgcagtgcccacacgggacgcagcagcgtggcctttgccgactgcgagcccgatggcgttggcattattctaggcgaagccgtcacggcccgttccctggcggcggccatcggcctggagcgaggcgcggcgccgcaggtcctctgcccgctggaggcgccgcctggcctgctgtcgggtggcgacgcggcaatgcgggcagagtgtgacctggagcagcgcctgcgcactgccgcctgggtcgcggcggaccccttataccggcccatcgttccggcgcagacgccgttttattccctgccccatcctgctttttccggcaggctctggcgggggcagatggtcaatcttgtgaagcatttataaagcaataaaaaaggaggattcgaaatgaaaaaaggaatcgcactgcttttggccctgtgcctgctgttgacgctggccgcttgcggtggcacagccggttcggacgacccggcgggctccgcccagacagagaaccagccccagacgtcgggcccggcgaccatcaccgtcgtcgaccatgccgatcataccgtgacactgcctgccgatgtccagcgtatcgcggtctgtgatatttacccgctgccgtcggtcctgacgatcttctttgattctgcggaaaagattgtcggtatggcgccacccagcatgagtgcggcgaaaaacagcctgctctctgagctctacccggagatattgaatgccgagacgggctttattgacggcagccagatcaatatggaggagctgctgaagctggagccagacgtcgtattctacagcgcgtcgaacccggagcagggccgtcagctgacggaaaacggcttcaacgccgtggctatctccgtcaacaaatggggctacaatgccattgagaccctcaacgagtggatcaagctcctctctcagatcttcccggagaacgacaaggctgagacggtcgcccagtattcggcggatatttacgacctggttcagtcccgggtggcggagctgccggaggcggagcggcggaaggtcttcttcctgttccagtacaatgagacccagatactcacctccggcggcagcttcttcggccagtggtgggccgatgccacgggctgcgtgaatgtcgcgtctgagctggcgcaggacaattccgtccctgtgacgctggagcaggtctacgcctgggacccagatctcattttcgtgacgaattttacgacggcccagccccaggacctctatgacaatactgtcggcagctacgattggtccggcgtcaacgcggtgcagaaccggcaggctttcaagatgccgctggggatgtatcgcagctataccccgggcgtggatacgccgattacgctgctctggctggcaaaatctgcctatccggcgctgttcgaagatattgatatcacgcagcagactgtggattactacaagacggtcttcggcgttacgctgacagaggcacaggcggaggcgatctttacgccagtggccgacgccgcggtcggcttctaagccaaaacacaagttaggagaagggagcatgccgtatgagtctgaacgatacccccgccgccgctgcacatcggctttttcggccgccgcaacgcgggaaaatccagcttggtcaacgccattactgaccaggatctggctgtcgtctctgatgtgcgtggcacgacgacggacccggtctccaagtccatggagctgctgcccctaggccctgtccagattatcgacacgccgggctttgacgacgtgggcgcgctgggcgccctgcggg

SEQ ID NO: 2935 - DNA, 20841 bp, Unknown
  16S sequences of unknown bacteria
gtatgaaatagacgtcacgccatttgccacgccgtttcgtacctatcgcgatttttttacccgccgtctgccctatgtacccatgccaaagcagccagaggtgctgggggcttgggcggaaggctatgccagcgcctggcagaatatagacccacgctgcttgatacaggtaaagggcatggaatacgacctggcggatcttctttgcgatggggccttggcagcaaagtatgcgggcggcacgatgatccgtatccggctggcgccgcagcattatcatcattttcattggtttgatggcggcgttgtgcagcaagtacgggatataaaggggcagtattattccgtgcatccgctggcgctgggacgcattgcggcgctgtattgccaaaacaagcgccgggccgtacaggtgaaaaccgatcagtttggctctgtgctgttggtagaggtgggcgctacgatgattgggagcattctcaatccgttttcggagggctctgcggtaaagcggggcgaggacggcggctattttgcaccgggaggctctatgatcttggggctgtttgaaaaggatgccatccaggcggatgaggatcttttatgccagacacaggcgggcagggaatgcatcgtccacttgggagagcgcctagcggtaaaggggtaattatgagaaaaaccatccaaaaagtgtttcccgttatggaacacatgaatatacccaataccatcaccattacagggctgattttgggcatgctgaatatcttcttcatcgtgcaggagcattatcatttatattatatctgtgcgctgctcgcaggaattatggatacgctggatgggtttgccgccaagcgattaaaccagtattccgagcttggagagcagctggattccctttgcgacggcatcaactttgtgctggtgcctgcggtgtttgccgtcacgcgtatggatatgcggctgggcacgatgatctgtgcaggcatctactgcgcatgcggcatcttacgccttggctacttcaatatcttgctggaggagaaaacggaggaaaaggtgtttgttggcgtgccgacgaccattgccgcggtgtttgtgcaggccctggtctgggcttgtacggtgctgtgcccgcgtctgcggctggctgtgccgacgatcctgctggtgtttggccttttgatgatcagccgcctgcgctttcgggcctccaatttggggcgcatattctttgcagtggtgggcgcggccgtactggccgcagcgcttatcatcgggaaatgatgggacgatagaagcagagggcgctttggcatccatagccgggcgttcttttttgcgctttttgccgctttggttgacagcaggctgtctttcgcggtatcctgggcttgattttagcatgaaggagagccccaagatgccttgcgtgggaggccaaaacgggctcgttttatcaaagacgtggggagaggataaggatgcggcaggatagggaagcgatacaagccattcgctgctttttgctggatatggacggcacgatttacttgggagatcagctcatagagggcacgcatgcatttttgcaggcagccaagcaaagcggccgcaaggtgctgtttttgaccaacaattcctccaaaaacggggagacataccttcgcaagctgtcccaaatgggcattgatgcagggccggaggatgttttaaccagcggacaggcggcggcgcagaccattatgcagcgctatcccggcaaaaaggtatgggtgatgggcaacgatttattgaaagaagagctttgcagcctgggcctgccggtggtggaaaaggagccggatatcgtcctgacggcctttgatacccagctgacctaccaaaagctgtgggattgctgcgattatgtccgccaagggctgccgtatatcgctacgcatccggacttcaactgcccgacggaaacggggtttatgccggatctgggcgcgatgacggaattgatctacgccagtacagggcggcggccagatcgtgtgatcggcaagccggaacgcgatatttttgcctgcgccagcgcacgcaccggcgtgccgttatcgcagtgcgccatgtgtggagaccggctgtataccgatattgcggcagggcaaaagcaaggccttttcagtatcctggtgctgacgggtgaaaccaaacaggaggatttggctgcgtccgatataaaaccggatttggttttggatcgcttggcagacctggtcccaagcttatcatgaaaaatggcggctgcttgccgcattggatggaataggggcaggcgcatcggctgcccttttctttatttaagtgcacaaaaggaggggttcggtatcaaagcaaagcatcaggcatgggactataagatcaccagcgggtgtgccggcgtggtgttgtccacaggtatgtttgcgttgttcggcgggcttgccttttggctgtatcaaagcgaaaacgatgcattcatgttcggcgcaatgctggcggcgttgatgttcatcgttttgatgtttgccatattcagagcgctttgctttcaagtatgtatcggcaaggagacgtttttttatcaaaccaaacccggcaatggaaaatgctatcgatatcccgacatcaagcaggcctggcaaagcagcggcaaaaacttgaacggaacctccgcccaatactgtaatcttagaacgcgggaaggagagatcctcaagatcccgttttttcctgccgaccaggaggccatcgacgcgctgatacagcatgtgcagggcagtggcgcgcatcatgatggcgaagcagaggacaagagggagtacaccatacacggcagacgaaatgggaaaacggcgattttctttgcgctttttctgcttgtcatgtgtgtagcgatcaatgcttccctatcggtgtatggcatgggttatgcttggcgatcgccgattgtgcttttgagcgtaacggtggtgctgctcatccttcgatatgtgtctttcagggtaaagatcggcgttttagaggttatggttcaaaccaatccgtttaaccggaaaacctatacatataaacagatcgatcgctatgaggagatcgagaaagtgtatcgccatagagggcggggaagccgttctccacagacgctttactactatttttttgcgtttacagataagcaggggaaaacgacgaaatttcagtttgaaaagccactgtacgaatatgagatccatgtgctcaaagcacgaatagacaaggccaatggcatggatgcgggcggcataaggagagcaaggatatacgggcagagccgaatgtagatggctttgtgcatcgcagggccgtctgtgtacgatgaaaaaagggtgccgaaattctcggcacccttttttcttgctggccgccggctcaatagccggtcgttgtgctggtagcttcggatttatatttggtcaggtcgatacggtctgcatagatctcaacatccatctcggcctgccaggcttccagctgctgctgatatgcttcctgctttttgctggaaagcagctgctcttcggtataagccttgacctcttcaaagggaacggcgccttcctgtatatcgcccgcatagcagaggatatgatacccgtaatccgtggcaaccagaccagaaatatcccccggcttttgcagggcaaaagcagcctgggtaaaggcctccacataggaggtatcctcgcccagattgccgacggcatacggctctgtggtggtatcatcggtgttttccttcatcacttcgtcaaaattggagccatcctttttcaacgaatccaatacgccctgcgccttttcctggatattggccagcgcagcctttttcgcttcctctgcgccttgggtatcgccctggttttgcagggtggcgatggtttcggaatcctcttcgttgaaggcaattagaatttgcttgatctcgcggaaccctgcggggcggtagtagatcgtagcgccattcatcatatcctgctcaaagctgttgggagattcggcataggtctccttcatttccgccacgcgggtatcgtattcgtcctgtacctcttcttcggtgacggtgatgttttccgtgacgcgctcataaagcttggtagcttgcttgctggccgtccaatcctcaatcaagctttcgcgcgatacgtcgttgtccttaaaataattgtctacattgtcttgggccgtctgctgccaggactcctccgtaccatccggatcagcctgcttggcgatttcataatactggtcttttagcgattgaatggactgatccacattactttcgatctcggccttttcatcctcgctgagcacatccaggccgtattccttaaccttttgcgccacgatctcgttttgtacagcggtttcgacagccagatccacaacctggtcggcaaattcttggtaggtagagctggtggggtcgcttacgccataatattggaagtaggcggtgatcagatcgcgcacgctgctttcatacacacgggtaccgttgacagttgcaatgaccatgcccttgctgcagccggtcagcagcagcccggtacatagaagcagagagagaaggagtttctttttcatttgagcagtcctttcctaagacataaaaatacaaattaatatgtattatatcctatctttatggcagctgggtgtcatcgccggttcttttcccgctgtccgcgatttgcacggtggaaacggcaatgggcaccccaatgctgtccaacgcggcctggatggtttcgtgaagatcatagaatacatcccaataggcactacgctctacccaggccatcacggagatctgtatgccgcgatcggtaaagctgtctgggccgatgcaaggcggcggattcttgagaacgcgcggctcgttttcaatatagtgtgccagcgtttgccgcaccttggccaaatcggcgctgtacggaatggtaacggggatggagatgcgccgcgtttggcaggcggaaaagtttgtgaccttgccgccaacgataaggctgttgggcagcatgatgtttttattatccggcgttacgagcacggtaaacatcatatcgatacgctctaccgtgccgccgccctcgtccgtctcgatataatcgcccaccttaaacgggcgggtgaagagaaggatcatgccagatgcgaaattggataaattgtccttgagtgccagcccaatgcccacagcggcgccgccgatgagggtgatgatgctggcggtaggaatgccgagcagggaagcggccgttaaaatggcaatgatgagcacgaaaattttgacacaggccgccaaaaaagcgtgcacggtagggtctaccttgctgcgctttagcgcgcgcaacacaaaccggctcagccagttggcaatggccaggccgacaaaaaaggcgaccagcgcccataggatatgcggcagggcatccaacaacccggtcaatagcttttcgaaaaatgtttgcatggggccctccttttgcatgggattcaaagaatacctcattatagcataggcgagcggggatgggaaatttgcccatggtatggtatactaaaagacaccttgagttcgttttgctccgctgtttggcgggctccatccggaagggaggatgtttttatgcggaccgatttgcatgtacatacccatttttcctttgattcccagaccgacatccaacgtgcctgccgccaggctgtgcaggccggccttacgcacattggttttaacgatcattttgatttagacccgagcagcaaagaaaagggctacgatcaatcggccttttttgatgaaatcaaagcggcacaggacgcttttgccggccggctgcgcattttggccggcgtggagttttccgagccgcatctgtatcccaaagaatatgagcagacgctttctcagccttatgattatgtcatcggtgccgttcattatatagacgggatggatccgtactttaccgaaaagatgacctatccgctgcccaagatgtatgaacgctactgggaagagatggagcgcatggtggagaccggtggttttcaaatcatagcacatctggattatcccaagcgctattacaacgcttgcctgtttgaggaccagaccgtgcttcgtattttgcagaaggcctgcgataaggggatggcgctggaaatcaatacctcgccgtttcgcaaggaagaaacagagccgatgccgggcagccgtttgctggaattgtacgccaaggcgggcggctaccatatcacgctgggctcggacgcccatgagccagagcaggtcggcacgggcatagagcgcggcttggcgtttggcagctcctatggctttcaaccctgttggtttgaaaataaaaagctgaaaacggggggttggggataagcatgcgtaccgatctgcacatacatacccgtttttccgccgattctgaggcggatatgcaggcctgctgtgaagcggcggtagagcggggattatcgcatatttgctttactgaccatttggagcataatccgcatgacggcggtacggggtattatcggccagaggcctattttaacgaggtgcggcggctgcagcaggcatacaaggataagatcacggtgttgacgggtgtggagtttgccgagccgcacctatatcgggcggcgcttgcccagaccctggcgcaggactatgatctggtgctgggttctgtgcactggattgacgacatggccccgtatgagccggaacgcatgacctattctaccgaaaaaatgtttcaacgctactgggaagagatggagcgggccgtagagaccggcgggtttcaggtgctttcgcatatggatttcccaaagcgctattgtaagcagtgcttttatgaagagaataccattctacgcatattgaaaaaggcggtacagcggggcattgtgatggagataaacgcttctacattccgacagggcttggatgagccaatgccgagtgaagcgtttgtggcgctgtataaggaggctggcggagcatttgtgtccatcggttcggattcccattatgaggcgcatgtcggtgcggatgtggaccgtgcggcggccttagcggaccgatacggccttcgcccctgctggttttcacagaaaaaggctatcccgggcgcatggggctgagccatattgggtttatagagaaggagagaaagagatgtctatgttatttaccccctatgaggtgggcaatctgcatctggaaaatcgcattgtgctgccgccgatggcaacctttgggcacaagccgcaggcgggcgccgggtttgtagcggacagcaccgtagcgcattatagcgaggctgccaagagccggcccggcctgatgattgtggagtccaccgccgtgcagccgaaaaacccgaggggaacagaacagctgggaatttggtgcgaggcacagatcgaaggacaccggcgcatcgcagaggccattcatgcggaaaatgtgccgtgcctgctgcagatccagacttccggcgtaacggggaaaaacgagccgaatcccatgacggtcagcgcgtatgacagcgatatgacgggccggtatatcaagggccgcgctatgacggtggaggagatccatgctgtgcaggcacggtttgtggaggcggccgtgcgcgcgcagcaggcgggctacgatggggtggagctgcatgcagcgcatggatatttcctttgccagacgctgtcgcccctggtcaacaagcggacggactgctatggcggaagcctggcaaacagggcacgcattatcacggagattgccgaggaaatccgccgccgctgcggcaaagattttttcctggccatccgcatgggcgtaaacgacccggacccggaagcggctgccgaaaccatcggcgtgctgaaagaaagcgggatacagctgtttgacctttcccgcggctttttggaatttgataggcaggcccatccgttggaggttccggccgatttccctttcagcaggcttgtctatgccgccaaactggttaaggaaaaaacacaggcacccatcatttttgtgggcggcttgtttaccccaaaaatggcagaggacgctttgcaggccggcgcaggcgacctggcggccattgggcgcaatttcctcatagagccggcctggccggaaaaggcaaggcgcggcgaaccgatccatacctgttatgattgcaaaacatgtcaatggtttacagacgcatctcgctgcccggctgtacgcaaaaaaaatcttgcagacgcatgagaatacgcctgtcgaaaaacgatccgtttgggtcgtttttttactataacggaaaaacaaacgcggacaaggcaccaaaagaggagaaagcgcatagaatacactgacctgaaaagaggggaaagtggggattgggatgaaccgaaacagattttgctggcccagatgcctgctgctgggcgcggggctgattgtcataggcgttgtgaccatcgccgttttcgtaccggcctgggtttgggcggttttgtttggcattgggttggtctgctacgggatttcctgcctactgcgcttatagggagggaggagtttttatgcatttacactttatttttgtacctaggtggatctgcaacctattccggcgcagaaaataacggtacataaaaagctgcctgcaaggcggcttttttacagaaaggcctgcatgcagcattattgtaaacattgacattacaacctatgtttcctataatgaaaggaaaaaagggggaagcgcacagcatgcagatttcaagccggtttaccattgcggtgcatatttttgcctgcatcgatacgtttgaaacgcaatataagattaccagcgaatttttggcgtccagcattcaagtcaatccggtggtgatccgtaagatactttcgcagcttaaggccaatgggctgattacggtacagcgcggcagcgggggcgcgtctatggcaaagccgttggagaaaatcacttttttggatatttatagagccgtagaatgtatagggcatggcgagctttttcattttcatgaaaatccaaatgcggaatgcccggtggggcgcaatatccacaatgtattggatggaaggctgaaacaaattcaggatgcgttggaaaacgagctggcgcgcatttctttggctgatgtgatggaggatacaagatactatattgcaaaggaaaagaaaaaagggttggatacgctgcgatgagcagcgttttttttataaaaatttgttgtaactatttacattacaataaacctactatatactcaggatgtaataaataaagttacaacaaaaaacagcgatataggaggaaatggagaatgaaaatcgcagttgtatgtgccaatggaaaagcagggaaattgattgtcaaggaagcagtggaaaggggcctggatgtaacggccatcgcgcgcggcagcaaccaaagcgctgcggcaaagtttatacagaaggacttgttcgatttgaccaaagaggatctaacgcagtttgatgtggtcatcgacgcctttggcgcatggacggaggaaacgcttccgatgcatagcacctctttacaggcgctttgcgatgcattaagcggcaccgatacgcgtcttttggtggtaggcggagcagggagcctgtttgtaaatgcggaacacacgcaatgtgtggcggacggcccggattttccggatgcattcaagccgctggccgccgcgatggccaaagcgctaggtgagctgcgcaagcgagacgacgtgcgatggacctacctgagccccgcagcggattttcaggcagagggcgcccgtgccggggcatatattttgggcggcgaggagctgacattaaaccaaaaaggagaaagcgttatcagctatgacgactatgccattgccatggtggacgaagcggaaaaaggcggacatatccggcaacgtatcagtgtggtggcaaagtaaaaacagggaaaatcaaaagggccaaaaacagggcccttttcctttgcagagggaaatgaaaaagcacagcgtacgctgtgctttttatgtttgcaattagacacgctgcaccttgccagaacgcaagcaacgagtgcaaacgttgatcgtgcgcggagaaccatcgatcataacacgcgcgcgctggaggttgggcgcccaggaacggcgggtcttacgatgagagtggctgacttgattgccggcatggctgctcttattacagatagcacaaaccctcgccatggcttaacacctccctttacattaaacaacacgaataatattatcattctcccaaaaaatttgcaagcaaaatctttgtttataggcaaagtttgtgtgcctttgggcaagtaatgaggaaataggcgttggtttacaagtttttgaatttgcggtacaatactcaaaagagaataaaacagccgtatcattcgcatgatagggcgaggagggataccatggcagcagtagtgaaaaaagactggggcaggatcgaagtaaccgatggcgtcatcgccaagctggccggattgactgcaacagaatgcatgggtgtgctgggcttggcctcttcggacgggtggacggatcttttgaaaaaggattccgtagaccgcggggttaggatcaattccaatgaagatacaatcaaaatagaaatcaacatcatcgtgaaatatggcgtttccattgcagcggtggcgcagaacgtgattgactctaccaagtataatgtagaatcgatgacgggcatgaatgtagagtgcgtggatgtctgcgtgcgctccattcgtttataattttgcaaatcggttcggaggtttactaaattggcgaatgtaaccatcagcggacaagagctgcacgatatgatctgtgtggcggccgcgttcttagaaaaaaataaaaaggccattgatgccttaaatgtattccctgtgccagatggggataccggcatcaatatgtccttgaccctgcaaacggcagccagggaggtaagggacggcaaaaaggagacggtaggccaggtcggttcggcactggcgctgggttcgctaaagggtgcgcgcggcaacagcggcgtaatcctaagccagatcttccgcggctttggcaaggccctgcaggataagcagacaatggatgcggcgcttttggccgagtgtatggagatgggcgtggaatccgcctataaagcggtgatgaagcccaaagaaggcaccattttgacggtggcgcgcatgatgggcgaggcggcaacgcaggctgtaaagcagaaaaaagacgtgatcgagaccatcgacgcgatgatagagcaaggggaaaagacccttgcgcaaacgccggatatgctgcccgttttgaaggaagcgggggttgtggactccggcggcatgggcttgcttgtgatctttaagggctttaagatgtgcctgaatggcgagcaggtaccggaagaggaaatcaccgacctgggcggcatggtaacgcctacccaggaagaggataacagcgacattgagtttggctactgtaccgaatttttcataaaggacccggcgggctcgctttcggaggagaatgccgagcagctgagaaaggtgctggggcagattggcgactgcgtattggtcgtaggcggcggcccgcttttgaaggtgcatgtacataccaatgcgccgggccaggcgctgcaatatggtttgcgttatggatcgctttccagcatcaagatcgataacatgcgtgaaatgcaccgcgagcttgaaaacggggcggatgctgaggtaaacggcgtaaataaggcaattgcgcaagaagagaaagcggagccggcgaaggagcaaaaggagatcggcgtggtggctgtggtatctggagacggcctgtgcgaggtattttccgaattgggcgcagacgagatcatccagggcgggcagagcatgaatccctcgattgaggacattggcgctgctgtgaagaataccaatgccaagcatgtgtttgtattgcccaacaataaaaacatcatcctggcggcagatcaggcggcggagctgctcaaggacgaggtggatgtccgcgtgatgccgaccaaatccatcccccagggcatgagcgcgctcatcgctatgaacccggagaacaacgtgcaggataatgccatggatatgctggaggcaatggaagccaccaacagctgcgccattacctatgcagtgcgtgatacgcagctaaatggagaagaaatcaaaaagggcgatatcctaggcatggtcaacggagagctgtccgtcagcggcaaaaaagtggataaggtttgcaaaaaaaccattgcaaagaccttagaactgggcggagagagcatcacgctgttttatggtgaggatgtcacgcaggagcaagcggatgcgttggcagaggaattggaggccgagtatccggactgcgatgtgcagatgtacccgggcggccagtccctttactattacatcgtgggcgtggaatgatctgcgccatatcgcatagagcatgttaagggcgccaaacggcgccttttttctacccggaaaggagcttgacgcatggaaaacctgctattgaagatcccgggcgtggggcaggcacgcctggcacagctgcaaaagctgggcgtagagacgccttgggacctcatgcgctattttccaagaagctatcatgatctcacacaacccagcaccacctcgcagatgacggtgggccggccatggtttgggaaactgagcatcgtaagccctgccaagacggtatttcccagaaaagggttttccatgacacgctgccaggcagaggatgaagagggaaaggtgacgctggtatggtataaccagccgtatatccgacaacagctcaaagaggaggaaacgttgtttttttatggccggccggtattccgcatgggggagatccggctggaaaacccgatgatagagcgggccagtgatgaggatgcgctgcgcatgctgccggtgtatcgactgaccaaagggctgagccagggcaacctgcgcgcctgtatcaagcagtgctttgcgctgtatgcgggctatctgtccgagccgctgcccagagggcttcgcgaggcttttgggctatacgcattccgcgatgcgttggagctatcccattttccgcccagcgagacggtcaaggatcaggccgtgcgcactgtttgctttaccgacctactgttgttgcgcgcctatttgggagatcggcgaacccagcgcggcactgcgcagccgctgtgcattacgcaggcgcagggcgagcgctttatgcaacaattgggctttgcacccaccggcgcacagcagcgtgtgatgcagcaaatacaggaggacctggaaaagacagtgcccatgagccgcctggtgcagggcgatgtgggctgcggcaaaacggtggtagcgttttatgccatgtggatcgcagtgcaaaatggccggcaggccgcgctgatggcgccgacagatatattggcgggccagcattacgagcaggccaaggctttgtttgagcctttgggcgtttctgttggcctattgaaaagtgggatgaaagcggctgaacggaggcaggtgctggaagcgttggaggatggtacgctggatcttgtggtgggcacgcatgcgctgatttcagaaagcgtgaaatacaaaaacctgggccttgtcatcgcggatgagcagcatcgctttggcgtaaagcagcgcgcggctttgatgcagaagggaacagagaaccatgcgctgtttatgagcgccacgccgataccgcgcacgctttccatgattttatacggggatttggatgtttctgtcatcgatgaaatgccgccggggcgaaagccggtggagacgcgtattgtgcttgccaacaaacgagacgatatgtatgcgttcttggcagaccgtgccaggcagggcgggcaggcgtatgtggtgtgtccgcgcatcgagggagaagaggaggacgaccaggccgccgaacaaatctataccatgatgaaaaaacgatttgcagatgtatccattggacttttgcatggcaaaatgaagcaggcggaaaagcaggagatcatggagcagtttgcgcaaaaccatatccagatcctggtttccaccacagtggtagaggtaggcgtcaatgtgccgaacgccacggtgatggtcatcgaacgggcggataggttcggcctggcgcagctgcatcagctgcgaggccgggtagggcgcggcagcgcgcagtcctggtgctttttggcagcggagcgggaggatcgccagcggcttttgactatgacgcagacgcaggatggctttgaggtagccaaggcagacttagaactgcgcggcccagggagctttttgggggaagagcagcatggctttaccgacgcgggcgcgctgatgctgaccaaggacgccggccttgtgggggaggtcaaccgtgcatatgaactgctgcagcagccacagcgccaggcggattggcaaatggtgttgcgtgctgccaaaaaacaatacgaggatgcgctggggcaaattgcgatgaattaacaatagaaaaaacagagcatgaaaatgaaaaagagcggaaacgctctttttttgtctgcaaaaaattgcctgcaaggaatgcgcaaattcgccgtaaaaatcgcatattccgcaaaataatgggcattctacatttcgacgaagagtttggccgcaattttccaaacgatttcgcgcagtttccgcaaaaacagaaaattgggaaacattacatgtgtatggattttgcaaacgggcaaattactcgtgagacttggtaaaaggaggtgaatgcaatgacttctagcagcaaaactccgaaatcggcggctcagagacaggcgctggaacagatgaaaatggaggttgccggcgaagttggcgtaaacctgaagcagggttataacggtgacattacgtctcgtgaagcaggcagcatcggcggtggcatggtgaagaagatgtacgaaaagtatgtcaataaaaaccagcagaactaacccaacattgagaagaacattcttccggaaaggagagagatacaatggcaagcaacagtacgcagaataaccaacagcgtaagcaggctttgcagcagctgaagatggaatccgccagcgaggttggcgtgaacctgaagcagggctataacggcgatctgaccagccgcgaggcaggcagcatcggcggcatgatgaccaaaaaggtcgttgagcaaatgatgcaggactaacctgaagatagatcgagaaagggccggttttttccggccctttttttgtgcgcccctagggaaaagggttgacatacgatggcaaagcgagtatgatactacaaagcaacaaagtagcgtattagcatgatgaagtgaggaacgatatgaagacagtcaaagcgcaggtgccggaaggcgtgcgggatgtaacaggacaagaggcctttgccaagcgggccttggagcagaggctgcaaacgatgtttgtacgcagcgggtttgaagagatcattacgccttcgctggaatatgcggatctgtttgagggcgaggttggcaacttaaggcaagatcgcatgatccgcctgttcgagcaagacggtaagatgatgacgctgcggccggatttcaccatgccggcagcccgggttgtcagctcgcgtgcaaagcagagccagcaaccgatccgtgtattttatcgtggcagcgcatttggcttggagcatgattacggtcaacagcgccgggagttttcccaggtgggggcagagctgatgggcgattctggcctgtccggcgatgcggaaatgctttcgctggcggcgcaaagcatgacggaattggggtttgcggattttgtgctggatatcggccatgtaggtatttttcaatgtctggccaagcaggccggtttcagcgaagaggagacagagacgctgcgcggtatgctggatgagaaaaatgcgatggaagcaggtgcatttttgcagcagcttggcgtgttaaaggagatacagcaccaatgcctgtcgctgatcgagctgtatggcggcgtagaggtgctggataaggcagaggagatcttctatcagccttgctaccaatctgtattgaaagagctgcgccttttggcggtatttttacagcagatgggccatggaaacagcattacgatagatttagggctgctgcccggatttgaatactataacggcctggtattccgcgggctgggtgtcggcgtaggcagccccattatttccggcggacggtatgatggcgtattggctcaatttggcaagccgatgcaggcagtgggctttgccatcaatatggagcaggccatggcggcgctcaaagccgacaacgcttggccggccgttcctaagacggatctggtcgttggcgcggcagaggggtgctttgccagggccgtggcctttgccagggcgaagcggtccgaagggctgcgtgtggtattgagctatcaaacggataaaagcaaggtattggcacaagcggaaaacgagggcgcacaagcggtctttttggaagaaagcaagggggcagagcaatgaaacaacgaaaggtagcgctcgccaaaggccgcttggcggataaggctattgcgctttttgaaaaagcaggctacgatgtatccggcctggtagaggatagccggatgctgattttccaaaataaggagctttcctttttgatggtaaaaccaacggatgtaccggtctatgtggagcatggcgtggcggattttggcatctgtggcaaggatacgctgctggaaagcggcgcgcatatctacgagatgatggatctaggctatggcaaatgcaagctgtctttggcaggcaagccgggcacggataccagacagtccggcttaaaggtagccaccaagtatacgcactttgccaaggagttttttcggaaacgagggcaggcagtagagatcatcccgctgtatggttcggtggagctgggacccatcacagggctttcggatattattttggatattgtagaaagcggcaaaacgctcaaggaaaatgggctcgttgtattggaggacattgtgcccatcagcgcacggctggtagtcaaccgcgtgagcttaaaactaaatgcgccgtttatgcagcaatttatcaaaaatgtgcaggcagcgctggaggaagaagcatgatttatcagggaaaaaagggcgcggagcaggtgcttgcaaacctgcgcagacgcgcggagggcgatctgtcggaagtagagaccagggtcaaggagattttggcggatgtgcaggcgcgcggggatcaggcgctggcagaatacgccttaaaattcgatgatacggactatcataaaacaccgctgatcgttggcgaagaggagatacagcaggcctatgcgcaggtggatgaaaaaacgctggcagcgcttaggctttgcgctgccaatgtgcgcaaataccatgaaaagcaattggaaaagggatattgtattcaggagccgggcatttgcctagagcagctcgtgctgccgctggatagcgtagggctttacgcgccgggcggcacggcagcctatccgtctagcgtgattatgaacgcagtgccggcaaagattgcgggggtaggcaaattgtgcctggcgaccccggccaagcacggtgcgctgccgcccctcacgttggtagcagccaaagaaagcggcgtggatttgatctttcgcatgggcggcgcacaggccgtagcagcctttgcctacggcacggagaccgtgccgcaggtgaataagatcacaggcccaggcaacagctacgtagccatggcgaaaaaagcggtggtgggtacggtgggcatcgattccattgcggggccgagcgaggtgctggtcattgcagacgaatctgtgaatccggtgtttgtggcggcagatatgctggcccaggccgagcatgacgaacgtgccgcggcgctgtgcgttacagattcgctatctctggcgcaacgcgtgcaggatgaggtggagcggcagtgcgcggcgctcaagcgcaaccaaacggcacgtgcctccatcgatcgctatggcgccattgtggtgctggaggatctttcgtcctgcgtacagtttgccaacgacgcagcgccagagcatttggagatattaacggcagacccgcgggcgctgctgcccggcgtccgccatgctggcggcgtatttttgggcgcctatgcgccggaagcgctgggcgattatttggcgggcaccaaccatgtgctgcccacgggcggcacggccaaatacgcctctccgctgggcgtatatgatttttgccgacggatgagtgtgctggaatacgatgcgccccggcttcaggcagtggtagaggatatcgtgcagctggcggatacagagggcttgcaggcgcatgcccaatctgccctggtacgtttttaaggaggaaaaagcatggaacgatttggcgttaccagccggaaaaccggcgaaaccgatgtagaaacctcgattctgatcgatggggaagggttggccagcctttctaccggcattggcttttttgaccatatgttgaaccttttggctaagcatggcctgttcgacatcaatgtggactgcaagggcgatctggaggtggatgcgcaccacagcgtagaggatgtgggcatctgttttggccaggccatcaaaaaggcactgggcagcaaagcgggcatcaaacggtatggcaattttaccgttgtgatggacgaggctctggccacggtaaatcttgacgtaagcgggcggccgtttttaaaatttgacgcgccgtttgtaggcacgcgctgcggggattttgatgtgcagctcacagaggaatttttccggggcgtggccatggagggcggcctaacgctgcatatgaaggtggaatatggcaaaaacgaccatcatatgatcgaggcactattcaaagcctttgccagggcgctggatatggcgacacagatggatggacggtttgacggggtgcccagtaccaaaggggtgctgtgatgattgtatacccggctatagacatacgaaacgggaaatgcgtgcgcctgctgcaaggctcatttgataaggagacggtttacagcgacgatccggtggccatggcaaagcagttggtgcaaaagggcgccagctggctccatatcgtagatttggacggcgccagaacaggcgtggccagcaatctaccgctcatcgaaaaaatggtaaagctaggcgttcacatcgaattgggtggcggcatccgttcccgcgaggatgtggctcaacgtatggcttgcggggtggcgcgttgtgtgctgggcacggcggccattgaagacccggcgttggtgcgttgggctgcaaagacatatccaggccgcgttgccgtaggcatagacgccaaagacggaaaagtggcggtcaaaggctgggaagagcaaagtgcgctgacgccgctggaggttgccaagcaggcggccgaggctggggtgcgcaccgtgatctatacggagattgccaacgacggcatgcaaaacgggccggatattgcaggcagcgtacggctgatggagcagtccgggctggaggtcatcgtatccggcggggtgggctgcttggaggatgtggcgcgcgtacaaaaggctgggctgcccggcgttatcatcggcaaggccatgtatgatggcaggttggagatagagaaggcattacaaatgcaggaggaagacgcaatgttttcacaggatcaggtaaaatacaacgaacagggcctggtgcccgtcattgcgcaggatgtgcaaacgggcgcggtgctgatgcaggcctatatgaatcaagaagcgttggcattaacgctggaaaaagggcatatggtatactggagcaggtcgcggcaagagctatgggaaaaaggcgcgaccagcggacagatacaggagcttgtttctctgacggcggattgcgatggagattgcttgctggcgcaggtcgtccaaaagggaggaggcgcgtgccataccggcgcgtacagctgctttttcaatgccatgacagagccaaagcaggaagtaggcgacgccaacgtattgtatgaggtggacgccgtcattaaagaccgcagagagcaccctgtggaaggaagctataccaattaccttttcaataaggggatcgacaagatcctaaaaaaagtgggcgaggaaagcgcggaaaccatcattgccgcaaaaaacaatgcgccggatgaaatcatctatgaaaccagcgatttgttttaccatgttttggtcatgctgcaggatcggggtgttgcgctggaagaaatcttcaaggaactaaaacgccgccgataaattttcataaatatgaaaattagccttgacaattatggcgaccctaaggtataatcatcaagcgtcaaaaggacgggaatgggagcatagctcagctgggagagcacttgccttacaagcaaggggtcactggttcgaacccagttgttcccaccaaatggcccggtagttcagttggttagaatgctagcctgtcacgctggag

SEQ ID NO: 2936 - DNA, 6352 bp, Unknown
  16S sequences of unknown bacteria
tataagagacagacatacccagtaatttgccgctgaaaattgaggataagcagcgcattttggaggaagatgttttgtcaaagcgtctgcggctattggcccaggcgatggaaaaagaaaatgatattctggggctggagcacgatatctacgacaaagtgcgggagtcgatggataaaaaccagcgggagtattaccttcgggaacagatgcgtgttatttccgaagaattgggcgaagaagaatccgtaatggatgaagcggaggagtaccgccgccgtattgccgctttaacgctgccacaggagacgtctgagaaattttacgcggaagcagaccgtctttccaaaatgccgccgaattcgcatgaatccagtgtaatccgcgggtatttggatttatgtctggaactgccgtggaatatttctaccaaggacaaaattgatctttccaaggcaaaagcacaactggacagggatcattatggattgaccaaagttaaggagcgcatcctggaaatgttggcggtgcgcaagttggcgccagatatcaaaggacagatcatctgtctggcgggtcctcctggtgtgggaaaaacttcgatcgccaagtcgattgccaaatcgatggggcggaaatatgcccgtatctctttgggcggcgtgaaagatgaatcggacatccgcggacacagaaaaacctatattggtgctatgccgggtcgtattatcaatgcgataaaattggcaggcagtaacaatccgctgattcttttggatgaggtggataagctgggcggtgattacaaaggggatccatctgctgcactgctggaagtgctggatgcagagcagaatgatactttccgtgaccattttgtagaggttccgtttgacttaagccaggtgctattcattacgactgcgaacgatgtggggatgattccggcgccgcttttggatcgcatggaactgattgagctctcaagctatacgcgggaggaaaaattccatatcgcaaaagagcatctggttcccaagcagttgcaccggcatgggctgacagcacgcacctgcaaaatagaagattcagcgatttacggtttgctggattattataccagagaggctggcgttcgcacgctggagcgggaaatcgcgtctttgtgccggaaagcggcggaagagattgtatcgcaaaagacaaaaaaggtaacaatccgtgaaaaaacgttgttagattggattggaccgaaaaagtttttgccggaaatgatcagcccagtaaatgagattggctgcgtcaacggcttggcttggacttctgtcggtggtgagcttctgcaagcggaagtagcggcgatggaaggtgccggaaagatcgaactgacaggatcgttaggcgatgtgatgaaagaatcggcccatattgctgtgagtttggtgcgccggatagcagatcagtatgggattgaaaaagacttttataaaacaaaggatattcatatccatttccccgaaggagcaacgccaaaagatggtccttctgccggcgtgacgattgtaacagcgctggtgtctgcgcttaccggaataccagtacggcgggaagtggcgatgactggcgaaatcagcttgagaggtaaggttatgcctatcggcgggttgaaggaaaaatccatggcggcctatcgggcaggaatcaaaaccgtgataattcccaaggaaaatcagccggatttatcggagtttgacaaggcggtattggaagcgctgaattttgtcccagtcgagcggatcgaagaggtgctcaaagcagcgctgaccggtccttccgctgcagaaccagccccctcaccggttcctcaggaatttgcacctcccatcacggcagaaacgcgccgcaagcctgcgattatcgactgctgaaggagagagcccatgaattttcaaaatgttcagttcgaagcatcttacgggttgtttcaacaaataccgccgtgtgaaatgccagagtttgcattttccggccggtccaacgtggggaaatcgtctttgatcaacaagctttttaaccgcaaacagttggcccgggtcagcgccatgccgggaaaaaccacaaccatcaatttttttcggttggataacgtgcgttttgccgatttgccgggatacggttatgcgaaggtttctaaaaaagaaaaaaaacgctggtctgggcttatcggcgattatctggctagtgaccgggatattgcattggtattccagctgattgatatgcgccatccgccgacgaaagatgatttgttgatgatcgattatttagtggaatatgaaatgccttttgccgtcgtcctgaccaaaatggataaactatcccagcgggaacgggcagagcggttggcatcacttcagacggaaattccttatgcagatcagattaccattttgccagtttctgctcaaacaggggaaggaattgaggaaattcgccaaatcattgaagaattggcctgccgggaaaatgagacggcactgggcgtagaatcagatctggaaacggataccgtaccggagacgatttttgctcagcctgggcagaaagacgatgtggaggaggcgattcgccgttttcgagagtcggtgcgttctggagagttggagaacaaacaacaagagaaacttccgaccagacaacgaaagagggacgaaacatgtttgtagcagactgtctgcaggtaaataagcaaggccatttatgcatggaagaactggacgttttggaattggcggcaaaatacggaacaccgctgtatgtgatgagtgagacccagatccgaaaaaattgccggatgtatcaggattctttaaagcgtttttacggcggaaatggcttggctttgtatgccagtaaagcattttgctgcaaagaaatttgccgcattgctgcacaagagggaatgggccttgatgttgtgtctggcggcgaactatatacagcggtcagcgctggattttcaccggaaaaaatttactttcatggcaataacaaaacagcgccggaattggttgctgccctagaacagaaggtaggaaccattgttgtggataatctggaagaactggaaatgcttgaccggctggccggggctcagaatatacatcagcagatcatgcttcgcattaaaccaggagtagacgcacatacacataacttcatccgcaccggccagattgattctaaatttggctttgcgttggagacaggtgaagcgatggcggcggtaaaacaggcggtacgctgttctcatatcgagcttaccggtctgcattgccatattggttcccagatttttgacacagacccctttttgctgacggcccggattatgattggatttttggcacagatccggcagcaaaccggatgtgagctgcgcaagctgaatctgggcggcggttttggaattcagtatacaccggatcaaaacccgcctatgtacgaaacttatatggaacatgtttcttctgccattcatgaggcgtgtggccttttggactttccaatgccgtatatcctcatggaaccgggaagatctattgttggtccggcgggcattacgttgtatacggttggatcagtaaaagaaattccgggagtgcgtacctatgtgtctgttgatggcggcatgaccgataatccccgttatgcgctgtatcaatcggagtatcagatcatgaacgcagggctggctacgcaggagaaaaccatgcgtgttaccttggcgggccgctgctgcgaaagcggcgatttgatcggagaaaatttgcctgtgcagcatttggaaaaaggggacgttgtggcggtgctgtctactggtgcctataattattcaatggcctcccattataatcgtatgccaaatcctccggtggtaatggtaagagaaaacaatgatcgggtcattgtgcgcagagaaacctgggaagacctgattcggatggatgtataaatggttgaaatcaaaagcggcaagatttttgccgcttttttgctatgcaaaactacgaaaaaaacatccatgtgcatggtccgtaaagctcggtgcatgggatagaacagtctgtatgcgtaaaacgttatgcgttattgactttacatgtcatgatggtgtgttggaggcatgaagcttcatagctatttggtgtaagaatatccagaatgttgctaaaagggaatacattggaaaaaaagaaaagaaccgtttacttttcgcctttcttatgttaaactataaattgatttcatactctaaaatcgtaaagtgtaaaatcgggaggtcatttcaatgaatgaaaagttaaaaggactgcatgtagaatatctttttcaggcggttttgtgcttggaaacgatggaagagtgctataatttttttgaggatttatgtactgtccctgaacttaaggctttatctcagcggttgcaggtggcaaaaatgctacatgaacacaaagtttacagtgaaattgttcaggcaaccggagctagtaccgctactattagccgtgtcaatcggtcgctgagctatgggtgtgacggatatcaagttgtatttgaccgggtgaaggatgaatgagagggtacggagcatttgcttggtattatgatgagctgacggagaatgtgtcctatcaaaaacgggcggattattttttgcagctgatagaaaaatttgggagcagcggtccaatcgtattggatttggcctgtggaaccggcagcttatctatggaattggcccagcgcggttgtgacgtgatcggtgtggatgcttcggaggatatgctttcagtagcgcaggaaaaagcaatggaacatccggagtgggacattctttatctgtgtcagtccatgacagaactagacttattcggtacggtggatacgacgatctgcgcgctggacagtattaaccatttaacggatccaaggcaggtacagcagacttttcaaaaagtgagcctttttacagcgccgggcggactgtttttgtttgatgcgaataccccgtataagcatcgagaagtactgggcaacagttgttatatttatgagtttgacgatctgttttgcgcttggcagaatttttttgaggaagcaacctgcacagtaactgtgcagctggattttttctcagaagaaaatgggcattatattcgagaacaggagtatattgttgagcgggcttatacgcaagaggaactgtcccagtggctggaacaggccggatttaagctgctggcagtatacggagaagatagcttggatccgccggcgccagactgtcagcgctggatttttgcagccagaaaaaagtaaggagatcattgatttatggcaaccttagtcagaagcatttcccaaaatggcagtgtgacctgcacagcgattgattccactgatattgcagcgaaagcagagcagattcataagacttctgcgacggtgacggcggcgttgggccgcctgttgaccgctgcgtcgctaatgggagtaatgttgaaaaaggcagagaactccatcacacttcgcttgcggggagatggcccggcaggatttttgattgcggttactgacggcttgggaaatgtgcgcggagatgtggaaaacccggtggttgaaatcccgttaaacgggctgggaaaactggatgtagcaggtgcggtaggccggagcggaagcctttcggtggtaaaggacttggggctgaaagatccatatgtcgggcaagtgccgattgtttccggtgagattgcggaggatattacccactactacgccgtcagcgagcagacacctacggtctgcgcgttgggagtcttggtcaacccggatttgacggtaaaggcagccggtggttttttggctcagcttttgccgggcgcatcggaagaagatatcgaccggctggaacagaatattggaaagctttcgtcggtcacgcagcttttgacaggtggtgcgtcggtggaggatatctgccggatggtgctggaaggattttcgccgcagattctggagacggtgcagactgaatatcgctgcagttgttcccggcaaagagtggagcgggctttgatcagtattggcaaaaaggatttgcagcagatgatggcggaagaggaaacggttgaagtcaactgccatttctgcggcaaaaagtatcatttcgatcaagaggatctgaaagctttgttgaaaaaagcggagaagaaggacgaaactccctcttttcattgatacagccatcagaaggctgaaattttataaaggactgcttttacac

SEQ ID NO: 2937 - DNA, 4338 bp, Unknown
  16S sequences of unknown bacteria
gatctgaatgggaagagctatgactgccttatcgcctgcggctccggttcgctccacgatataacaagatattcggcgaatgagaagaagattcaattcgtgtccttcccgacggcggcaagcgtcgacgggttcgtctcgacggtcgcggcgatgacatggggcgggcagaagctttcgagccccgccgccgctccgatcgccgttttcgcggacccgaaggtgttcggcgacgctcccgcgagactcacggcgtccggcgtcggcgacctgctcggaaagtacaccgcgcttctcgactggcgtatcgcgaggatactcaccggagaggaaatctgcccggagatatacgggctgatggagaaggcgctcggacgacttgatgggcttcttgacgagatctcctccggacagttcgatgtccgctcggaaaagtacacgacgctcgtcatggagtgcctgatactcgccgggctctcgatgcagctacagggtaattcgcgccccgcgtccggagcggagcaccatctgtcgcatttctgggagatgcacattataaataaaccgacagacgcgcttcacggtgagcaggttggcgtcgcggcgcttatgctgacaagatattatcacgcgatgagagattatgactttatgagacctgtcaatctcgcggcgacgttcgatcgttcatatcttgagcccatatacggagacctgaccgacggaatactccgcgagaatctgacagacggggaagtatcctcgtcgccgcttgcgtttgtaccggacgctgaaaaagcggagaaggtgcgcgcggagatcggttcgctgatttcaccggaggcgctggagcggcttctgaggctcggcggagcgccgacgacgctgtctgagcttggtctgccggatgatgaggagtttatcgcaagaacactcgggttcgcgccttatgtgcggaagagactcacgcttctgaaggtgctgtccgcgaaaagataaagaaatcggctgtcgcaagtttggaaatcgcttccatttgatggtcaatacgaacaattttcgaagtccataccatattggtaagcctggattattgtgcataataccatgaaaatggaaatgttttcctcagatgcgacagccctgtttattcacttttcactcagataaccctgagagtctccccggcggaaagcttcagatcataagcctctccgttcgcggtgattttcccggcaaattccctgtcagccgtgacaaggcatgaggtgacccttccgtccttccactccgctgaaacctccgctccgccgcgggtcagatcgtcatgacacatggcagaacaaaaaataccgacccgcggatcgcgccggcaatcccgcgggtcgattattttatttatataatcactttctctttctgagtgagacaaaagccgcggcggaagcggtgaaagcggcggcagtggtgagaattccggcgtcaggagtggaaactgaagctccatcatccatcgcgtcgctcttctcatcttccttgaccgtcactttgtcagccgagagaacgaaatcggtagctccgtcaacattctgataaccggaagctatggtggctctgtcagccggaacatagttgttgtactgaagcgtgagcttgaaaccggagcccgccttcaaactgaagttcgacgccggaatagcgatctcggttatgtatccggtatctgtagcggttccggcggcttttatagtgatgccctcaaaagccttttcccatctcagaccgttgccgagacatccgacgtgaacatttccgcggctgtcctcgtttccgtcagcgccccagaaacagatctcaaggttgtcacaggcagaccacttttcataatctaccccatcctctttgctctttgtggcggtgtcgtcaacgaccacacagcagacgtacagataatcctcgtcccagagaaagtaagcggtggttccctttgcggcctcgtagtccgagtcagtcgtgccctccacatagaatccgaagttctcaagctctattgaagcggattcggtgtagatgtcgtcgagtctgccgtcaagtaccggggtgccgttcctgatatccgtccctttcgcggataccggaagtgccgccgcgacgataagcagcgctgcgattccagcaatgacctttttcatgttatttacctccagaattatagtggtcttgtctccgccggacagtcgtgctcttcccggcggctttattaacctgtaataattttaacatattttcaacaaaaagaaaattgatttttgtgtcttctatatgttataatgggttcaataatataccataaaggagttgacaacattgaatgacacaggatgccggatatacagctctaccgcgtggcagttcaacacgctggaggttcatctgatagaccgcggtttcacggatataaaccctgtgcttttcggcagcgaatcgtttgagactgatcccgatcgccgcgccaccagcgtcatctacgactgtttccttatgcactatgtgtcatccgggtgcgggacattcataagtccgcgcggaacttttcctgtccgcgcgggtcagtgcttcattatccggccgatggagatcatatcatatggttccgacctgaacgatccatggagatatatctggctcggaataaccggaaagacagcggaacggctttcaaagcttcctgacgtcgtggatattcacgacgcgtcactcttcatgtcgatggagaaatgccgctcctacacttctgagcgtgagatgtatctcgccggaagatgctcgctgctgttcgcggagctgtttgagaaacgcgagggcgacgaatgccggcgggagatgcgggatcagataaaatatgtactgaattatattcatcagcactacatggagcctatgacgataagtcaggtctcagagaaaatgcaccttgaccggcattacctctcaaagctgttccgcagagaggtcggaatgaccatgaaggcttacctgacaaagatgcggatgaaccgcgcgaagacattcctcgggagtggatatctcgttgccgagacagcggctctctgcggctataacgatgtgttcaatttctcgcggatgtacaagaaatacttcggcgagccgccgtccggaaagcgcggtggttcagaacagaacgataaagaatattgattcaagttttttcgcagaaaaagctcgcgaatccggacttttttcgtgaaaacccgatttattgtgcatcattgataaacagggctgtcgcagatccggtagtaattcccctctgatggtcagcatggacaattttcagggttcataccatattggcgaacccggattattgcgcatgacaccatgaaaaaggaattactttcctcagatgcggcagcctttcgttttttgtcaggatatatcgatcaggcgcatcgtgccgatgccggtgacatactgcgggatgctttcggtcagttttccttcgtaatcgtagtggagatgaccggcgaagatggcttttatcagggggcaggacttgatgaattctgtcgtttcgatggttatgtcgtctgcctgctgctgcttgaagcggtatttgctgtagtcgctcatcagctcgtccggggtcgaggtgaggtaggcgctgtcgcctttcgggcgggctgtgcggaagagctcaggttcatagatcgggttgtgcatcaggaggatgatcgggagattatcctccgtttcttttttcagtttttcgagctgcgggcggtcgaagcggtagtaggagtcgtcgatcgctatcagtttgacgccgtttatcacgcgggaggcgaagcggatgtcgttcgtgaaggattcctgaacgtgggcgaggctttggtttctgtaggcttcgtcttcgaaggcttcgccgacatagaggctgaattcgtggttgccggcgctgaagaatacgtcgttcccggaggtgaatttttttgccgcgtcgaggttggcttctgagacgaagtcgatgaggtcgccggtgtggacgattgtcaggtggtttttcctggcgtattcttcggcatcgcggaggtcggagagggcggaggggaagcaggagcttctgccgtcagcgagatcgattttgcgtttatcgtttctctcgtcggcgagtgtgaggtgtgtgtcgctgatgtgcaggagcgtgaacggtttttccgccccgcatacaacgggagtgcgcagaattttcatagagtgatgtctccttttttgggtgtatatcagattataccaccgcgaggagattttgtcaat

SEQ ID NO: 2938 - DNA, 11710 bp, Unknown
  16S sequences of unknown bacteria
ctgatggtcgacgtcaccggcctgccgccggtcaagcagggcgatattgcgacgctgtttggccccggcggccccagcgcctatgacctggctgccgcggccgggctcacaacaaacgccctgctcagcggcctcggcccccgcctcccccggatcgtagcttcggcgcagtagccaaaaaacatgccgcgttttcgcacaaaaggcccggatggtttttccatccaggcctttgagcgtgtcaaaaaagtatttttgacgcgctctcaaacgcgacaacgctgtataagttcgagtaacaaaatcgaagattttgactctcacttaccgcttcgctgggctcgcgtttgaaggagattgcaccctgctgcgcgcataattcccacgctgcgcgtggtaattccacacttgcagggcgagaagtattttccccgacgtatgcggtgcatgggttcgacttcgccaatcgcgctgtgcgctcttggagtctcacccacttgccgccggagaaaatgattggaccttatttgcgcctgcgggcgcaaactctgcgaggcttttttgacagtttgaaaggcccggatggtttttccatccaggccttttccttttattttttctcgccgcctagctcccgcaggagtgcaatgagatttcggtctgcctcgtccagcttcaaattggcatggacgctgccgccgtccggcgtcttgacctcgacgtccaggaccgtccccgccgggagctcctggctgcccaggtactggacaaattttgtaaacttcgggtgccgcgtctgcaaggcggccagctctcctttgagcttcatcagggtcatgggattcatcgcatacctcctaattccactgggtccagatctccgggcaatacccaacggtcgcctgctttccgttgcggacgaccggcgtccgaaccaggtccatccgttcaaaaagatggtccgcccggtcgctctcccgctccaaatagcgcatcaggtccagctccggatcctgcttgctccaatccgccagcgcttcaaccccgccgacagcccggagcacactttcaaattcccgtccggacatcccgtaccggggaaggtcgatcatctgaaacgggatccgccgctccttgaaccagcgctgggcctttttcgtatcaaagcacttgctcttgccaaaaatctgaatattcaatggtactgcacctccattaagcataagccctgggccgggaccgtcaccccggcgttcgcccgacagccagaggcaaaaatctccgcgatcgacgacaccaggcgtgcccccgcgccgatctccagcagcgtccccaccaggatccgcaccatgtggtgcaaaaaaccgtcgccggtcagagtaaaaataagctcctcgccggtcttttcgatcgtgagcacatccaggcgccggactgtggactttttccccggcctattggcgctgaaggcgagaaaatcgtgactgcccagaagtgtctccgctgcctggcgcatggccgcaagatcataggcccccgggcaaacatacacatacttccggtcaaagacgcagggctggtcactgacccagacgcgatagcgatacgtcttgcacaccgcgttgagccgcgcgtggaaccggggcgcggcctcctgcaggtccagcacgccgatatcctccggcagccgggcgcgcaattgccggagcagctgcgccgtaggcagcgccgtctcagcccggaaggaggccgcctgccctatggcatgggtcccggcatccgtccgccctgcgccggagacctgcaccggttgctgcaaaagcgccgtcaggcacgcctccagcttaccctggatcgtccggtccgaatcgcccaaccgctgccagccccggtagcggctgccgtcataggccagcagcattttaaaattccgcatcatcgccgttccccttcctgcgccgctcgcagcgcctgcagcgcctcctggcgggtatcggcagagaacaaaaaacgacccgccatgtcataaacctccacatgtccccgtatatataaaatagaacactgcaacattgcacgacctcctgtcttcgagctaattctatgatagcacaaagtatgtccaatccttcggacagcagcaggcgcgctgcaatttttctgactgcatcatatcatatcgccgcccagactacaagcaattcccggttttatcccagagggagccccgatttattcgcagattgcacaatatggtcatcatacttttaggcattctagccaaaattaaaaggatggccaaaaaatacgcatccagatattgacttttttcaaaaaaaaggtattatgatatcagaacgtgagattgtcatgtggtcgtattacctatgatatctcaaaataacatccgtctacaacaattgacaggaggaacaacacacatgcaagaaattttgaaagaaatcgaaacagccgtttatgacggtgacgaagatctggtcgtagagctcaccaagaaggcactggaagacggcgttgagccccaggccatcatctccgacgctggcgttcccgcgctgaaccagctgggtgaagacttcaacaatctgatcgcatttttgcccgagctgatgcttggcggcgactgcatgaaggctttgatcgagacctgcacgccttatatgcagggtgctgacagtgccttcaagggcaagatcgtcatcggctgcgccaagggcgacctgcacgacatcggcaagagtctggttgcaacgcagctggctgtcaatggctatgaagtcgttgacctgggcactgacgttcccaccaacaagttcatcgacacggcagttgccgaaaatgcagacatcatcgccgtatcctccctgctgacgacctcccagtattacatggaagagctcatccatcgtctgaccaacgaaggcaagcgtgacaaattccacattgccatcggcggcggcccgatcaaccccgactatgcggaaaagatcggtgcggacggctactcccgtacggctgacctggctgttaagatggcggatcgcctgatggcagctgcaccgcagtccggtcttatcagcgaagtgtaatctcctgtgttcaccgccgggagttacccctattcaatcgcaaatctgaatttcatctagatttaatacgtaaggagtaagcacaatggaaaaacataagaaaatacttcgtacattggacaaagcccgcaccggtgaccgcgtcctcgaaaaagactgggatcagaagatcgttccgcgtaccctgaaggaagttgcgaagaagtacaacctgctgggcacctgcgatcccaacaaccccgtcaacaccgaccccgagctggcggaccgcttcttccaggccggttgggaagctgccctgcgtctgggcttcttctgccccgacaccgagacggtcatcaaggtcgacgaggacgagctcaagcgtgaattcaacaaagtcatcgaccacttcaccctgggccacggcaccgagcagaagctcatccagtgccgcagaccttctgatggcattgagcccatctttaccgctcccctgtctatccagatggacgaagagctgtacatcccgctggtcgaaggcatcgtgacctgcccgctggttgatatgcaggaaggcccgtctctggacactgtcatgggcagcccgctgctggccgactccccctacgagacctttgctggtatctacgagtatcatatgcgtaaggaagcccagtggcgcgcaggccgcgcaggcatgcccaactccctggtttccagcgcttccacccacttcggcttcctcgcagcgttcaacctgtatgagcagccgcagctggctctgtgcctgaaccccgcttctctgaagatcaactacaccaccctgcataagtgcttcgtggcgtacgaactgggcggcgttgtccgctccgaatcccccaccatggttggcggttacaccggcggtcccgagaccaccgcgatcgcttccatcgcgaccgacctgctgcagttcccgatctgcggcgctggcctgcccggctccccgtcctacgagctgcgttatgctggcaactgcggtcgtatcggcgtttgggcccagtccatggcgacccaggcgatctgccgcaactccagaatcccgctgatgaagaccatcaaccaggtctccggcccgatgacggatatgttcttcctggaatccatcgttggtatgaccgctgcttccgcttccggccaggccttcaccatcagcccgcgtgctgctggcggctccaagaagaaccatctgacccccatctgcgcatggtacaatgctgcgattttcaagggcgctgctggtctgagcctggaagacgccaaccgtatctgcaaggaagttattccgaagttcgaaaacgatctgtacgatcccccgaagggctgctccttccgcgatctgtacaacatctccacgctcgagcccattcccgagtacaaggagaagtacctgcagttccgtcagtatgccaaggacctgggtatcccgatccccggcgacggtgtctactgctaattcaactgtccggaacggcaggcggctcaccgcctgccgttcttctactctgcccgcactttctctccaggtctcccgcagcgcgcctggcctaagccgcccacgcccgctgctgtctgcggcaagatcctcacggcgggcagcattcggtctttgttcagcattttttggttgattttatccttgcctttttctctgaaccgtgctatatttaaagcaaacactattcggtcaacatcgtattgtattacttattggaagtattttgcgtaaggagtcaagctatgcaggtgaaacgaatccgtcggaacagcgccgccagtatcgtgcggcatgaattgaagaagatgatcaaaagcggctattttaaggacggcgccattccctcagaggaaggcattgccgcgatgtttggcgtcagccggacaacagtacgcgacgcgctggccaacctggaaaatctgggctatatctcccggatccagggccgtggaacgatcatcaatcaggtcgtcagcaatctgtcctgccgcatttccgagggtatgccgtttacagagctcatcggttcgatcggcctgacaccctcggtcatcaacgggcgggtcgaaagcgtcccggcagacccggagatcgccggaaagctgcagacgcaggacgactctctctaccgggtgacgaaagtcttccttggcaacaaaaagcccgccatttacggcatgaactactatacccatgagtttgtcaccgacgagatgttccagtaccccatggatgagaccagtatttttaacattctgcaggagcatttcaacttcccggatattgccttcgacgtcgtcgatattttccccatcgctgccaccggcgaagtcgccgcagcgctggagctcgacgaaggcacgccgatccttttctttgaatccacctcgatggataaggacaatcaccccctgatgatcaaccgggagtactacaaccccaatgtcatccacttctgcgaacgccgcgtgacccgttactattaaggaaagcgctgcatcccccaggcagaacgggaaagacggcgcggccgccagcttgaagctgacagccgcgccgtctttctgcatttattgggccgcactgcgctgcagcactgcagcccggcaatagcgggcaatggcttgcgccacgccgtcgcattcgttgcaggctgtcacgctgtctgccgcgcagcggacattctgtgctgcattttccatcgccacaccgacgccagccgcctccagcatcccaatatcattactgccatcgcccagtgccatcgtgtcgcctagagagaggcctagatggtcgcacagcacccgcagcgccgtatgcttcccggcatccttccagttgagctccaggttattggaaatggaagagctgacctgaatatccggaaaatcccgcgccaaccggtccaccaggccgatgcgatcccctggctctttgaaatacaactgtaccttttggactgggccgccccgctgccgaacatagttcgccagctccggtaccgtccgccgaaatcgcttaaagagttcttttgaatagatatttgtaatgtacgtatccgccaactcataatgccgctgtgaggtccaggcgcagttatccgcatagcaatcataaataaccggatacggctgccggtcaatataggaaaacagttccagcgtgcgctctaacggaatctgggcagaatagagctcccgctgctccgttttgtcatacaccgaagccccattgccgcagataaaataccgaatctccggcatctgcttcacctgctccgggatgatcgggtagatgcgccccgtcgccgggacaagaaagatgccctgcgcagctgccgcccgcagcgccgtctgattcgccggggagaccgtcttatcctcccgcaaaagtgtgccgtccaaatcgaaggcgatcagttttatctccatgtcgttctccccataccgcgcagcggcggtgtcatgtacttcgttctggcctgattatagcacacatcctgcagaatttcgacccctacccaaaaaattcaacaccgcttttccctctgcgcaggacagactttacgttttacaaacgttccatgctgggatgccgggagaataccacgcgtcacgcccagaatttagcgattatttacaattcagcaagtaaatatttgtcttgaaccgtaaaaacatcgtttttttcttcattatcggtgaaaatattgtattttttgcatcatgctcaaaacgtcgctgtcttttttgtgaataatgcccggggcaaaaatttgtttttctattgcaaattattttttcgtcgattataattagtatgacaagtgaagactgatagctgtaacgaagtgctgcgcgcacgggcttcaactatcactcagcgctgcttgagtgaaggtgctccgaaaggtataactatgttcgggcaacttcaccttttttatactcgtacttaattttttccaaggaggaaacccacatgtacattcttgcaaacggtagactgatcacccgcagtgccgacaccccctacctgcccgacggcggcgtagtgattgacggcaccaagatcaaagaagtcggcaccaccagcgacctgaagaaaaagtatccggacgccgagtttgtcgatgccaagggcggcgtcatcatgcccgctttcatcaacgcacatacgcacatctactcttccctgggccgtggcctgtccattgtgggcaacaaccccaccaacttcctggaagtcctggaaggcacctggtggtccttggaccgcaagctgaccctgccgcggacgaaggcctccgccgactccctgtacctggattgcatcaagcagggcgttaccacgatctttgaccaccatgcagcttacggcggcatcgaaggctccctgttccagattgcggaatccgcgaaggaatttggcatccgctcctgcctgtgttacgaagtttccgaccgtgacggcgaggacaaggccaaagccgccatcaaggaaaatgcagatttcatcacctactgcgagaaggaaaaggacccgatgctggcagcgatgttcggcggccacgctctgttcaccatctctgacaagacctttgaccgcatggtcgaagccaacaacggccgcaccggcttccacatccatgtctccgaaggcatgaacgacgtctatgacagcctgcagaactatggccgccgccccgtgcagcgcctgcaggaccatggcattttgggcccgaagaccattctgggtcactgcatccatgtcaacaccgctgagattgagctcatcaaggaaaccgagacaatggtcgttaacaaccccgaatccaacatgagcaacgccgtcggcatctgccccgtcctgccgctgtacaaggctggcatcctgctgggcatgggcaccgaccagtacaccaacgatatgcttgagtccatcaaggtcgccctgtgctcgcagcgcagcaacgcctgcctgcccaacgtcggctggtgcgaagtgaccgacatgctctttaagaacaatgccaagatcggtgccaagtacttcccggataagctgggcgctctggaagccggtgctgcggctgatgttatcgtcatggactacaagccctacaccccgttctccgacgccaacatcgacggccatatgctcttcggcatgaccggccgccagtgccagaccaccatcgccaacggcaagatcctcatgaaggaccgcgagctcatcggcatcgacgaagaagccgtcaacgcccgctgcctggagcaggccaagggcctgtggggcgagctgaaccactgccagtactaattctgacgctgcaatcgctgcaatacgatgcggctgcccggcgggagcgtccgggtagccgccctgcggcataaaagcatcggagaaaacagaaataccggcgcgcatcctgccgccgactgcccgccatctccggcgcggcttgcaaacgcaaacgcaacacaacaccaggaggaattcaaatgtctgaaagaatgtacccgatccccttcaacgaattgatgaactggatcactaccgaatacgccacccagggcgagatcttcggcatccataaagcttactatgccggcggcaaatctctgcccatcttcggcgaaaagatcgagaccccgttcggccctgcagcaggccccaacagccagctgtcgcagaacatcatcgccgcttacatggcaggcgctcgcttcttcgagctcaagacctgtcagaagatggacggcgaagagctggccgcatgtattccgcgtccctgcatctggacgaaggacgaaggctacaaccaggaatggtccacggagctgacaatcccccaggcgcagaacgaatacatcaaggcttggtgcgctctgaagctcatcagcaagaaattcggcttcggcgatccggacggcttcgtctttaacatgtccgttggctacgattacgaaggcgtcaagggcccgaagatcgacagctatatcaacaacatgaaggacgcctccaattccgagcagtttaaggaatgtcttgccgtcctgaccgagatgttcccggaagagaaggattacatcgcttccatcagcccgaacgtctcccgttccgtcaccgtctccaccctgcacggctgtcctccccaggagatcgagcgcatcgcttcttacctgatcgaggaaaagggcctgcacacctttgttaagtgcaaccccactatcctgggttacgagaccgcccgcgccattctggactccatgggctatgactacatcgtcttcgacgatcatcacttcaacgaagacctgcagtgggccgacgctgtcccgatgttcgagcgcctgcaggcactggcagacagcaagggtctggaatttggcctgaagctctccaacaccttccccgtcgacaccacccgcggcgagttgcccaacgacgaaatgtacatgtccggtcgttccctgttcccgctgaccatcgagatgtgcaaccgcatttcccgtcagttcaagggcaagatgcggatctccttcgccggcggcgctgacgctttcaactgcgaccagatcttcgcagctggcatttggcccatcaccgtggcgaccaccatcctgaagcccggcggatacaaccgcctcatccagatgtgcgaaaaggtcgaaggcatgcccttcaaggcatttgccggtaccgacactgctgccatctctgatctgagcaccgccagccacaccaactggcatcacaccaagtccatcaagccgatgccggagcgcaagtccgacaagaaggtccccctgatcgactgtttcacggctccctgtaagggtggctgccccatcgagcaggatatccccgaatacatcgagctgtgccgcaagggcctgtatggtccggccctgaagctcatcacggaaaagaacgcgctgccgttcattactggcaccatctgcgcacatcgctgccagaacaagtgcacccggaatttctatgaagaatccgtccaaatccgtgacacgaagctggaagccgccaagaagggctacaacgcgctgatggcctccatccgcaagcccgctcccgtcgctggcaagaaagtcgccatcatcggcggcggcccgaccggtatcgcagccgcttacttcctgggccgcgccggtatcgcgaccacgatcttcgagcgtgagaaccagctgggcggcgtgccgcgtcacgtcatccccgcattccgtatctctgacgaagccatcgacaaggacgtcgctctgatgatgcagtacggcgtcgaagtcaagctgggcgctccggccccctccgttgacgaactcaagggcatgggttatacccacattctgttcgcagtcggcgcttggaaggctggcgagctgggtatcgaaggcaatgtcgcaggcgtcatcggctggatgaaggaaatgaagggcaaggtcaagccgtgcctgagcggcgatgtcgtcgttgtcggcgctggcaacaccgcgatggacgctgcccgcgttgcaaagcgcatgggcgcccgttccaccatcgtctaccgccgtacgaagaagtacatgcccgctgacgagcatgagctgcagctggccattgacgaaggcgtcaactttgtcgagctggccgctcctgtgaagcaggccgacggcaagctgctgctgaacgtcatgaagctgggcgagcccgatgcttccggccgccgcagccccgtcgctaccggcgagaccatggagatcccctgcgatctggtcatctccgccatcggcgaaaaggtcgattccgagctcctgaaggccaacggcatcgaagttgacgccaagggccgtcccgcattcgagacgaacgttgccggcgtctatgccgcaggcgacgcgacccgcggcccggcaaccgtcgttgaaggcattgccgacgcagcgaagtttgcagagatcgtcatcggtgaagcacatacctatgagattcccgaagcagcttacgtcaccaaggcagaggccattgccaagaaggcgaccctccattgctccgcatgcgcttgctgcgaaggcagccgctgcgtcgactgcaacacggtttgcgaaaactgcacagattcctgcccgaaccgtgccaatgtcgtcatcaagctggcggacggccgtcatgagatcgtccatattgacaagatgtgcaacgagtgcggcaactgcacccactactgcccgtacgcttccgagccctgccacgacaagttcaccttgttccagaccgcagaagacttcgtcgactccaaaaacgccggcgttctgttcctggatggcgatatggttcgcatccgtctggatggcgagaaggacgttgacctgagcaaggacaacgatcttcccgccgacatcgagaccttgatcctcaccatcaaggaaaagtatagctacctgtacaaataagcaatcatacacaccaaaaggcggtgcggcatttgctgcaccgcctgagcttgtcaaaaaagtatttttgacaagctctcaaacgcgacccgctccgctgggctcgcgtttgaaggggattgcaccct

SEQ ID NO: 2939 - DNA, 13594 bp, Unknown
  16S sequences of unknown bacteria
gaccgcgtttgcggtcgggcggggtttttctctttgcatattagaaacacacctgcacacgccccgtttccgaccttcgaaaagacaggcggaacatagcacaaaaccgacgacgcttactcaacgtgcgttgaatcaacttttttcaaatcaaagccctgcccgaccgcgtttgctgtcgggcagggcttttctctttgccaatcaatatacggctatacggcggaacgcgccccgttttccgtcctcggaaggacggcaaaagatcctccgaaacgcccgccgaacatacggcgacgcgctttcgtttccctaaaaaacgcggcgaaaaaatttaaagggggcggctttccgtaaagcccgctatttattccgcttatacagttccgaacagacctccgaaagcttgacgcccttttccgcaagcagcaccatcatgtgatagaggaagtccgcggcttccccgatgacttcgcccttgtcgtcgttcttggacgcgatgacgagttccacggcttcctcgcccgcttttttggcgattttgtcgatgccgcgcgcgaacaggaaactcgtatacgagccttcttcgggattctttttcctgtcctcgacgatgcgctgcaattttccgaacatctcggcgccgatctcgttttcgtcccctttcacctgctgcgaaaaacagctgtacatacccgtgtggcaggcgacgcccttttggcgcactttcaaaagaatgcagtccttatcgcaatcgagatacgccgtgatcaccttttgggtgttgccgctcgtttcgccctttttccaaagcgacgcccgcgaacggctgtaatagtgcgcgtaccccgtttcaaacgtcttttccaccgcttcgcggttcatgaacgcctgcatcagcacctcgccgctctcataatcctgcgcgatcgcggcaatcagccctttctcgtcaaacttcaattcgtccgcattcactcttttcgccttcatctcaaccatgcttgcctcctctgacgggaatgtcccgctttgataaatatattttcaaatcctttatacgaagctctccgaagtggaaaagggaagccgctaacgccgcgtccgctcctccctccgtcaagacctcggaaaagtgctcttttgtccccgcgccgcccgacgcgatgacggggatattgacgagcttggaaaccgctttcgtaaggggtatgtcgtagcccgctttcgtaccgtccctgtccatgcttgtgaggagaatctctcccgcgccaagtttctccgcccgcgcaatccattccagcgcgtccagtcccgtatctatccgcccgccgtgtttatagacgttccagccgcccttttcgttccttttcgcgtccaccgccagcaccacgcactgactgccgaactttaaagccgcgttcaggatcaatccgggattgtctatcgccgccgagttgacggcgatcttatccgcgccgcattttaagagcacggaaaaatcctccaccgaagagatccccccgcccaccgtcagcggaatgaacacctgctcgctcgcgcgggaaatcacgtccagtttggtctttctgccgtccgcgctcgccgtgatgtcgagaaaaacgatctcgtccgcgcccgcggcgttatacgttttcgccgcctccacggggtcgcccgcgtcccgcagcgaaacgaaattgacccctttcaccaccctgccgtcctttaaatccagacagggaataattcttttacaaagcatattttatgtttccgttgtatctctgtcccgagagtttgtcgcgtatccgtccccgagccgtcaatttgcgtctatcccaaggggaagccgcgcatttttccaaaaagtcggggtgcgtgcctgaaaaatccccgacagcgccctttttcaatcgttttggaatcgttcgagcgcctctttcaagtctatcttgccctcgtagagggaacgccccaaaatagccccgtaaacgcccttctgcgcgagtttttcgaggtcgtcgacagaagatacgccccccgacgcgacgacgtttaagcccgtttccaagccgagtttcgccgtttcttcgacggcgacgccggacagcgcgccgtcccgcgacacgtccgtaaagacgcagtaacaaacgcccagcgctttggcgcgtttgccgaaggaaacgcccgtttccccgctcgtttccgtccagcctttgacggagagaaagccgtccttgcagtcgatccccgccacgattttatccccgtatttttccacggcttcccgaaaaagagcgggattcgtgtggcacacggtgcccaagaccacgcggctcgcgcccgcgttcaagcgccgctcgatctcctccatcgtcctcagtcccccgccgctctgcacctttacgcccaaggcggcgatcttttctatttccccgtcgatgcggctttcgccctcgaacgcgccgcaaagatccacgacgtgcaaaaagtccgcgcccgcgtcccgccagagtttcgcgcggtcgagcggcagaccgtaatcggtgacgagttctttttttccgtacaagagccgcaccgcgcggccgtttaaaatgtcgatggcgggaaacagcttcatgcctttactcctttgattttcaggaaattccttaaaagtttcagtcccgcttcgccgctcttttcgggatggaactgtacgccgtacacgttttttccgttccacaccgccgcggaaaagggaacgccgtaatcgcacgccgccgcggtattctctccgacgggcgcgtagtagctgtgcacaaaatagaactcgctgttttccccgattccctcaaagagcggagagcgcagggaataaacgccgttccagccgatttgcggcactttgcccgcggtaaatttaaccacgtcgcccgcgcagaagccgagtcctttatgctctccgtcctcgaaggaacggctcatcagaaactgcattccgaggcagatgccgaggacgggcgtatctgcggcgcggcgctttacgcaagcggcaagcccgctccgttccaaagcctccatgccctgtccgaaggagccgacgccgggcaaaatcagcctgtcgcacccgtccaatctcttttcgtcggacgtgacgacggcgttttcgccgagatattcgcacgccttttgcaccgaacgcagattccccgcgccgtaatcgagaatccccgtcattccagcactcccttggaggaagggatgcgggcggaggtgacggcgacggcttttttgaggcaccgcgccagcgctttgaacaccgcttccgcctcgtggtggcgattgccgcctttgagtattttcacgtaggcgttgacgccgccgcgataacaaaaagcgcggagaaattcctccaccagttccaaatcgaacgcgccgcatttgccgtcggaaaggtcggggcagtcgaagacgagataccctctcccgctcagatccacggcgacctgcgccgccgtttcgtccatcggcaccacgcagtcggcaaagcgctcgatgccctttctgtccccgagcgcctttttaaacgtttcgcccagcgcgatggcgacgtcctcgacggagtgatggtcgtccacttccgtatcgccgtggcagactacggacaaattgacgcccgagtgcaccgtcagaagttccagcatatgattgaggaagcccacgccgctgtccacggcgcccgtgcccgttccgtccagatcgagcgagagaaaaatctccgtttccgctgtcttcctgcgcgtttccgcttttcgctgcgacatattcccgtcctccttaaatttccgtaatttttaaatccgtccccgctgtccttttcgccaaacgaagatccccccgccttccaaagtccgcctttcggccgcgagagggcctatttcagacgcactctgacggcgttcgcgtgcgcgtgcagtccctcgctctccgcaagccgcacgatgtccgccccgtcctctttcaaggcttccggggaatagcggataacgctcatcttgcgcaggaaaatatcccgattgagcacttggaaaaagcgcgccgtgccgcccgtggggagaatgtggtcgggacccgcgaagtagtccccgacgggttcgggcgtacagccgcccagaaacaccgcgcccgcgttgtgaacgaggggcagaagggagtcggggtcctgcgtgtaaatttcgaggtgttcgggcgcgatcttgtccgcgatcgccgccgcctccttcatgtccttgaccaaaacgatgccgccgttcgtatcgagagaggtctgcgccgtcttttttctcggcagcaaagcgcattgtcttgcgacttccgcggcgaggatccccgcaaaaacgctgtcgtccgtcagaacgatagcgcgcgccctctcgtcgtgttccgcctgcgacagcatatccgccgccacgtattccacgtccgccgcgccgtccgcgatgatgagaatttcgctcggacccgccagcatatcgatgcccaccgccccgtacacttcctttttggcaagcgtcacgtaaatgttgcccggtcccgcgatgacgtccgttttcggcacgctttccgtcccgtaggcgaacgccgcgatcgcctgcgcgccgcccattttaaacaccgcttccgcgccgcactcctttgccgccacgagcgtcgcgggatggatctttccttccttcgcgggcgtcgccatatagatatgctccacccccgccgccttggcgggaagaatccccatgcagacggaggaaaacagaggcgccgtaccgccgggcacgtaaatgcccgcgcgttccacgggacggagtagataccccgtcgtcctgcccttttcgtcggtgcggacgtccccttccgtcgctccccgcatatgatagttcaaaatgcgctctttggcgcggcggatggattccaaaagcgcggggtctatcgccctgtacgcctcttcgaattctttttcgccgacgcggacggtttccgcggtcagaatcgtcttatcgaacttttcctcgcaggcaaacaacgccctgtcgccgttttttttcacgtcctcgacgatggtatgtaccgccgacgcgatcctctcgtcctcgaaaccgctgcgctttatcagttcgccgcaattttcgctcgtatatattttcataggattcctctttctctccttttcggcgccgcgcgggaaaaatgcgtgtccccgcatatgcggctctattccactgccgcccgcatcttttcgatcaagggcagaagcacgtccgcctttgtctttaagctgactttgttgacgaccagccgcgcggaaacgtcgaacacctcttcgagcaccgccaagccgttggcgcgcagcgtcgcccccgtctgcaccacgtcgaaaatgacgtcggaaagccccgtgacgggcgcgagttcgatggagccgttcaagggaatgatctccgcttcctccccccgttccgcgtacagcttgcgcgccgtgtgcacgtatttcgtcgccacccgaaggtggggattggtcagaagctcttttttttcgggatagcccgccacgcacagcttgcagggctcgaatttcaaatcgagcatctcgtacagatccttttcgtgttcgaggagggtgtccttgccgacgatgccgaaatccgcgatgccgtactcgacgtaggtaggcacgtcggagggcttgaccaaaaagaaggaaaaacggccgtccgcgctctccaatacgagctttctcgtatccgaaaagacgacggaagcgtccacgccgcacttttccaaaagttccgcgctctcctgcgcgagccgcccctttgccaaagccacggtgatcatacttctttcaccccctcttgatccgcggcgagaattttcgccgcccctttttctctcgcgtattccaccccttccccatagcctcccgcgtataaatcgacggtcttgcccgcggcggtgaggcgcagatattccttgtacgcctccgcctcgaagccctctttggcgagaatcaccgcatacggcgcgggcagtttttccacctttccgtgccgttcgagagccatcagaatgcgttttaagcccatggcaaagccgacggcgggaatgtgctttccgaaatcgtccgcgagataatcgtatcggccgccgcttaaaatcggcgcgcccagcgcccccgtcagccccgtgaagacgacgcccgaataataggacaggctcttgacggagccgaggtcgaacgaaacgtatttttcgcagccgaattcctttaaaagggcgttcacctttttgaggtgggagatggcggcgagcgcgacgagattttccgtcagtttttccgcccgcgcaaagacctcctccccgccgaacagggagggaagcgcctgaatcgcctccgccgcgcgccccgccacgcccgtttcctttaaaatcatcatcgtggaaacggaatccttggcgtttatggaagcgcggatgcgctcggtatccgtttctccgagtcccgcgcccgacaacagacctttaaaaaatccgacgtgtcccacgtcgagcgtaaaatccgtaagtcccgcttcctttaaacattcgacggcaaacgccagcgtctgcgcgtcggagaacgcgccctctacgccgagaaattccacgcccgcctgcaaaaatccgcgctgggaaatattccccgacgtttcaaaattattccacacctcgtccacataagcaagctttacgcagggcgttttcagctttgtggcggcgatgcgggacaccgccagcgtcatatcgggacgaagcaccaaaatgctgccgtcgccgtccgtcattttgaacattttattctgcgggatacggttgcgaatttccgcgaacgtatcgtaatattcgagcgcggaactctgcacgaaacggcagcccgctaaacggaatttctttttcagcttttccgaaagcagggaaaggttgtaatattcttcgggcagcagatcctgaacgcccgcaggtaatttatagtgattcataatttgctaaactccttttttattatactacaaatcccgcctttcgtcaatatttataaacgaaaaaaaggaggaaaaggaaatattctctttccgcccgccctcaaagcgccctttttccgcagttttatctctgtattttctttttctcgtcggtaatccccaaaaagtaagcggaagaaatccgaaatacgaggcaaatttttttcagagatagaaaactcggtttcgcgttccctttcagccatacatggacgctgctttttccgacccctacggtagccgcaaaagcttgcggcgacagctttcggtcctttaaaaagtccgctaaaatttctttaaattcccgtcccattattttacgcctcctaaaattcacattatgtgattttattatataatcacgttttgtgaatgtcaatcatttagggaaagatttattgattttattcacgaagcgtgatatatttttatagaggtaaaaaatggggaagttgaattattttgcagaaaattttatggatttgttaagggttaagggactgacacaagcggaaacagccgaaaaaataggagtgaaagccaataccttaaatcaatggatcaagggaaaaagagagcctgattttgatactctactgaaaatttgtttctgtcttgacgtcgatcccgctgaaatattaggctatcaaaaggcaaagagtattcttgaagatataaaaaggacgaaatagcttttttcgtatcgcttactcgtcgttcaaaaaacaaaggtcgaatttgaaaaatcaaattcgacctttttgattgcgcttttcttaataacacgcatttttgtttgtaaaatccctaatgcccctctattataaacgcggcgcttttattttatttttcggacgacgcgctctttttaattcaaaacgacgtcctttaagctgttgtattttttaagcgcggcttcccgcagcgcttccgtgtcgaaatgcccctcgaatgcctcgtccgacatctttttcgccgcgaaaatgacgttcgtgggatattgcagattgcggatctcgttgagcatttttcccgactgccgcgtaccgaaaaagtcgccgctgccgcgcatttccaaatccttttccgcgatcttgaatccgtccgtattgttctttaaagtcaagagcctctctttcgccgtttcgctctccgcgcccatcaacaggaaacagtagctcttttcgcgccctctgcccacccgtccgcgcaattgatgaagctgcgaaagcccgaaacgttcggcgttgtagatcaccatgatggtggcgttaggcacgtccacgcccacttcgataaccgtcgtggaaacgaggcagtcgtactgtttttctttgaacgcccgcatgatttccgctttttccctgtccttcattttgccgtgcagcagcgcgaagcggacgaagggaagccgcgctttcagctcctcgtacaattccttgacgctgatcagcgttccctcctcgtcgtcctcgtctattttggagcagacgaaataggcttgctttcccgcgcgcacttccctgccgatatagtccagcatatcgtcgtaacgcccttcggaaatgatgctcgtcgccacctcctgccgcgctttcggtttgtccgtaatcgtcgtgatgtccaggtcgccgtaaaagatcagagaaagggtcctcgggataggcgtcgcgctcatgaccagcatatccgcgccctcccccttttccgcgagagcgttcctctgcgccacgccgaaacgatgctgttcgtcgcagacgataaaagcgagatcggggatctccacgtccccttgcagcatggcgtgcgtgccgcagacgacgtctatctccccgcttttcagcttcgacttcatttcccgcttttccttcgcggtcattccgcccgcgagatagccgacggcatactcgggaaaatatcgctgcaaaatggcgtaattctgcgcggcgagcacttccgtcggggacagatacgccgctttgaatccgctcttcaaagccatgtagatgccgcagagcgccacggcagtctttccgctgcccacgtccccctgcaacagccggttcatgcgcgacggcgaatgtagattttcgaagatttcgttgacggcgcgcttctgtccgtccgtgaactcgaatccgaaccgctccgcgaattcctttacgtcgagcgcgctcgccgcatatctgtgaatccgaacgtcctccttgtcccccttgatgagtttaaaggcggaaatgagcacgaaatattcctccaaggcgatccgttccgccgccgcgtctttcgactccatatcgggcgggttatgaatatcgaaaaagcttttggcgagcggcggcagaccgtacttttccacgatctgtttcggaatgacgctgtctacgttcgtccgtttcaaggcctccctgacggcgtcgcggacgattttttgggagagggagcctttcagggaatagacgggcacgatccctttcagacgatagtttttatccagctgttcgaaagtgggattgacgagggagatctgtccgtatttgttctgcacccgtccgtagaaaagatattcgcccggtttgagtttgtcccgcacatacggctgattgaaccacacgacggtgaaaggcagtccgtcctgattgcagtacgccttgacggtctttaaacggctcatgtaattgatgggcgccacctgcacgatctcgcaggcgacgagcgccatgtcgttatgataggcggtgcgaagcgaggagcgcgctgtgagatccagataggcgcgaggataaaagcggacgagatcctccgcctcaaaaatgcccagtttattgaaatccttttcccgtttttcgctgatcaaacgaatcgacgtcagtttcatctacgccctccccgcatattcagtatacttcttccgcgcgttttttacgcgcccgccgcgccgtccctctctttcttatgaatttgaaacgggacgggcgaaaggaacgcccttttgtcttaaaaaatttcgtctaagccgtttttctccgcgtccgaacgcccactttcattcaaaaaacaaaaattttcatacaaaatcgctcgaacgcatgacgacggcaaagaaatcgatgatttttcccctcgccgttataaaattattcgaaagcctaaaacagaaaaagcgttgccggtctgcgcttttttccgagaaaccccgtcctgccatcgtcaaaatgacagagagaaaaatatgctctgcattttcgttttgaaaacgcgcgctacaatcctccggcgccataagaaaaaacatttgccctctgctcgctgccttataaacgcgcgtagaagctcttttgaaatataacatagaactatcggcgcgccttatttttcccaaattgacgtctgccaaatctttttagaatataaagcggaaaaaatacaggggctctttgctgtttccttagcaagagcgctataaaatcattcggaaagataagataaaaaaccgataaactccgccttcgcccgaggagcgccgccagggaattttcgcgattctcagacaaagaccttcccgccccgtattttcgctttgcaaacgccgcttgcagattcttcggaaagataaagcggaagaaacagctccgccgctcctcccgctttcgttacttttttcgtgcgccccgattctttaagcttcggaacggctatctatatacaggggacttccgtccccgattaaggagtttcctcctcattctctcatttattattctgcgaataaacccgatatttatacgtttattccagagaaattatataatagtaaaccggctgaccgccgctgtgataatccacgtcgcagtcgggatatttttccgcaatcgtttcgcaaagcgccgccgcctcgtcctctttcacgtcttcgccgtagtataaggtgatgacctgatggaattcctctttcatatgcgccagaagcttcaacaccgtttcttccgtcgaagcggactttgccagaatcttcttgtcgtcgaggccgataatatctccctgtttgatggaaaatccgttcatcgcggtgttgcgcaccgcataggtgacctgccccgccttcacgttgtccatggcatggatcatattcgtcttgttctcttccacgctcgcttcgggattgaattcgagcgccgccgagaagccctgcggcacgtttttggtgggaatgacgtgaatcgttctgttttccaccagtgccttcgcctgttccgccgccaggatgatattcttattgttcggaaagacgaaaatattttccgcattgatcttctgcgccgcggtggcgatatcgctcgccgagggattcatggtttgtcccccctcgatgacgcggtccacgaacagatccttgaaaatatccgcaagcccctgccccgcgcagatggcaagcattcccatctctttcttttccgcttcccgcttcgcgcgcagctggcggttctgttccagcatattctctatcttcggtctgtccagctcgccgagttccaaagcgtaggtgagcgccacgcccggcgtattcgtatgcacgtgcactttgaccatttccaaatcgccgatacaaatgacgctgtcgccgagattcatcagcctctcgcgcagccggtctatatccgcgagcgtcgtgctcttttttaaattgatgatgaaaaattccgtgcagtaagcgaattggatttctccgagatcgagattgacgatttccgaattgtccccgaagtccgcctgcggtttatcttccgcctgcgtttggatatccacgccgatatcctcgcccgtaagcgccgccaggaagcctcgaaaaatggtcatcagtcccacgccgccgctgtctacgacgcccgcttttttgaggacggggagaagttcgggagtcatggcgagcgccttgtcgccctccgcgatgacgtccgcgaaaaactcctcaaaatttttctttctcgacgcggctttgcccgcgtgttcgctcatcatgcggacgacggtgagaatggtgccttccttgggaacggatacggcgccgtaggcgaccttggtgcccgcttccatcgcctttgcaaaaatcttcgtgtcgaattcttttccgcattcgcggaccaccgaacagatcccccttaaaatctgcgagaggataacgccggaatttcccctcgcgccctttaaagcgcccttcgaaacgctgtcgcagatctccataaaggaattggaaggacaggcggaaagctctttcaccgccgactgcatcgtgagggacatattcgtgcccgtatccccgtcgggaacgggaaagacgttcagcgcgtccaccttcgctctgttattttcgagaagccgcgcaccgaacgtaatcatctttctgaattcggtgctatttatcgttttttgcattatccatgctcctttgatctaaaaaaataaagggggtattctgccgccgcgtgcggataagcgtatagaaaaaacggagaatcgaccgataaagcaatcggtctaaataaattttaagtaaaaacacatgggaaaaaatgcgagccgaaaacacggcgcgcatcgcttttacagttttaccccgatgacgtttacgttgactgtatccacgatcatccccgtgaatttttccactttatatttgatggattctttgagggattcggcgacggcgtttatggaaacgccgtatttgatgactacgtatacgtcgatataaattctgttcccggaggtcgtcactttgatacccctcccgccgacgtcctttttaaggagttcggcaaggctgtcggtaaaacggcgcgaaaccatttccacaatgccgtaaccttccattgcggtatgggaagccacctttgcgatggcgaggtccgatattgagattttgccgtaagcgttactcgtgttgacagacatagttattctccaagttctttcctattgtacaccatttccgcgcgtttggcaagcaaaatttttccttttgcaaatattttttaattttttgttttttgaggcgcgtttttaattgctttttcgcgcgaataatgctatattattaatgcttgctttcccggtgtaaacgaaggcgggcaaatttatacggtaatttatcccgatcggaggtgtcaatatgtcaagagtatgcagtatttgcggtaaggggcagctgagcggcaacaatgtcagccactccaagcgcagaacgagaaggaccttcaaggtaaacgtgcagaaggttgcctttgtgcaggacggtaaagagcagaaaggctacgtatgcgcaagatgcctgaaaaaagcggaacgcgcttaaagagtcctctttcggcgcggtattttccgtgccttcgacaacggaaataaagactgttccctccttttcgcggaacagtcttttttcgtattgtttattataaacgatattttttaatatcctattgacttttttaaat

SEQ ID NO: 2940 - DNA, 5084 bp, Unknown
  16S sequences of unknown bacteria
agctgcttgggaaaagaattttatagagcaattaaatatggcaaaaaagtttttaatagtgataatgtttcacttacagataaaaaaatacaagatgtagatgaagatatagagcaagaatatcagcagtgggcatctctctcaaatgcagaaagagcatttcacatatatagcctaatgctgggaaatgacgggaaaagctcactaaaagcaattgttgcgcagtgttttgcttcgatactcaagtggaatatatcagacatacccgaaaagataacaaaagagaagatgtttgatttggatttgtatcgataccaaatcaaagaggaaaagagaactcaactaaagcagaaaattgaagatgacccatatctaagctacttagctgaggcgataaaatatgcggtcagagcagagtaaagggtgtatgaactctatggtggaatggcagataacagattcagagatacaagatttggaacgcctgcttttaccaaaagattgtcattttgccgatgatgctttgcaggtcatccgttattggaattcagttgatgtatcggcttgcccaggaagtggaaaaacgacacttcttttggcgaaactcaaattacttgcagatcgaatgcctctgaatagtggcgcaggcgtctgtgttctatcacacaccaatgttgctgtaaacgagattaaagagaaacttgccgagtatgcagataagttaatgagttacccaaattttgtaggcacaattcaatcttttatagatcgattcgttactatgccgtatattcggcaaatagcagggcatccagtgcaacctgtggataatattacatatgcacagcatgtagtatcaagagtgaactgtggacgatactcgcaactcaattatgttattagaagaaactatgagtccagtggaaataaaatatatgccagccgagttgagcacgctgcggcactatacttacataatgataattccttatgcattcggagtcaaaaaaaaccattggcaggtgcaggtaagccctctgcggttcaatttataaatttgaaacaagaactgctcgaaaaagaaggtataatgacatattcagatgcttatcgatacgctaataaagctctcgaggaactttcggaacaatacatagaactttttaataaacgctttctgtatgtatttattgatgagtaccaagattgcgataatatgcaacgaaatgcgttaaatacactttttgatcccgcaaaatgtgtagtagtccatataggagatcctgaccaagctatatataaatctgaaaaagaaagtattaatgactggcaaccttgcgaaggatttctctccatcagtcattctaacagatataatcaaaaaattgctgatttcctaactccattacgtaaagacggaattggtattaaatccgctttggaaagagaagggttaagtccagttttaataatatttgatcatgaatcaattgaaaaggtacttgaaacgtttgtgactatccttgaagagcgagggctgcataatcccgatggaatttacaaagctattggttttgtcaaaagtgaagattccgctggaattaagattagttcttattgggaagaatttgatggagttacaagtcaaaatagtgaatataagtattggaaaatcgtacacgaaattttctctcagcttcgacaaggaaaattatacagagcagagcaattagtacgcaaattaatttgccgtctgtatcattatgccgggaaaaaggatgttaagagcggaaaagattatacattattaagtattagtgatatattgaaagaaagcagtaaaaacaaatacgcagaacatattttaagtttggcggaactaaataatttcactccagagtctgttgatgtagctatacgttccatcatcgatgacctttggaatacggaaaagcaagataatgaaagtgttttcgatattgttcctaagcattttatggaatcgatagaacctgatcagaaagtcaaagctgacaagaatgtgtttagcgatcctctccgtggcagacgaattcaatttgacacggttcatggcgtcaaaggcgaaactcatgacgcaacactttatcttgagactgagttgagcggaggctcagatattggaagagttctgtgccgttatggaataggaaaagcgggaaaaccagctatatttgattatagtagaaagattgtatacgttggtatgagcaggccgagcaagttactttgtttagcaataaagggtgagacctatgagaaaggtcaaaaagcatttgaagcatgggataagattgatattagaaattaaacaatcgttaccttaactcccttaatggtgctggacaagatttgtctcacatgctatacttccccctgcgagagttttactgttatgcattcatgaattggggatgctgggtgcaaaagtgagaataaaaaatttattttttcagtctcactgcattacgactgtgtaaggggcaggcatctaaagtgtccaccccttacaaaaaagtaccgtattctttcagaatacggtacttttctttgtttttcattcctttgcagcaatcgatccactcgtacccttttgcgaccttatcccacagatcaccatatcatttttgccatgactatactgaattgcgtccacatcagcgccaccagctgctgcagggtatagatgttcttttcggtaaaatctctgccttttttcgggcaagccaatcgcagcaaacaaatgaggacgccctgccgcaccaggcacaacattaccaccagcagatattctgcttttttgatagcgctgcaaacacggcttcgttcccatggagcctccaagcgtttggaaaacgatcggacgcttcacccattttcatctttaagggcacaatggcgtttatctactgccaaaaaacaaaaaacattgcgctgcaacgtttttcgctgcaaaagaattttttagtctcgtttgacaattcactttttcatcggactgtgttatactacagataaaatccgccggggatatgagctctccgcggacattaaccgataaggaaggatcgatccatggcatattgtcgtttttgcggcgcgcttttggccgagggggcgcgcttttgtcatctttgcggcaaggaaatagccactgcccaccactgcccgcagtgcggcgcgctcctgcccgaagagagccgtttctgcagcgcctgcggcgcagccgtcgccggcgctgctccggctgcatcaggtacgccgcagcaccaccagggtcggccgcccgaaattcccctgggccggggccgcaccatcactctccccgcacctcaagtggcaccggctcctccaccgtctccagtgccgccgccggacagcgcccccctcgcaggggtatgcgtgcctgctgtgcagaatacgggagatttcaccggctccgtgcagcgctttttcggcgcagacggcagctgttacacattccaaggcgccggaatgtacggctttctggaaccgttttccatgaattacaccggcgggcagggccccatcgtcaaaaacggcggaacgtggttctatcgcgccggcggacagagcgtcgaggtgccggccctgcagggtgcgcagatcctcacctctgctcccgagggcatgtatgtatacatcgcccccaccatctattttgtctcccccgacggcgctatgcgtccctttatggacgccgccgaaacgctgaccgacatggtatgttatcagaactggctgtttgtcacctatctggggccttttgaggaagtcccgcagaccaacggcagcaccatgtgctgcgaccgttcttatgtgattgtatacgaccgcgccagcggcgacgtggccgctctgctggagcgctgcgccggcgtatattatatcgaccagcacgtcatactcctgtgcgatttgctggacagcggcgagatctgccggaatgtctacaaaatccccatccatggctggaccgaaaatggtttcaaaaccctttccaactatgtgggccgtattcgcggcagccttcccttctcacggctgctcctggacagctgcggcaatcggagcaattggaaaagtccctcggaatgcacggccaacctgcgccagtgcgactgggccaacaagcgtctggcctatcagcataaagacgcgctgctctggcgtgacttcacaggcagcccactgtaaaaacagcagaaaacgcctcgcggctttgatgggaccgcgaggcattttcattgctatacgacgatttccacccggcttccgccggagccgtcttttttcacgatgacctgccgttcaatacgttctttcagttccgccacatgagagattacccctaccagacgatttcccgcagaaagatctcccagcgccctgagcgcctgctgaagcgattcctcgtccagcgagccgaacccttcatccacaaacatggcgtccagctgtatgcccccggcgctggactggatctcatcggacagtcccaacgccagcgccagcgccgccttaaaggattctccgcccgaaagggttttcacactgcgctccgagccgttgtaatgatcgatcacatccagttccaggccgctctggctgcgctgattgtccgcagtgcggcggcgtttgagttcatactgcccgccgctcatcaccatcaggcgcagattgctgcgccgtaatacccggtcaaaacaggccgactgcacataggtttccagcatgatcttttcctttccggaaagtgtgccgttcgcagtgtccgacaaggccttcacccaactccactcccgctccgctttggccagcgcgccagtctggccagccagcgcatcccgcacagagcgatcagccaggaggcatgccgccgtatgctcccgctcctcccgcagctccctttgccgcgcctgcagagcagcctgctccgcttccagcgcttttcgttccggcgccggggtttcccgcagctgtgtttccagagtacgcgcacgagtttcgtgttcctccagttc

SEQ ID NO: 2941 - DNA, 32759 bp, Unknown
  16S sequences of unknown bacteria
atgagatatgccgagagcacggtttgtccgttcttgaaaacagtaacttctacggcgggcacaaaaaggattattggcggcacaagtccgacaagaaaacacatcgggactatctccgtgaagatgtagaatactgtctgtcttttgcaacctctccgagagaatttgagaaccagttatatgcactcggttatacgcttgaccccgtgcggttttccgtgaaagcaaaacactgggagcgctccgttaggcttgcaaatatcggttttacaaaagaaatcgtgcaggcgcagttagacaaaaacgccgaaagcagatatcacctattcactttggaatacagacctccttacagacctaaaaagtttccgctggaggatgaaatgcgaaagcttgagatttctatcgaccacagctatgatgcggcgacggttttagtggatgctctcttttatttggttataacgattatccaaatcgccgccgagcttgccgatgtaatgctgttgtcgcctgatttaagagtggtggaaaaggatttgaaagaccttatttcagattatcatttccttaaagaaaatgacattcacaccgtagacgatttgcaagcaaacatcaacgaaagcaaagcgcagttatccgatttggagcgtgagcgcaaaacgcttagcaaccgtatccgccgtccgaaatcgccggaggatgaaaatagaaataaagagtgccgcaaagaaatttccaaacaaatgaagcctgttcgcgaaaggctccgtcgtgcggagaagattttggagaagtctccgcatttgtatgaattattaaaacaagaacgcgagcttgagagaaaagcccgtgcaagatatttagataggagtagatgaaaatgaaaaatactatgaaaaaaccagttaatattccggtagaaaaacttcgcccgtttgcgggacatccgttcaaggtaaaggacgatgaggaaatgaataccttgatcgaaagcgtacagacgcaaggaattctttcgccgctgattgtccgaccgattgaaaacacagatgaatatgaggtgataagtggacaccgccgcttacacgccgcagttaaggcagggatcacggaagtccctgccttaatttatgctcttgaccgtgactctgctgctattgcggtagtggacagcaacctacacagagagcatatcctacccagcgaaaaggcgtttgcctacaagctaaaaatggaggcgctatcacatcagggcaaacggacggatttaacttcgacacaacctgtggcgaagttacgcacgggagatattattggggaaacattaaacgaaagccgtgaaacagtacgccgtttcattagcctgacccaccttattcctgaactacttgatctgatggacgagggcaaaattgcgcttatggtcggcgaggctttgtcttatctcggcgacgaagaacaatacgccgtgttagaggaatgtgaaatgaacgattgcacaccgtcttatgcgcaagccgttgaaatgaaaaagcggtttcaggatagacaactctcggcttacgacatcggcgaaatcctgtcccgtgaaaaagcaaatcaaaaggaaacaatcaaaattccctcagcacggttagcgggtaaaattccaagcggctacacgctacagcagaaagaagattttattgttaaagctgtagattactacaacaaatatcgcgctcgtcagcatgaccgggattcaagataagggggagttcataatgaataaaagaacaaactggatcgttggcatttccgacggcaaaactcacgaatataaaatcggcaatgtgacctttacggtgttttctgaatttgaaccgatgaaatcggaaaacacgattaagagtcgtttcgagaaaagtatcacaagcgatttcacagatttgaccggtgaaatatttgaagatacaatggcagagaaatatgtgtgttcggctgccgggaaggaggactaaatgcagtcgagaaagaaaattgaacaaacagggatcacggcgctttactgccgcctgtctcgtgacgatggaggagacggcgacagcaattccattgtcaaccagcgcaaaatgctcacaaagtacgctaaagaaaacggattttcaaacacccggttttatgtggacgacggtatcaccggaacacggtttgaccgtcccggttttcagtcaatgcttgacgatatagagatgggctatgtgtcaactgtaatcgtcaaagatttgtctcgtcttgggcgtgactatgtcaccgtcgggcagtatacggatatttattttcccgaccataatgttcgtttcattgctatcaacgacttagtggacagcgacgagggtgaaaacgaaatagcaccgtttaagaatgttatgaacgagatgtacgcccgtgatatcagccgaaaggtgcgttctgctcatcgtatccgagggacttcaggcgaaccgctatctcagccgccgtatgggtatatgaaatctcctgaaaacaaaaagaaatggattattgactcggaggcagcagccgttgtaaaggatatttttaaaatgaccttagagggcaagggtgccgaaacgatcgcccgaatcctacaggaacgcaaggtgcttgtgcctatggcgtattggcagagcaagggacttccgaggggcggtaagaaaacacagccgaatccgtacaagtggtgcaaaactacggtttcaaaaatcctcgctcagcaggaatactgcggggatattatcaacttcaaaacctgctctaaatccttcaagaacaaaacacggtatgctaatcccgaggataaatgggcgattttcaaaaatgttcacgagccgattattgaccgtgaaacctttgaacaggtacagaagtttataggcaaaacccgccgccgcaatcccaaaccggaaaactgggagcgcaatatgttctgcgatttgctctactgcgccgattgcgggaaaaagctgtggtttaatattaagcacgacaaagaggatattccgttctttatgtgcggcaattatcacggcaaccgcggaacctgttcctcaacgcattatctgagagcagacgctattgaacaggtggtaatgctggaactgcggcgcttatccaagtgcctgtgcgatgatgaggaaagctttgctgctctgcttgcaagcaagaccaatgcggatattctcaaagagaaaaaacacattgagggtgaactgcaaaagtgtattgttcgcagtgagcaggtgtctgagctgtgtatgaagtgctacgaggataatgtttcgggcaaactgagcgatgagatgtttatgcgattttctcaaaagtacgaagccgaacggttagaactgaaagagaaaatcggggaataccgcaaacgcttggcagaggtcgaggaaatgcagcttggaaaggaaaggttcattgccgctgttcggaaatttatgcagatggataggctcacagctccgctcttacaggagcttattgaccgcattgatgtatacgaattaacgggcaccggcaaaaaccgcaaacaacagataaagattcactacaagtttgtgggatatctggaactgccgagtcttgcaagacagcacaattaccgcgaagaaacccgcaagggtgttgccgttgaatatgttccgaatgcgttaccggcataacaaaaagagcaggttaatccctgctcatacatacaagaagatgcaaaatgtaggcaaaaagaaatcgagtgtcctcatccaactctcaggttggttaagaacactcgatatggtcggagtgacgggattcgaacccacgacctcttggtcccgaaccaagcacgctaccatctgcgctacaccccgaagtgctcaatcattatatcatttttgagagtgtttgtcaagtgccaaatatgataatttgttgaagtttgaaacaattcatattcggtcatttttatatcccgagttttacgtttttaacagtaacccgacggtaaaccgtcgggttactgttagttctgtcagtttgggacaataacaccctttttcagtatcagattcgcatacagcgcggtctcgcccgtcgcgattaccgcatacgccttttctgcgcggtcgtagaaggcaaatctttcgatatgtcctattctgaccttatcgccctcggaatcgttcattatgcgggaatattcgtcccagataggagtttcgacgttatccccgggaacgacttccatcaacatcgcgttcgggtctgaatatgtatcgagcggaaacacggtcataactgctttcagaacgtcagtacccgtatgagcatcgagtctgactacccttttcccgatagcctcggacggaaaatttccgtccgcaagcactatctcgtctccgtgtcccatctcgctgagaattttaagcaattcgggtgttaaaagcggtgataagcctttcagcatcggtcggtcctcccctggttatctgtataaaggaccgtactgtttgcacgctgcgtagtccgccgcctgactgtcatccgttccgaacgccgcccacgaatgcggacgataaatctgttcttcgggaacgttgtgcatattaacggggatacgaagcatggaagcaagagtgataaggtctgcaccgacgtgaccgtaaaccgttacgccgtggttagcgccccagtttgccattacgctgtaaacgtcggtgaatgcgcccttgcctgtaagtctcggacagaaccatgtcgtcggccaagtcgggtccgttctcttgtcgatgacgttgtgtatttcatcgggaaggccggaggtgtagccttccgcaatctgcaatacaggtccgatgccttcaataatattgaaacgaagcatcgttacgggcatttccgctttgcaacggaagtggcttgagaatccgccgccgcggaagtattcatagtctgctcggcaccaatcggttgcttcaagacaagccgaaacgtctttgtctgtcatctcccagaaaggtttcatgcagtttttgccgttttcgtctctcgaagcgccgcttccgtcaagcgcggtcgcaccggagtttataagatggataaatccgttagccgcaacgccgtcgggtctgtgtcccgttacgcgctcgcaagcttcgggactccaatatgtgcgaacgtcgtggaagcacggcgcagagtggctgacaagtgttccgagcatcattgcgataccgttgcaagtgtcgttttcggttgcaaacggcgtgggggcttttcttccgttccagtcgaacgtggaagccataatagcctcggtaaagtccgcattcggaagccagtccgtccactgtctctgtccctggaagccgcccgcaacagcatttctgccgagcgcttcttcgtgccagccgagatcgtcgagtttggtgtttccgtaaaggatatcgcgcatgattatcgtcatcttaacgataaattcccaatccttgtctgcgggaacgactttcgattttgtaataacatcggggaatgttttcggagcgtttttatcaaagccctctttgcagttcgcttttacccaagcaagcgccttttcatattcttctttatcgtaaatgccaacgcttattctgcggaggatttcaacttcgtcaacccattcagctctgataccgaagtatttttgaagaactgatgcatcgcagaaactgcctgcaatacccatcgcaacagcaccgacattgacataagctttattcttcatccagccgacaacaaccgcacatcttgcaaagcggagaatcttttccgcaacgtctgcgggaacggaggtgtcatctttgtcctgtacatcgtgcccgtatatggagaatgcggggagtccgcgctgtgcgtgagccgcaagaactgccgcaagataaacggcaccgggtctttcggttccgttgaagccccaaaccgcctttatcgtgttcgggtccatatcaaacgtttccgtgccgtagcaccagcaaggcgttaccgtaagcgtggcaacaacattttccgtcgcaaactggtctgcaacgcgagccgcttccgcgccgccgcctatcgttgtgcaaccgacaacacactgaaccggagttccgtcaggataacggagtgtgtcagatatgagttttgcggcgctttccgccattgccatggtttgtttctcgagactttcgcgaacacctccccaacgaccgtcaatcgcggggcgtatacctatcttgggatataacataataatcacctttcatgcttcaagttttaaggacatcagatttttgattctgaaaaagagcagaacctgccacaccacacgaaagtgtgcgtgtggcaggttcgacctatttgccaactgttgttttttcgggagcaattatccttcgtaaacgagattgttctttatcatttcgtcaacgttggaagcatcccaccaagcgcctgcgatatcaacttttgcggtaacggttttgccttctgccgcaaagattgcctgttcaacagcctggtaaccgatctgataggagtcctgagcaaccgcgccgataagcttcggaccggtcgtcttcttcatccattcgatctgtttggagcctgcgtcaaatccgcagaatacgatgttgtcgtatttggttcctgctgcgccgattgcgtcgtaaacctgcttaacaacgccttcgttgctcatgaatattgcttttacgttcttttcgaaaagtgcttcaagagctgccttgtaagcctgatccgcatcgccgggtttaacttctttttcgatggtgtacttgcctgcggttgtggaatccgcgtcagcgagagccttgaatttctcttcgaatccgcccgcgcggtcaataccggtctgggtttcgtcgtgctgaatgatacctacaacataagtgtcggtggaagcagcgatgtcagctttgatagcttcgaagaatttctctgccgcaaggcccgcagcaagtctgttgctcgttgcaacggaggaaactattgggttctgttttgcggaatcaagagactcaatgtcttttgcccagatgccgctgtcaaactgaacaacggggattttctgagtgaatgcgtgtttgaggctgtcaacgaatccttcgcctatcgttccgagaacgagacctgcgggattgttgttaagagcggtacttaccatttccatctgagacggaaggtcttttgcagactcacttgcggggccctggaaagtaacttcgtaaccgtactttttgcctgcgtctacggcgccggctttaaccgactgccaaaatgcgtgggattcgccttttgcaacaacggcaatggtcttgttaacggttgtttttccgtcacctttggtcgtgttgcttgtgtcgccgccgcagcctgcgaggagagcaacagtcaacgccaatacgcaaagaagcggtaaaaacgtttttctgaactttttcatgagaatgtcctccttgaaatttgaccctttcgggtattgttaatatatttatgctttttgctgtttaattttatcaagttcgagtttatactcgacttttgccgtctctatctgtttgcggatttctgcggactgtgcggttctttcggtttcgggaagagccttgttcgaaagaacttcgtcaagtctgtattcgagatgatctttgttttcgatatagtttcttttaagtttctgtgcgggagtgagaaccttgacttttgctgctctcttgttctttatgatgtccataagaactgcgattacaacgatgataccggtaagaacgtatgtgacgtatgttgcgtttacgttaacatggaacttcgcaagaacgaagttaagtccgcttctgattacgacgagcattatgctgccgattacagaacctgaaacggatgctacgccgcctgccgcgcttgtgccgccgatgtatacgcctgcgattgcgtcaagttcgtatccgttaccggtagctgccgcaacggtggtgaacgatgcagaccagaagattgccgcgataccagcgccgataccgccgatgatgtatgcaagcatcttgtatttgtcggtgttgataccggaaagtcttgttgcctcttcgttactgcctatcgaaagaatgtatctgccgactttgttcttgtacatcaggtacatacagataaacatgaatcccactatccagataagacctaccgggaaagatttgtagttggagaatacttcattgaaccagctgcccgtgggatagaagatgttcggaaccgcaactatgatagcactcaaacctcttgaaagcatcattgtgccgagcgttgcgatgaacgcggggattttcagttttgcgacaaggaatccgtttataagcccgaacagcgcgccgatgagaatcattacgggaatcgttgcccaaagcggaattatctgttttgtgaaaaggtgtcctgcaacaaccgaggatgcgatacacacggtgcctatcgaaaggtctatgccgcccgttgcaattacgaatgtaacaccaagcgccaaaatagcataaggtgcaaggctctgcgccatacttacgatattgtatctgttaaggaaatttgggttaagcaggtagaatacgaagatgagcacaaaaagtgctatcaagattatcatattctgcataccttttgtttttatgtttctgccgaagtttattaccgatctgcgcattctgcgtgatgcggagatttttacgttttcgttatccatttatataacctcccgtgatcttggtggtttgtttattttatctgcttaattccgcatcgttgcgtatttcattatctcttcctgtgtgagaccgtcgtctatgctcaaatctgctgttactctgccctcacacataacgataactctgtcggaaagtctctgaatttcggaaagttccgaggaaatcattattatggattttccctgtgcggcaagttcttccatcaaatcgtacatttcgctctttgcgccgacatcgatacctcttgtcggttcgtcaaagatgaatatgtccgaatttttaagaagccagcgcgccacgataactttctgttggttacctcctgaaaggtttttcagaagttgatccattgacggtgtttttgttctcaattttttgttgacttcttccgccgctttctttgcttttgcatcgtttatccaaccgaatttgatgtaatcgtcaagcgatgcaagcaccgagttctccgcaacggattttataagaagcaaaccgtattgttttctgtcttccgaaagatagcagataccgtgttttaccgcagattcgggagttcttatcttaacctttttaccattgatgaaaacttcacccgaatcaaattcgtcagcaccgtaaatagctctcgcaagttccgtgcgtcccgcgcccatcagtcccgcaaatccgagaatctcgcctttacggagtttgaaacttacgttttttaccatattgccgctattcatgtttttaacttcaagaacggtcggtgcgtcattcggcacattgctctttgttttcgggtcggtgtaaacaactctgccgaccatcatttttactatctcatctttggtcgtgtcttttgtttgaagagttccgacgtactcgccgtctctcataaccgttaccctgtcggaaattctgtttatctcatccattcggtgagagatgtatatcattccgatgcccttgtcgcgcagatcattcattattctgaacaactcttcaacttcgggctgcgtgagtgccgccgtcggctcgtcaagaatgagcagtttcgaatcatgggaaattgcctttgcaatttcgaccatctgctgttttcctacggtcagtgttccgagttttaccgaggggttgatgtgtattccgatttttttgaaaaggtttcttgcatcctgttccatcttgcggtcatcaatgtaaacgcccgcttttttcggttcgcgtccgatgtaaatgttctgtgcgaccgtcagatggttcatcatgttgagttcttggtgtatgatgctgattcctgccgcctgcgattccgcgatgtttgcgaaattgaccggcttgccgaaatattctatctcaccggcgtctcttgaatgtataccgcacaggactttcatcaaagtggattttcccgcgccgttctcacccataagagcgtgaacttctccggaacgcagttcaaagtcaacatgctttaatgcgtgtacacccgagaaccgcttatctattccggtcatcttcaagataatgtcacccatactatgtcactctctttccggtatcattatcaacagttttgttcctctgttcgattacattctatcagttttgcacaaaatgcgcaagacatttaattgtcatatttgcaccgcaagaaaatcctatttttaccgttgacttttgcttaaactattgatataataaatataaatagagaaaaagcgattattacttgaattttaaagtacaaaaacaatgacggtttattgacacggagggcagtttttatggaagtcatgcacagatataacagcgaagaacgacagcattttttgttggaaaagcactattcgttcaaattaaaaccacgccttttatatgtgggacttcttgacaaacacggcgggtggcgcgaagttccgcatgaccataagtttttggagataatatttgtaaccgacggcaagggtacggttgcgatcgaagataaagtctttgaagtcaaacgcggggacttgcttatatacaacgccgatgttatgcactttgagaaaagcaatgagactgacccgatggaaatactttttgttgcttatgacaaattggaaatcacagatttacccccgaactggttacttccgccctcatacggatatgtttttcctacgggagatatgtacgacatattctaccgttatttttcgacgcttgttaacgagttcgacaaaaaagaacgtttctatatggagatagcgcaaaatatttcaagaacgcttctgatgtacatattcaggcttataaacaagacggaaaatgcaggagaattactcgcttcgggaaagactatggagattgccctgaaatttatcgacgaaaatttccgtaatgaaataacgcttgacaccatcgcggaagcctgttttacaaataaatattatctttcgcaccttttcacgcgggcacagggcgtcagtgtcgggaaatatatattggacaagcgcataaaagaggcaaagcgacaacttgaaaataaagatttgacggttgctcagattgctgcagatgtgggattcaatgactcgagttatttctgtcgcgttttcaaaaaggaaacgggactcactccccttgcatatcggaaaagagcggtagtataatatgtttattgcacattgttcaatctttaaccgttgactttcggttatgtttcctttataatcagtaatgctcatcggagggcaataaccgtaaatgttatagccggataagatgtcgggaatacccggtattttatccggctttataatacggaaaaggagaagaaaatggaaatcaaactttccgatcattttacttataaaaaactgctcagatttgttcttccgtcaatcgtaatgatggtctttacttctatttactgtgttgttgacggactgttcgtttcgaatttcgtaggaaaaacgccttttgcggcgataaatttgattatgccgtttgttatgatattcggcggcgtaggatttatgttcggtacgggcggaagcgcacttgtatcaaaaacgctcggtgaaaaacgtcccgaaaaggcgaagcagtactttacgatgatgctgcttgttactcttattgtcggcattatcatctctgttatcggcattatatttatgccgcagattgcagaccttctcggagcggagggcagcgagatgaaaaatgattgcgttgtttacggcagaatagttatcggcttcaataccgcattcatgcttcaaaacgtttttcagagtttctttgtaacggcggaaaaaccgaaactcggtcttgccgtgacggttgccgcaggtgttacaaatatgattctcgacgccgttttcatggttcctctcaatatgggcgttgcgggtgcggcgattgcgacgggtatcagccaatgcgtgggcggtatcattcctttgatatatttcctgcgtcccaattcaagccttttacaaatcacgaagaccaaaattgaaatcaaacccgtattgcgcgcttgcggaaacggagcttcggaacttgttacgacagttacttcttccgttgtcggaatgctttacaatttccgactgcttgaatattctggcgaaaacggcgttgcgacttacggagtactgatgtatgtcgagttcatcttcatcgcaatttttatcggatattccgtcggctgtgctccgataataggctatcattacggtgcgggcaacaattcggaattgaacaatatgctgaaaaagagtctgaaactgatttttggctgcggtgtaggcatggtcgttctcggacaactgcttgcaattccgcttgcgcatttatttgtaggctatgacaaggttttatatgaagaaacagtaaatgctttcagaatatttgcgctgacattccttttctccgggttcaatatttttgcgtcgtcctttttcacggcactcagcgacggcggcgtttccgcaaccatttcttttctccgaacattcctgttcaaatgtaccgcggtaatcgtgcttcccattatattcggaataaacggcatatggtgggcaacggtcgttgcggaagtccttgcaatagttctttcagctgtatttctcatcgtcaagcggaaaaagtacggttacgcataggctggtacgataatacaatgccaatataaaactcaaagacggctcgcaaaaacgagccgtcttgtatttttgatagtttaattgaattttttcgcagaaacaagcatatctttcgctgttgcgacagccgaggaagcaatatccccgccgagcagtcgcgcaagttcttctattctgcctttttcattaagttcggtaacagtagtaaaggttctttgaccgtcgtcctttttctcaattttaagatgttcatctgcataagccgcgatctgcgcaaggtgcgtaacagtaatgacctgcgccgtttttgacatctgtttcatcttttgtgcgatacgcacggaagctttgccgctgacgccggtatctatttcgtcgaatatcagcgtttcgttttgcgcggaagacgacagtatttttctcaatgccaacataatgcggctcaactcaccacccgaagcaactgccgaaagcggcttgacattttcaccgacgttcgtgcttatcaaaaattcaacgtcgtctgctccgtcaaaagaatatttctttttgtcggttctgacctgcatttgaactttcggcatttcaagctcggaaagttcttttgttacttccctgcttatttcttccgccgctttctttctcgaatcggtcaatactttcgcctttgcaacaagttcatcatgtgcttttgcaagttctgcgtcaagttttaatattgcctcgtcggagtattcaatttgtgcaagttttgctttcgcgtcggcaagatatgagtttatctcccctattgttctgccgtattttcttttaagcgaatttataacgccgagacggtcttcgatttcgtcgagttctctcgggttaaagtcaaatctgtccgcaagcattcttacgtcgtccgcaagcgaatctatttctgccaaaacattctccgaacgcgaagcaaaatcttcaagttcatcggaaaactcggagatagattcgaggtttgtcaccgcttgcgaaaacatttcggaaacattatattctccgtccgaaagaatcgttcttgcagcagaaaggccctctattatcttctctgcgcccaaaagaaccttttttctgtccgcaaggtcttcgtcctcgccttcaacaggttcagccgcttcaatctcgtttatctgatatgtcagcgtgtctaccctgcgcgctttttcatcgtcgtcaagcgtaagtttgtctatttctttttttatcgagcgaaaatttctgtatgcggttctgtattcgtttatttcgctactgttttttgcatacgcgtcaagaaaagacagatgcgttgacgtatcaagcaacgttccgttatcctgctgaccgtgtatcgttatcagtctttttccgaactccttcaatacggatgcgggaacaggtctcgaatttactcttgcaacgctcttgccctcaaccgagagttctctcgaaagaaaaatgcttccgttgccctcgtctggaacaccgtattccgaaaacagtttttcaagccccgcaacatcatcaaactccgcgctgacaaatgcttttgaacagcctgtccgcacaagatcttttgacgctctgttgccgagcagaatattgatgctgtctatcaatatggattttcccgcacctgtctcgcccgtcaatgcgataaaaccattgcggaaatcaatatcggcgatttcaataacggcgatattttctatatgcaatcgtgaaatcattgacttatcagcccgctgttatcgcatttatttccgatacgatatcaagcgccctgtcgttgtccgtggcaacaagaaaaatggtatcgtcgcccgcaagagaaccgacaatgtttgttctgtcaagagcgtctatcgaagcgcagacagcctgtgccataccggtatagcatttaacaacaacgatgttctgtgccacgcgaacgttcataataccctcacgcatgaccgcctgagattttgcactcaaaacgcttccgcccgaaacggctttatcacgctgctcatatctgtaaacgttgtcttttgtaagaattttgaccaggtgcagttctttaatatctctggaaacggtcgcctgcgttgccttgaatcccgcagcgttcagaaaaagtgtcaattcgtcctgtgtttcaatattgttatcgttgatgatttccaaaatctttgcgtgtcgtctgcttttcagtttcatattctttaccccaacttcctgttaagtatttcgtaaaatgacatatctttcaatcttatgatttttgttgtcttttttgagcgttcgacctgaacaatatcgccgtcggcaagcctgaaattctcatatccgtctgctgtcagatacggttcgccgttaaacacggaaacttccgcgaacaattttgttcccgcatcgaaaagtatcggtctgctgtgcaatgaatgtgcgcatatcggagtttgaattatagcgtgcattttcgggtctaccgcaggtccacccgccgatattgaatatcccgtagagccagtcggtgttgaaaagacaattccgtccgcggaatactcgcttataaacccgacatcggaatccactttgattcccacggttcggctgacggcgccgtgacttataacaacatcattcaaagccgaacaggaaaaacaaacctttccgtttcttacgaccttgcaatcaagcatcattcgttcgtcaaccgtatatttaccatcgacaagtctgttcagaagagttacttccacgggttcgacttccgcaaggaatccgacttttcccatattcacaccgagaatgggtttctcttcttcggacgctttttttgcggcgcgcaaaatcgttccgtctcctccgacactcaaaacgatgtcgcaagtctcgattccctccgcggtttcacgaaagttaaccgattgaaaggcatcagcaacagacggtacatccgaactcacttcgacaccgaggtcgagcagttcccgtactatggcttcggtgacagaacggtctttgtccttttgcgtgtttgttactatatgaactttcaagcgatcaccgcccttttaacgtttcgtgtgcttttcgtaccgttgtttttatatctgttgttgttttcaacgcactgttttttgtaagatacaaaagaaattcgatattgccttcgccgccttttatcggggaaaaatcaaatcccgaaacagtcagcccgagactttctgcgtagtcaagaatatccgaaacgacctcaacgtgtgtcttttcgtcggatacgactccgtttttgagtcttttctttccgacctcaaactgaggctttacaaggcatattatttgcccgtattcatcaataaagttcgatatatggaaaagtatcttttttatcgaaacaaacgaaacatcggaaacaacaatatccgttttatcaatgttttcgggagaaatatcaaggatattgcgtccctcgaaatttacaactcggtcgttgcttgtcaactttgggtcgagttgtccgtgccccacatcgacggcgtatactttttttgcaccgttttggagtgcacagtccgtaaaaccacccgtggaagccccaacgtcaagcactgttttatcaaaaaagttcaacctgaacgattcgattgcttttttaagtttaagcccgcctttacctacgaaaccgatactgtctcttatttctacaccgtctttttcggaaacatcgtatgacggtttttctataaccgttccgttgacggaaacatctccgtttttaatataatatcgggctttttcgcggctgcaaaacctcatttccgaggaaataaaaatatcaagacgcattatttcttctttttcttacttttttcctcgccgaagacgcttaaaagtcttgcgaaaaagaaaattatgtcattcgcttttttcattgcgaagtttttgccgaaagatttacctgcgactgttatcgcagatgtcaatgcagttacaacgactgcggatataagtttgctgaaattgaaagtatctgcaagccctattgctataacactgccgacggaaccgctcaatacgcttgaaatatcgcccattacgtcgttgcagaagttagcgacggtatctgcactctgcacccatttaagcgctttttttgcgcctttaacctgtcttgtgcacattgagttcaggctcttgggatcggcggacatgacagccgttcctattatatcaaaaagaatacctatgaaaacaaaaacgcaaagaatgataaatgcgacccataccggaagttcttccgaaaccgattcggaaaaaagcgaaagtccaatcgatatcgaaaaagttaaaagaaatattcttgccgtccatttccaattgaaaagactttcttttttctgctttttttgttcctgcggctgggcgtctttattttttttgtcctcgttttcctctgattcggacttgttacttcggtctatatccgaagagacatcttctttcattttgtttctcctgtaattattcgagtgttatttaatcaaaaaaatatacgatgataacgcccaaagttaatcttatgtcttaggtcaagtaggtttccccatgttctacccgctgtcgccatacgggcggtttccctttaaagcccacgaaaaccgcatcactgcgattttaacttgatcgccactcagtacatactgcaatcctttgagcgtatacggtctaggagatttcctcaacggtttaagtcaacgcttagtctcttttgcaagaacggtttcaatccgcaataaagcaagtctgctgccgcagtttgcttctgatcgaacattcaccgcacccactcaagacaggctacggctgcacacagcgtaatccccatttcaaaaaaatgtttttgcaaagttccttcggaacaggcgttacaccgccttgcaggttttatcccgagtcgtaccacgcaataaggcacaagttcgggtctccacggcaaacggaacaggatcgtatgccattacggttgcccgtaagccataggacgctctcgcgtcccccatccagcacccaccccagactgggcgtaagaagcaagcaccagaagtttcacagatatgcccttcggtggatttttagccccaccctggtcgttgcaaaaaccgactagaataccgcatcatcgtagaacacattatagcacatattttattcgttttcaatacctttttggaatattttttgcataaacgcattttttgcacataaaacgttgacaaaaaatgtcttttgatgtataattttgtcacagattttgaaacgaaccgatattcagaaaaaaggagatgtatgaaatgaagaaattcatttcaacgctgtcagttatacttgtttttacggtatttttatgcgcttgtgtacccgaatcgaaaaatgaaataacgaaattggattttgcagagaaatattcggattttgaattggaggcaggtgaaatatcggaagagctttgtctgtttgtgacggcgaaaggcaaatttgatgaagcaacaattatcgcaaactccgataatccagctgttgcgaccgttgtcgaaaagacttatgacggctcggacacttttaaattcagaatcgaagcaatcggaacaggcactgcgcatatttggtttgaaactgccgataaaagtgttaaaacacccgaaatcaaaattaaagtaacggaacggaagaccgcaacaacaaacgcgcccgagacagagttttcaacaacagaaagcacaacggaaagcgtagttatacagaccgaaaacgaaacgtctccgacagatatgaccgtatatgtcacgccgacaggcaagaaatatcactattcgaaatcctgcgcaggaaagaatgcgacgccgaaaagtcttgaagacgcaaaacgtcattacgacccgtgtaaaaaatgcgctcacgactgatatatttttatatgttagttttaatggaataatattttgttaacaatgtattaaaacacttgcattttaatttatttaatgatagaatgactgaggtaacgctgcctttatgcttgcggaaacctcagtcttttatgtataaaaaaaattttaatacaggcatacctttaaggaggatatgaaaatgtcaattcttaccctgccggacacgacggaagtcattgccgaatatccgtattttccgacaagacagcaacttttcatttggcgtaactggggcatggtcaaaaccaaaacgatagcggaagttctgggaacagacgttgagaccgttaacggacttgccgccgacatgggacttgacgttccgatgaagtataacgccgaatatgcgaagcgcggttttataactatcatcagaaacaactggcaggtcgttccctacgaccaactgatcaaatgcgcgggaatgacgcgcgacgaacttgcgttcacgcttaaagaggacgatttcctcggcgttaagttgcaggaaaaaccgaatgtttccgaaataaagtataccccgcttacagaagagcagaaagagcagacaaagaagctcaaagcgtggacggaaaagtattttgccgaatatagagacaagataaccgttaacgactttgactttatcaaagactacggcaaacccgaaagaaaaatgaagaacaacacaaacagagccgttgttctcgattcttcatggggcgttaaaaacgaaagcggaaattccgcggttgacgtctttgccgaaaactttgtcaacgacaccgaaaaagagtggggcgtcaaactctgcggcacggaaaaatttataactcttaaaattgagcctgacgaaaccaaaaaacaggaaagccatgttgtggcgttcgcaaaagacggaattaccgttaccgcagttgacgaagagggcgtcaacaaaggtcttcaatatatcgctttcatcgcagacagaaacgacggccttacgtttgatgaaggcacgatagtcagagacactcaatttgatgtcagatatacatattcctataacgcactttacggagacgctctgcttgaaggcggcgtttcgtcgtaccccgatgaacttctcaaagaatattccagaataggcataaacggtatctggatacacgctgttctttacaaactcgttgagtttccgtgggaaccgtctctttccgataagtggcagcagcgtataaagggacttcaaagtcttgttgcaagagccgcaaaattcggcataaaggtttacctttacatgaacgaaccccgcgcaatgccgatgagtttctttgacaaatatcccgaattgctcggctattccaacggtcccgagggcacgctctgcacctctacgcccgaagttcaaaaatatctttcggattcgataacccaactgtgcgaagcggcgccgcaactcggcggattcttcacgataacagcttccgaaaacctgacaaactgctatgcgcacgttgttgaaacaccctgcccgagatgcagcaagagaaaggcttacgaagtccttgcggaagttaaccttataattgcaagagccgcaagaaaggtcaacaaagacatcaaagtccttgcatggaactggggttggacaggcagattcgattcgtgggacgatatggcgcaggctatcggcgacgagggcgctcgcgttatgtgcacaagcgaagagggtgttaagaagacgataggaggcattgaaacttctgttatcgactactccatttctcttgtaggccccggcgaaaacgcaaagaatatctggaaaacgtgcagaaaacacggcgtaaagacgcttgcaaaagttcagttcaacaacacatgggaatgctctaccgttccctatctgcctgttgttgaccttgtggaacagcatattcagggcattgttgacaacaaagttgacggtcttatgataggttggacgctcggcggctacccgtccatgaaccttgaagttgccagccagtattattggacaaacggaaacccgcaggacgcgatagtttccatattcggagacaaagcacccgttatcaataaggcgacagaaacgttctccaaagcattccagaacttcccgttccacatcggaacgctttacaaaggtccgcagcatatgggaccgtccaacccgctgtttgaacatcagacaaaactctatgcaacaatgacgggacttccctatgacgatataaatcaatggcgttcgatttacccgctggatattttcgaaaatcaactccgacttgttgccgagggattcaaggaaggcatagacgaactgaaagcgtccgtaacggataaagaccttgctgaaaacaagcgtttggctgaatttgttgacgttgcaacaggaacgtattgtctgttcaagagttcgtatcagcagacagcatataacgttacgagaaacaaattcgacgaagagactgatcccgcaaagaaagaggaatacagaaaacgtatcattgaacttcttaatgcggaaatggataccgcgatggagatgtacaaagttatgattcacaactccaccatcggttacgaagcggcaaaccactatttcttcaacaagtatagcatgatggaaaaaatcctctgctgcgaatatcttctcgaaagattcggcaaataatgccgcattttggggaaacggcggaagtttcgtcgtttccccgtttttttggaatattttaattctcctttgaatatttttaagtgataacaaaggaggttaaacaccaatgaacagtatcaattacagacccgaaggcacaagcgcacttgacgaaaagccgtctttgcttcaacttgaacgggcaaaagcgaccaacaggattctcgaagcacgcgccgttatgtgcgacaacgaccacaacctgatagtggatctcggagacattaaaggtgttataccgagagaggaagctgcgataggcatacgcgacggaagcgttaaagacattgccgttttgagccgcgtcaacaaacagatatgcttcaaggtagacgacattctgacaaagcagggacaaacagttgcccgtctcagccgcgtttcggcacagcaggacgctcttaactatatgctctcgacatataaaaagggcgacataattcccgcgcggataacgcaccttgaaccgttcggcgcatttgcggatatcggctgcgggatagttgggcttataagtatcgaaaatatttcggtttcgaggatttcgcacccgagggacagattttttgtcggacaaaatatccgtgtcgttataaaggacattgattatgaaaaccgacggtttaccctctcgcacaaagaacttctcggaacatgggaagaaaacgcggatatgttcgatgtcgggcagaccgtttgcggagttgtgcgctctatcgaagattacggtatatttattgagttgacgccgaaccttgcgggactcgccgaatataaagcgggcatcgtttcgggtcagcaggcaaccgtttacataaaaaatataattcccgaaaaaatgaagattaaattgagtataatagactgcttttgcggagacgcaaaactcgaagattacagatatttttgccacggatcgcatattgacgagtttgtgtattcccctcccgaagccaacaaggtcataagaacttcttttgacgaagttcccgtataaaaagatcaaggacgcagaaatgcgtccttattttttcgaataaaaacggttgacaaagacttttgaatgttctataatatagaaaacagcaaggattttcggagtattcagatgaaaaaagacaaaaaagatacggcggaactgctcggacaaattgaatatgatgaagccgcgacttccgcaataaatgcagacatggcggttttgcttgcactttccgcacttgaacttatagcgggctttttcatgaacggctattcggtcatcgccgacggactgcataacattgtttctgccgcactttgcgcaaaactcggcaaaaaattcaaaaaagttatcgccataataatgctcccgttttctgcggcagggatatatttcggattctatctgatgacgctcaaagtctcttaccttgatcgtgcgccgaaaatatggctgtttatgataataattcccgttctgcttttgaaaataggttttgcattgaacacatccgataaaatcaaattaagcggtgtaaggtggatcaaacccgtttcaacgcagatgaatgtctgcgttctgactgccgtagcctcgtttgtcggactgtttgcatcgttttttatggatttttatatagagactgcaatcgcgaccgcgatctgtctgctttctctgctcgaaagtttccgcgttttcggacagtttaaagccgactatatagaaaaagtgattgaaaacgatactgtgaaagaaataacagaaaaagaacccgatgattttgcccccatatccgtcggcgaaattcatcttctctctaaatcaatgggcgttgatgaaacggacgaagaattgacgtcctttgaccccgtgcaaccgaatgagacggaagtgacggaagaaaaagaacagccgaagaaagaaaagaagaaaaaagaaaaaatatttactgacgaaaagaaagacgaagaagacgattggtagaaaacagcgattgcaaaatgcaatcgctgctttctactgataagttctttttaatctcgaaaagacattttcagcctctttttcgcttaaaatcaacccgtattttttcgcggtcaggcgcagttcatccgccgaacgtgaatttttaagcgattcgattctttcaaggtatttttccatgcgtcagaccgtctcgaaatatttatcaatctcatattccgtcttattgtccgcttgcagataagacatacactctttacgtttttcatcaacgtaagttttgaccgcatattcgggcagaacggagcgcacaaaacttgacgatgcaccgagttcgaccgcttcataaagactgtttggaagcgaagcaagaccgtccgtcacaccgcaaggcgctttgtacagcgtttgttctatcggttttctgacggggagtttgtgttctattccgtatatacccgcattcagaagcagcgtcaacgccgcatacggcgagcaggatgggtctgcggagcgaatctcgacgcgcttatttgcatcgggcgcggcaggtattctgacaagttgagaacggtttgtatttgaccatgcaacgtatttaggggcttcaaatgagccgaaacgcgcgtatgaattggtcaacgggttcataaacatcgttatttcatctatatatgtcagaacgccctctataaaactttccgcaactcccctgtttgtcagaaaaacattttttccgtctttataaagcgaaacgtgaaaatgcaatccgcttccgcttttatcggggaacggtttgggcataaacgacgcgaaaagattgtgctgtgccgcaagcgtttttacaacggaacggtatgtgatgtaattgtcaacagcggttaccgcggacgaatatctgaaatctatttcgttttgtccgggacctctcttgtgctgggaactttgcgggcgtatgcccatttcaccgagcgtaaggcatatctcacgtcttatatctccgcccttgtcgcggggggaaatatccatataccccgcgttgtcaagaggcgttcttgtaggatttccgtccgtatcgcacttgaaaagataaaattcgctttcgattccgactttgcattcgtatccgagttcgaaaagtcgtgccaccgcttttttcagcgcgtaacgaagatcgctttcgaacggcgaagcgtctgtatgacgtatgtcgcaaaaaaggtgaagttccttttcacccgaagttgaccaaggcaacaacgtcatagtttccggctcgggaaaaagcaggcaactgacactttctttatccgtaaacccaggtatgtcggaagcgtcaaaagaaatgccgttttcaaagattctcggcagttcttccggcattacgcatatatttttttgattaccgtaaatgtcgcaaaatgcaaggctgacgaatttgacgtcatgttcctcggcaaagcgcaatatattttcgtattctttcattgcagactttccattcatattattgatataattataatacaaatgtttcccgatgtcaataattaggcgtaaaaagccttaaattcaatgaaattttgcgctgtcaatgttgacaatcgtaaaaaataatgatataatttattttattaaaacggagaaacaaggtgtaaaagtatgagtaaaatttttgtaccaaaggggtattcccccaagcttaacctttacgaaacacagacggcgataggctttacaaacagaacgtttgaaggctatctgagcgaggcactcaatttaaaaagagtttccgctcccctgttcgtcgatcccgaatcggggcttaacgatgacctgaacggcattgaacggcccgtacagtttgaattgacggattccggcaaacaggcgcagatagttcactctctcgcaaaatggaagagaatggcgcttcataagtacggattccgtataggaaacggtctttataccataatgaacgctatccgtcgcgacgaagagaccgacaatcttcattctgtctatgtcgatcagtgggactgggaaaaagttatcgatgaaaagacccgcaatatcgattacctgaaagcaaccgtaaaagccattgtcggcgctatttgcgacacccttgacgatttgaaagtcaaattcccgcaggtagacaccgtgctcaaaagagaagtaagttttatcaccacgcaggaacttgaagatatgtaccctgcgcttactccgaaacagcgcgaagacgcatatctcaaagaaaacaagacagcattcatcatgcagataggcgataaactgaaaagcggaatcaagcacgacggcagagcccccgactatgacgattgggcgcttaacggggatattcttttctacaatgaggttctcggttgtgcgtttgaaatttcatcaatgggtattcgcgttgacccgaaatctcttgatgaacagctgacaaaggcgaatgcggacaacagaagaaaatatccgtttcacaaagcacttttggcaggtgaactccccttgaccataggcggaggtatcggtcagtcaagactttcaatgctgcttcaaggcaaggctcacataggtgaagttcaggtttccgtatgggatgacgaaacgcttgatatctgccgcaaaaacaatatagagattttgtaatatgagtatactttattttttcgaatccatcagaaatcccgtgcttgacgccgttatgctggcgttgacaaaacttgccgaagagtatgttttcatcgttgccgcacttcttttcttttggtgtatcaataagaagaacggctactacatgataaccgtgggacttgtcggaataactctcaatcaatggctgaaaatgcttttcagaattccgcgtccgtgggtactcgacccaaactttaaagcggtcgaagccgctacacccgcggcaaacgatttctcgtttcccagcgggcatacccaaaacgccgtcggaacttacggaagtatagcgaggtttacaaagtataaatggctccgcattgtgggcatagtgcttgcggtgttgattccgatttcgagactttatctcggcgttcataccccgcttgatgtcggcgtatcgtttgttataggcacggtgcttgtacttattatgtacccgcttatcaaaaagactgatgaaaagccgtggattctcggcgttattttcggtatttgctccgtgctgatgataggttttcttgtgtttacatatatcagaccttttgaagtaacggaagtctggcaaacggaatgtatcgacggtgcgatgacaaacgtttcgaaaatgcttggggcaacgctcggtatacttgttgcatggtttgttgattcaaaatatatcaagtttgagacggcagccccgtggtatgttcagataacaaaggtggtgttcggcgtcggcgttgttttcggactgaaatcatttttcaaaatggctttgttcgcgctgttgggcgacggcagcattccggctttgataatcgagtacttcctcgttgtcatagtcgccgctctgctttttccgatgacgtttaagcctttgaacaaactctttgcaaagtatttgaaaaagtaaattcaacaaattcaaaacgggacgctgatgcgtcccgttttttatgtcatcgtattatatccgcagtcgttgcgccgcttaatgaaattaaatcatgcggtgcaagcgagatttgataccctatcctgcctgcgctgactgtaacggtcttttgttcgagtgccgatgaatgaaaaacggtcttataccgctttttcatacctatcggcgaacaccctcctctgatataccccgtaacggcgtttatctcggaaacgtgaatcatctcaacggatttttcgccgactgcttttgcggctttcttcaaatcaagttcgtccgcgacagggataacgaatacgaaatacgcctttgacgcacctttcgtaacaagtgttttgaaaactcccgcagggtcaagtccgacaagttccgcaacggtaacgccgtcaacacaaacgccctcttcgtgtgggtattcgagagcgctgtacttaacttttgctttgtcaagtatgcgcataacatttgttttgaattcagccatcagaccgcaacctctttcataaccgtgtttcccctgccgacgatatcgtaaatttgtgagcatacgccgtcggaaagatcgacaccttgttggaattttgcttttttgccggcatcggtgaaatgaaaatacaccatatcttttccgggatttgaacggagtacgtccatacattctccgaaacgaaccttatccgattggtcaacggatatcatcattgccaatatcgcctgcggcattacatcggggatagaaacgggaacttcttccatggagtagtttctgtcaacttcgctgatgtttcttgccatcagttttgctatttcgcgcgtgtcggactcatcgtcgtcgctgccgaaactatccttttcaatgctcagtctgccttcaataataacgaccttgtcctcaacaagcaaagattggaacttttcgtaggtcttggagaaaagcaaaacttcaatagttcccgtgaggtcttgcagttgaagtatagccatcatggtctcgttgcgggtgagttttttcgtcaccttggcaagtatacccataatgctgaccttgtcgccgtccttacactcgttttcttcatcgaaaagcgaggcaatggttcgggtgccgtatgcttcaataagccccgcatattctttcatcgggtggtcggaaagatagagtcccgtaacgtctttctcaaatttgagtttttctttctttgagtattcgggaactttcgggaatttgaactcgggtgttgcgacctcttcctcatcatcttcaaaaagactgaactgaccgcctttttcttctttcagactgctttgcagacttgaacggagttcgggaaaacccgctatgagttcgtgtctcgtatttccgaaactgtcaaatgctcccgcatagacaaggctttcaacggttcgggagtcgatgtcgtaatttttcatcatgcggtgcagaaagtcgtagaaacttttgaaaggtcccttttcttccctttccctgatgatgttgtgcgaaatttcaacgccgacgttcttgactgccgcaagaccgaaacgtatattttcgccgctaacagagaaatacacttcactttcatttacatcgggcgcgagaacgggaacgttctgtttttgcgcctcgttgatgtaatcgaccatcttgtcgggctttgtcaatacgcttgtcagaagagccgacatatactctttcatgaaatggcatttcaagtatgccgtgtagtacgttacaaacgcatacgccgccgcatgggatttattgaatgcgtatttcgcaaactcgatcatttcgtcgaatatctcatttgccacatcttcgggaacgccgtttctgaccgcaccggggagttccattgttccgtcggctgcaaatttgccgtgaatgaaatattcacgttcctgctgcatgacgtccatctttttcttacccattgctcgacgcacgatgtcggcgcgcccgaatgagtaaccggcaaggttacgaacgacctgcatgacctgctcctggtataccatacagccgtgggtaacttcaagtataggcttcaactgcgggtctttatatttaatggattcggggtggtaactgttgttgatatacgtcggaatggaatccatgggacctggacggtaaagcgagataaccgccgtaatatcttctatattcttcggcttcaactggataagcgttttcttcattccgcccgattcaagctggaatacgccgtccgtctgaccgagagaaagcatatcgtaaaccgccttgtcgtccatatcgacgttttctatcttgaaatctggaatttttttccttatctgacggcacgcatcttctatgaccgtgaggtttcgcaagccgaggaagtccattttaagcagaccgagttcctcgtcgataaccatatcgtattgcgtaacgggcatatcgtcctgcacggcaagaggaacgtaatccgaaacgtcacttcccgcaatgataacgccgcaggcgtgcacagaggtgtgtcggggcgcattctcaacacccgcagaaaggtctataagttcttttattctcgggtcggtgttgtacatttctcggagttccggcattatttcgacggattccattatggttttcttgtcttgcaaaagttttgctatcgcattggcttccgcaggagtaaattcaagcactctggcaacgtctttgaccgccatttttgctttcatcgttccgaatgtgactatctgtgcaacacattccgcaccgtattttttgatacagtaatcaactatttcctgacgcctttcaacgcagaaatcgacgtcgaaatcgggcatagaaacacgttcggggttcagaaaacgctcaaaaaggagattatatttcagcggttcgatgtttgtaatatctatgcagtacgcaaccatactgcctgcgcccgaacctcttcccggtccaacggggattccgacgctttttgcgtaacgaacgtagtcgcttacgataaggaagtaatcgacgaagcccattttatgaacaacgccgagttcgtattcaagacgttcgtcaagttcttttgttcttgcgggatattttctgtcatagccctcgtatgcgagttttttgagaaactcaaagtggtccatattgtcgggcgtgacaaagttcggcaaatgataaaccttgtggtcggggtcgtcaaggttctgaaacgacacatcgcacatttccgcgattttgactgtgttgtcgcacgcctcgggaatgtattggaaaagatctctcatttccttttcggattttagatagaactcgtccgtttcaaaccccattccgcactcttcgctcaacgtctttttaagctggacgtacaaaagcactttttgcgcctttgcgtccgacttgcgcagatagtgagcgtcgtttgtggcaacaagcggaatgcccgtctcttcgtgcatacgcaaaaggccgtctatgactatcttctgatcttcaattccgtgatcctgaatttcaagatagtaattgcctctgccgaacaggttgtcataccaaatcgcaagttcttttgcgccctcgtagtcgcctgcgacaagtctttgcggaacatctcccgcaagacacgcagaaaggcatataagcccctcatgatacttttcaagcagttctttgtcgatacgcggcttgtaatagaaaccctgcgtattgctcaacgaaaccattttgataaggttttggtaacccacattatttttgcagagcaaaacaaggtgaccgtaatgagcgtcatattccctgctcttgtcaaaacgggtacgcgccgctgtgtagcattcgcagccgagtatgggctttataccgtgcttctttgcggatttatagaattttatcgctccgtacatattgccgtgatcggtaatagcgatggcggtctgtcccatttcttcgagcagttccatcatcttatcttttttatcacccatcgtgcaggctccgtcaagaagactgtactgcgagtgtacgtgcaaatgaacaaatgccataattcctccgcggacttcaaatgtcctgtatataaacttatcgtaattttctaaattgatttttcggctgccgccacaagttttttcaggcggtaagccgttcccgatttcgaaagcggcgggtcaaaagttttccccaactgttcaatgctcatatcgggatgcgccaaacgcgcttccgcaacgactattaaatcatccgaaagccccacatatttattttgtttgagtttttttgccgcttcgatatgttttgccgacgaaatcgcctgttttttcgcatttgcgacatcgcagttccccgccctgttcgcatcgttgcgaacggtgcgcagaatatttgaatttatacattcaaacgcctgattttttgcgcctatctcaaacaatagttgagaaacatcgtcaacggttttgaaataaaagaaattgccggttgctctgtgcgaaacgcgaacaacaatatcaagcgacgaaaaaatatcaagtgtaggttctattatctcttcgttttttataccgatttcggcatatatagtttttgacgggtcgctgacacttcccgctccgaggaaaagccccctgataaacgaaatcccgacattatcctttgaaagcacggaaaaatccgcatctttcggttgcggtatgatttttgaaaccgcattgtagacatctgcgtcaccctcgaatatcagacgcttgcctctcgaacctcttcttacactcgattcagcgtcaattccgcaaagacgtgatagcaaacggcaaaaacgggacatcgcgtcctcgctttccgttacaaaaagaattccccgctcatcatagatgtcgcacgaacatataagaccgagcaattcaccggctttttcgtttccggaacacttcacggcacaagccgctttttttactttctgcgaaaaagtcgtcattttatcctcttaacttccggttcaagcataactccgaatttttcaaaaacggtcttctgcacaagttctcgcagtccgtcaacgtctttgcaggtcgcaccgcctttattgatgatgaatcccgcgtgtttttcgctgacctgcgcacctccgacggaagtgcctttcagtccgctgtcctgtataagttttcccgcaaaatacccctcgggacgcttgaaaaaactgcctgcgctcggaaactcgagcggttgcgacgtttttcttttctctataagaatctgcatttccgacttgattttttcacggtcgccgtcacggagcatgagtcttgtttcgcagataatgtcgctgtccgaaaaacaggaatgtctgtaaccgaaatcatgttctttgcctttgaccgttttgatattaccgttttggtcaacataagtcgtttccgaaacaatatccgcaaaagttccaccgtatgcacctgcattcataaacacg

SEQ ID NO: 2942 - DNA, 3365 bp, Unknown
  16S sequences of unknown bacteria
tctcggccttcagcagctgctgctgggcgacctgcttttcttctatcgccgtgatatatgcgtcggaaaaatcaaagtttataatatttacatccgtgacatatagacctatatcgttgagcttgtcattaagcccctctataaggccgtccgataccaaaaccctgttggtcacgctctcttcggcggtataaagtgcagtagtagccttaagaacctcgtttacggccggaactaccaaaactgtctcataatccgggccgatatttttatatatactgtaggacttactcgtatcgaccctgtaatttatcgctatagtggtagaaacggtctgcaggtcttttgaaaacgcctcggtaacgacctcaagcttagttatacggttgtctatcttgactacgtcctgcacgtagggaattttaaaatgcaagccctcctgcagcaccctgtcgttgaccttgccgagcgtaacgacgactccggtatggcctgcctggacgatggtaaagcagttcaacaccgttacaaccacgaccagcgccacaagcgaccaaatgactatacgtctgatttttttcgttttctccataataggctcccttccgacatcgggcctcgctgaagcgcggcgcgccgatatcagacaaggctgtcgttgttaattttttatataagcagccacacggctatcctgaagtacaccagtaaggatacggcgtctactatagtggtaatgaacgggcttgccataaccgcagggtcaaatccgagtctctttgcgagaataggaagcgaacagcctacgagctttgctatcacgactgtgcaaagaatagtaaggctgattacaagcgcaacgagtatggttaccctgtcgatgaggagcagcttaataaagtttgttaccgcaagtgtcgcgccgcaaagaacggatactctaagctctttccacaggactttaaatgtgtccgcgaacgtgatttcctggagtgagattccgcggattaccgtaacggatgcctggcttccgcagttaccgcctgtgtccattatcataggaatcgacgccgcaagcacaagatatgcagagagagcgtcttcaaagtgcgtgattattgcccccgtgaatgctgccgaaatcataagtatgagaagccacgggatacggcttttataaatatcaaaggtcgagagctttaaataaggcttgtcggacggtgtaatagccgccattttgtcgatatcctcggtcgtttcgtctctcatgacgtccatagcatcgtcaaccgttacgattccgacaagtctctcttcactgtcgactacgggaacaacgatgcagccgtattttgagaacacatgagcaacgtcttccttgtcttcctgcgtgtttacggagactgtattctttgtcatgacgctgtcgactgtcgcggagaggtctgcaaggattaaagttcttatcgaaacctcgccgatgagctgacggctaacgttagttacatagcatacgttgatggtttccttgtcgactcccgtctctctgatatgctgaatcgcttcgttgattgtcatatcgcggtaaaggtcgacaaattcaggggtcataatgcttccggcggagtctgcgggatacttgagcatctcgtttatcatctgccgtgtctcggagtttgcctgcttgagaattcttttaactatgctggcgggcatttcttcaacgatatcaaccgtatcgtcaaggtaaagctcgtcaacaacgtccttcagctccttatccgaaaagctctttatgagatactctctctgctcggctgacatttcgacgaatgtgtccgacgcgagatccttcggaaggattctgaaaagaagcggtattttctgttccggcacttcctcaaacatagccgcgatatctaccgcctgcatagtaaggagaatatcgcgcacggaggagtactttttgttttcaataagggtggtaactgtgtctgcaagagttaactttttttcttccattttgcttttttcggcgcgaatgtcactttataaccggaatttttcacgccgccaactcctttctgtttttttaagacagaagccggcacacagaaaaagccttattgtatcaggctgacataaccgacgcataagcgcgtattgtgttcagtcgaacatcgtcggcttttcagtttgccgttactactgccagcgtccattatgtttcacctccgaaaatgcggattgttaatccaataaaatattttaatagattccgataaaaccgcgtgctcattcaagccggaatttatcccaaacccattcatggttaatattatatcacattcgagaaatctattctacaaaattatgtaaacatttttaagctatgttaaaatatttttccgctcggtattgacatcgtgcttccgcaatgataaaatgtataaatattaatactgatattattatctttcatcgaggtatttatgataaccataccgacttcatacaagccaaagctttccgtatacgaaactcaaaaagcaatcgactacataaagcgcacgttccagatgaatcttgccattgagcttaatctcagacgtgtgtccgctccgctgtttgtacgcgaaaattcgggacttaacgacaacctcaacggcgtggaaagaccggttaagttcgatgttcccgctgtcggagaatatgcggaggttgtgcattctctcgccaagtggaaaagactcgcgctgaagagatatgatttcttcgtaggcaagggaatttacaccgacatgaacgccatccgccgcgatgaggaaattgacaatattcactcggtatacgtcgaccagtgggactgggaaaaagttatcgaccgctccatgcgcaacgaagaatatctaaggctcgttgttaagaaaatcgtagcggctcttgttgcgacaaacaacgcggtgagatatgaattcaatcagctcgagtgcaatatttcccctgaggtttctttcatcacgacgcaggagcttgaagacctgtaccccgacaaaactccgaaggaaagagaaaacctctatgtccgcgagcaccacacgacattcctcatgaaaataggcggcgctctcagaagcggaaaacctcatgacggacgcgcgcccgactacgacgactgggaactgaacggagacattctcatatggaacgaagttctcggcacggcgtttgaaatatcctcgatgggaataagagttgacgcggagtctctcgcaagacagctgaaaaccgcaggatgcgaagagcgtgccgaacttcccttccacaagatgctgctgaacgacgagcttcctctcactatcggc

SEQ ID NO: 2943 - DNA, 32759 bp, Unknown
  16S sequences of unknown bacteria
tgtcggttctctttttaggagaacctccccgccgttatcataaaaaccaacgataaaaagaggggctgcggccccaggtttttgggccgccgcatgttttcagtcccgcgccctaccggccctcttctccatcccgttcgagggtttcgcggatcgcgcggacaatgaaggcgttgaggctctcgccccgcccgcttgcgtgggccttcagccggtctttctctccctttttaaccaccagattgatgcggtcgcagttttccgactgccatttgttctgatatgccgctcgcccagccatagtcaacctcctctatacattctaagtcatgcgcataatcaatatgcacaaattgtcatgcgcattattgtttgaaatagatattgcttttgtaatgcacatgacatatactatccttgcaggggaaaggtgcggtcaaacccggggaaccatgcaccgcacatgccccgggcgtatcacctcattcgccgcgccttttccctgtcttttcaatccgttttagtatacacccaaccgccgtcaatgtaaaggagccgttatgccgtcagcgttccgtgattacttcaaccaggccattgccggatccatcgatgcctcatataggcaaaaccgggatgaaaacgaggcgtaccgcggcctcgcggcccgtcaggcggcgctcttcagggatattcaggaacggctcggcaaagacgcgaagctgatgaactgtctggaagaaaccgtcagtgaacaatcccgctacgaagaggaatggatctaccggcaggggtttgccgactgtctggacctgcttcgctgggcgggcgtattttcacccgatctataaaaatccccctgggatgttcccagggggatccgtttatttggtcttgcccacctgcagggcgatgacggtgatgtcatcctcccgctggcccttctgcttctgccgggccgtataggcgatggattccgccagctcctgaacgccgccctgttcgaggtcgaaatcccgcagcgcctcttccacccagccgacgcctgcgctcaccacgccgtcgctcgccagaaggaggatatccccgtccaccagcgtatcctggctccgctcgaacgcaatgtcccgcaggatccccaccggcagggaggaccgctccatccgggaaacgattcccttgctgcgcagaagggaaaccgacgcccccgccttgaagctctccagcctcccggtaaacagatcgatcgacgcgacatccagggtggcgaggctctcgtcccccgatttgaccattagggccgtgttgaccatccgcaggacgctgtccgggccgaatccggcctggagcagatgggtggtcagccccgccgccatggcaccgtctacggccgcccggccgccgctgcccatgccgtcgctgaggaccgtgaccagccgcccgccgctgtcctgaaagctctcgaacgcgtcgccgcagagcttctctcccgcgcagcagagctgggcgctccccacagaaacccggtaaagcggctgttcggtcagggtgatccggatcacatcccccatccgggccacgacgggatggtcgaacgtccgtccacaagcctccccgatatcgccccgccacttcttttcatgcacccggctgcccttgtcggacgccaggatgtccaccgtcatccggccttcccggccgaccgcgcacaccacgtcccgcaccgacagcccgtgcgcctcacagacatcggacacccgggcggcggcatcggcgtccagccgttcctcgagcgcgaaatccgccgccagctcctccagcatgtccgccatgccgctgaactggtcggtgaccaccgcgcggatctcagacaggcgccgccaggccccctcccgcaccagatgctcacggtagcccgcgttgaccaggcgggtcacctcgtcgagccggctgcagttgcgggcgagatgccctttgacctcggaggtggacacccgccccttctcccgcagcaacgggctcatatcgttaaaggaattcatggtatcggcgtaatgctgctcccagcagaacatccgcatcccgcagatccggcaggcctcgtcggacacattccggtaaatgccgcccagatcgggcgccgaaagccccgcgagctttttggacacaccgtccaccgtccccgccacctcctgcatggcccgggcggcgaattccatccgcatcacgaccgaatgccgcagcccgtcggcggccggcacctcccggacatggccgatcaggccgccgagccttttgtccagcaccggcggcagcacgacatagaggatactcgccgccgccacctcataaaagcccacgaccacctccagcccgggattggcgctgaggttcaccaccatattcaccacgacgaaggaggccgcggacgccagcttgccgaaccgggaaaaaaggcccgccagcagcccgccgagggcataggccggcgccaggaacatctgctccggggccgcgagcgccatagcggtgccgaggacgatgcccgcgatgctgcccccctgttccctgccgcagcgggcgaataccaggatgaccagaatcgaaacaatccggccaggtgaaatgccgctgaactggactgtggacagggccatgagcgccacggccgccaccgccaccatgctcgcctgctccggagcggtcagggtggcgtccggcatctggtgagtgatccggaaagccacctgaacaaaataggcgaagccccccgccagcaggctttccgagatcacggtcaggatctccagaaaatccggttttcccatcagggccatcgccatcccggtgaagccggtggcgaggaaggcggccgccggggcgaataaggccgatcccatcacctttttcaggccattgagcgaccaacggatcccggccacggccgccacggccgccagataccgcagcgggaaagccgccccctccggcagcaggtatcccatccctgtcgcgagatacaccaccacactgcccggtcccgacaccgcggccgcggcgcccacgccaaagggcgcgaggctgccgtacaccgtcgcgcggggcacgatcacgcccacgattccccacagcgccataagcagcacctgccgcagcaggctctcttccccggacgcatgccggggcatcaccgccgtcccgctgttgtttttctgcttcaacgtcctcaccaccacattctgcgaaatcgccgccctgccggccgtctatgtataagggcatcgcggcgtttttcctgcccttccattatagggcttgtccccccgtccgtttgtcggaaacggcgggaaaaggcagggggatccgcgcggaaaatgaccggaaatgcgggaggcgcccgcaatcgggccggaggacggggaagcggcgggaagaggcggggccggggcttggtctattgtccaacggacgggcatatactggaccatacgacatgtccagaaggagtgtgggtcatttgttgaatcaggcgtatccggacaaacagaccgcagcgggcatcagaagaagcgggacggaactcgccctgcccgccggaacggggggaacggcggatgccgccgcgtcctcctcttccctgcagggtctgactccggatgaagtggcacgctcccgtgagctccacggctccaacgaactgacgcagaaaaagcggcagagctttttccgccagtatctgagcagcttcggcgaccccatcatcaagatcctgcttgcggccctggcgatcaacgtcatcttcctgttccgccatttcgactggtatgaatcggccggcatcgccatcgcggtgtttctcgccaccttcgtctccaccctgtcggaatacggcagcgagtccgccttcgccaagcttcaggaggaggcggccaaaagccagtgccgcgtccgccggaacggtcgggcggtggcgctgccggtcggggagatcgtggtcggggatctcatctacctgcaggcgggagaacggataccggccgacgggatcctgatctccggccgcctggccctcgaccaatccgccctcaacggagaaagccgggaagcggtcaaagagccgggagagagcggtgcgtccggcgatctcctcagccggagcgggctgttccggggcgcgatcgtctgttccggggacggcatgatgctggtgcagaaggtcggggacgccaccttctacggaggcctcgcccgggaggtccaggaggagacgagggaaagcccgctgaagatccgcctggccggcctggcccgcaccatcagccgcctggggtatatcgcggcggcactggtggccggggccgacctcttccactccttcattatggatcagggctttgaaaccgcccgtatcctcgcccagttccagcagccctccctcgtcttctcccatatcctccacgccctgaccctcgccatcaccgtggtggtggtggcggtgccggagggactgcccatgatgatcacagtggtgctctcctccaatatgcggcggatgctcaaggatcacgtcctcgtgcgcaaactggtcggtatcgagacctccggcagcctcaatatcctgttcaccgacaagaccggcaccctgaccaggggacggctggaggtctcccggtttgtcgacggcagcggaggggagtgccgggatgcggccgatctgagacggaaaaaggtcctgtgggagatgacccgcctgtcctgctattacaacaacgaaagcctgccatcggcgggagaggtgatcggcggcaacgccaccgaccgggccctgatgagctacattctcgggcggcagaccctcccgaacggctatacggtcacctcccgcatcccctttgacagcgcccggaaatgggccgccgccgaaatcgccgccggcagcgacgcggacgccgggctcctgcggggaatctacggcccgggtgtgcggcgggtcaccctcatcaaaggcgcacccgaaaagctgctgggtgcctgcgaccggtacatcgacaacaaggggtccctgcgcaagcttgacagcggcatgctgctgcgtgccgcctggtcggagatgaccgggcatgccatgcgggttctcgccctggcggtttccgaaacccccgtatcggagcagggcggcttctcccgcctcgtcctcgtcgggctcgtcggcatccgggacgaggtgcgccccgaagcgcgcagcgccatctcccaggtgcaccaggccgggatccaggtggtgatgatgacgggggacaaccgggaaaccgccgccgcgatcgcccgctcggccggccttctcgaggcgaacagcccggccgaagccgttatgacgagcagtgagctcgaaaacctgacagacggcgaggtcaaagcccggctgcccgccctgcgggtggtcgcccgcgccatgcccgcggacaaaagccgcctcgtccgcctggcccaggagatgggcctggtggccggcatgacgggggacggcatcaacgacgcccccgccctcaaaaaggcggacgtggggtttgccatgggcagcggcaccgaggtggccaaggaggccggcgatatcgtcatcctcgacgacaatttcgcctccatcgccaaggcggtcctctacggccgcaccattttcaaaagcatccgaaaattcatcatcttccaattgaccatgaatctctgcgcggtgggcatttccatcgtcggccccttcatcggcatcgataccccggtcaccgttatccagatgctgtggatcaacatcatcatggataccctcgcggggctggcgtttgccggggaaccgcccctgcaggaatatatgaaagagccgcccaaacggcgggacgaacccgtcctcaacaagtatatgctcaaccagatcctctgtatggggctgttcaccatcgcgctgtcggtggcgtttctcaagctggattgggtaaagccgctgttccgttacggctccgatccgatctacctgatgacggcgtttttcgccctgtttattttcaccggtatcttcaacagcttcaacgcccgcacccatcgtgtcaacctgttcgcccacatccaccgcaaccccggcttcgtcgggatcatggcgatggtggcggtcatccagctcgtcctgatctattacgggggcagcctcttccgcacagccgggctgactcccagagagctgctcctcgtcctggtgatggccttcctggtggtgcccgccgacggcctgcgcaagcttttcctccggctgaaccatcggaagggaaatttatagggcctctacgcggacacaggaagccgcgccactataaagagcgcccccggttgacgggggcgctcttctggtatgtccgcgcatagagaatgaaaccgatccgatacggcggatgcgcgtccagtatttcttcacatggaacatggaaaagacgcgccggggatcccccggaatctgtgaggatgaagcggaagaggcgcgaatcggactgtctggtatacccggccgcgcgcggcgtgttacaggcatgccgcggcctgcgcggtgagtgtccggatacgggcgaaatccccggatttcagcgcgtcggacggcaccatccagctgccgccgcagcacaggacgttcggctctttcagataggcggccagattccgctccccgatcccgccggtcggcatgaaccgcatctgcccatacggccccgccagcgcccgcagcatggccaccccaccgagcacttcggcgggaaagagcttgacgatatcgaggcccatccggatacaggcttccacctcgctcggcgtcgcgcatcccgggataaccggaacaccatggttcatgcaccatgccaccacgtccggattggtaccggggctgacgatcccccttgcgcccgcctccacggcggcacgggcctgctccaccgtcaaaaccgtaccggcgagtatgcagacagcgggcatccgccccgcgatcaggcggatcgcatcagcggccgccggggttcggaaggtgatttccgccgcgggcagtcctcccgcggcaagcgcctcggccagcggcagagccgcggcggcctcttcgagcctgacgaccggcagcagccggagccgccgcagctgttcaaacaaggcttccatgagattcctccttttgccggatcccgtgatcccgctcaaacagggccagtgtctcccggtccggcaggccttcgttgtcgccagggaaaccgagctggatcgcaccgatggcgttaccccgccgcaccgcctcccggagcggaagctcctcgcccagcgcgctgatcacgccagcggcgaaaccgtcccccgccccgactgtgtctacaatcctgtccacccgataggccgggcagaaaaacgactcggagcgggtggcggcataggcgccgccgggcccggtcttaaccacggccgcccgcgcccccatcttcagaaaagcctccgctatcgcttccggagccgtctcaccggtgagaaaacggccctccgcgagcccgggcagcaccacatccgcttcacgggcgaacgcgagcagggtgtcccgcatatccgcgggactcttccacagcggcggccggagattggggtcgaaaaataccgtcatcccccgtcttttcgcctctgtgagcagaaaaagtgcagcatcccgcgtgtgctcagacaaagccggaaaaatcccggtcagatgcagcgcccacagcccgctgaagtcgagccccgccacgtcctccggaccaataaaggaggcggccgatcccctgcggcaatagaaaatgtccggatcccccgccgccgtcttggatttgaacatccagccggtggggtgctctgcgctcatatggacatcccgcacagaaagtccttcagcttgcatcgcctttcggatccggcgcccaaaggggtcgtcccccaattttgtgaaataggccgcccgatgcccgagacggcagagccctaccgcgacgttgaattcggcacccgcgacggcgctacggaaggtctccgccttctccagagggccctcctccagcgcggtcagcaggcccatcgcctcaccggccagcaagatcccgtcagccatcccgtacctccccccggccgcctgtgcggcggcggtattcctcccaaacggtctcaaaccagccgtcgggatgaggcagcgggcggaccggctggaacgccgaacggaacgtcccgtccgcccgttcggtgacgagcgccgtgttttccccgagcggacggttcggacggtatgcgtagccgggcagcgcgggatgtacccgttccccgccctcctccgtcaccagggcggaaccccgtgtgcccgtccgggccgcggccgcccgcatggccgagaggacggcgagctgggtcagggcgatatcccggcttttgagcaggtcatagagttccccaggacccgacaaagcgataccctcgggaaagcgcgccaggctttcggacaggcggccctccagctccgccatccctttctcatcccggatatggccggcatacaggctcatggcccgctgtttctcctcccgccattcctggacggaggaggcgccgcgctgccgcagcgccctgtcaaacaacgcgagcatctcctccgcctccctctcggcgagtgagacgaacgccggcgtgggcgcggtatcgggccgggtggtgtcggcgatgtgctccgccgcccgcagggagcccacctgtgcggcattgagcgcgctgccgcccggacggcggacaccgaaggtaccggcggcctccccggccacatacaggccccggaccccggactgccaatccgcatccaccgcgatcccgccgttgtgatgctgcgcgcacaccccgatttcgagaggctcggcatacaggtcgataccatgccgtttatacaggtcgatggccagggggttcatcttttccaggcgggcgatgggggtgggcagcaacgcgccggaatgagcaaggtagcggtacgcctcctctcccagaccctcaagtcccctttccaggccggccggatcgctacggaaatcaagatacacacgccggccgagatcagcggtctcgtggtggacaaggatgtcgatcagggaggaaccgccgatcttcccggtgtcgaacggccactggtaccctttgaggaatacccggtcgagcgcttcgtggggagaggtgaaatacccgggcaggaattcccgctctatcccctcccggtcgatggagatataccggggcagtacctgctgataggtgccggacacgttccatcgaaaggacgtagaggccagaccgtactgccattcctgtaaattgcaggcagcggcccccgcctcgagcatcatgccggtcatgccggtctggctctcgggatacaccgaggcaaaataacagcccgccggccctcccgtcgccatcacgacccgtttcgcccgtaccacggtaagcccgcgggccggacccccgcaggcgttccggtcgaggcagagcaggccttccactccctcttccgacacaagcagccgcaccgcgcagagaccatccaggatggggataccttttctccgtacagaacgctccaggcattccgtcatataccggctggtgagcggccctgcgctggtcgcccgctggcgcggatcgtggtcggtcttatagccgacgtattccccataggcattggtggggaagggcacgccgagattggcgagcttgatgaaggaacggacggaacaggccgcctcggccagagcggtgtcgccgttgacgccgccgcccgcaaataaatcctccgccattttcgcgacgctgtcctctccgtcgctggcaaggctgagtttatagtaggtctgcttgtcgctgccggtgttgcggctggtacccatatcgacgccttcggtcaaaacggcgatatccgtccgcccgaggtcgtacagccagtccgccgcgttgaaaccggcacagccggaaccgactaccactgcatccagcgtgatcaggggcaggatttgccctcctgcccgcatcgtcgtcctcgtcatcgtcgtcccccttacagtcggcggatatggaagccgccgtcggcgttgagtacctgtccggtggcgaaatccagccggccgccgaccgctgccatcacgcaatcggccacgtccttcggctggccgaaccgtcggatcggcgtcacgccgtcggcgatcagtttttcatacttttctttcaccccgacggtcatatcggtcagaatgatgccgggccgcacttcgaaaaccggaataccatattcggccagacggtcggcgaacagttttgtcaccatcgagatgcccgccttgctgatacagtattccccccggttggtggacgaggtgtacgccgacattgacgcgatattcacgatccggggggtataatccccgatacccgaccgttggaaatccagcatcaggttcgccgcggcctgacacatgaagaaggtccccttgaggttgatatccatgaggaagtcgtagctttcctcggtcgtctccagtacatccaagcgcacgcggggcgccacgccggcgttgttgacatggacgtccagccggccgtaccgctcccgtacctccgcggcgaaccggcggcggtcttcctcccggctgatatcacaccggagatacgcggcctcgatccccctctcgcgcaggcggtcgatgaccggcacggcttcctctgcgtcgacgatgtccgacaataggacggcatatccggcctttcccagttcttcggctatcgctaggccgatcccccggcgggatcctgttaccgacgcgattttcctgttcatctcgcccactccttttttgggtgcggattctcttccgcttttttcaaaaccctgccgacgtcccgccggtaatacggcagataggtctccgtgtcccgcacgacacagcccgccacactgcccgcccgcatcagggccgagcatttgccgcaggagatgcagcatttcttcggatccagccgcccgctttcgagcagatccgccgcaaacgacggatacgcgaaggcctgcctcccaaatcccgcgaggtcggccccaccggcggcgatcatgccggcggccagatttccggaaaactgccgcatgtaggacagcccggatgccacgaccgcggcccccggcaccgcccgcttgatctccgaaacgcagcggcacaggcgggccaccccggcaaagggatgttcgggcggcgggtaggggccgtcgtcataggggcggttgacgtggggattgacatagggattgccgatggtgatgttcagcagcggcaccccctcttcccgcaccaggagcgcggccaggcgcttcggctcctccagctccggctcgacgccgccgtccggcagcaccccccacccgtaaggatagggaaagccgtcatacacattgaggcggctggtgataaaggccccgcccgccgtggccgccttagcggcccggacggcatcgcgcagcagacgggtccggttctcgaaactgccgccgtagggcccggggcgggtatgggcggacagcagctcgttgagcaggtagcgatgacaggccttgatgtccaccccgtcgaagcccgcctcctccgccagacgggcggaacaggcataccgttcgggcagcgcccgcagctcgtcgtcggagaggatacagctgtccggcagaggcatgtccttctcaaacagcgggttccggcacgcgatgcgaggggcagggtccccctccggcttggaatagcgcccggaatgggtcgcctgcatcacgaggaccggttccctgccggtcgcccggacggcccattcccggatatcctcggtcagccgcttgaacgcgtccaaattcgtccgggtgagcataagctggcggggattggcccgtccctcccgcacgacggccaccgcctccatccagatcaaaccggcgccgctctcggcaaaacggcggtaccgccggcgcgtcagctctcccgggctcccgtcgagagtcccgtcacagccctccatgggctgaatcaccagacggttgtgcagccgatacccggccacttccagcggctccctcaaaagggccgtctcctccgacagggggagggatacgccgagcgcggcggcccgagcccccgcctcggcaagcgatgtatagcggaacggttctttcggcacgtggattccccttttcggtatcggccggttttttctcagcgcggccggatgtgacatcattataccgtacaaaacgccttgccaatcggcgcccggaatggtaaaataggtaaaatcggtttttaaaggacgtgacggatatggactccgatcgctttttctgccgatattcggaacttccgcttgggttcgatcggcattttcataatgcgcaccaactgctgtatatcgtgtcgggagaggtccgtgtccaggtcggttcttctgtctacggcggccagccaggcgacctgtttgtcatcagccgcctcgaggaacacggcacggctctggaaaaaggtgcctaccgccggtatacgctccaactctcccgggaatggctcgaccacgcgctcgaggatgcccggctgaaatccctgtttctccgccgcccgtcggggttttgccaccgcttgcccgatgaaagccgtgagctggaagggctttttcatatgatggcggaggaggaccgggtgcctcgccccttctcaggaatcagccagtccgcgctcttctgccggctgatggtgctctgttaccggcaggatccgggccgtttccccctgcctgcggccacccctgccggcccggtcctggaagcgcagcggtacatcgacgctcatttcaccgaggaactgaccatggacgagctggcgcgccatgcctttctcagtccctcctatctctcccacgcgtttcgggaatggacgggctacagccccaaacaatacatccttctgagccgtatcgccctggcccgtgaactgctcaccaccaccgattatgatgtggcggacatcgccggccgctgcggcttcggggatgtcagcaattttatccggtatttcaaaaaggagaccggatccactcccggccggtatcggcgctccaccggctgaccgcgccttttccgccgtttcatgacgcatcgaaaggaaggaatcctaatgaactcggagcttcgtgcccggctggaatcccttgccgacccgggctaccgcgccttttccgcccgcctgctgccggtggggacccccctgctcggcgtccgtctgccggctctgcggcgcatcgcccgggaactgtcccggggggattggcgcgcctatctggatggggcggcggacggcagctttgaggaaatcctcctccagggcatggtgatcgggtatgcggaaatggacatgggggaacggcagcaccggacggccgcgttcgtcccaaaaatcagcaactggtcggtctgcgacagcttttgcgcggggctcaaggccgtgcgggaagatccggattcctggtggacgtttcttcttccctacgtcaccggccggcgggaatacgccgtccggttcggggtggtgatgctgctgctgtattatatagacgaagcgcacctggccgatgtgctctccctgctcggcaggacggactgccgtgggacggccgccaggaccgccgtatcctgggcggcggcggagtgctatatccgtttccccgaaccgacggaggcgtttctgtcgggcgggacactggatcccctcgtcctgcgcggcgccctgcaaaaaatcgtggaatcccaccgggtggacgcagataccaagacctatatccgggcctggcgcgggtccttataaccggccccgctggatttccaggcacctgtaccgccgccaagatacactatcccccttctcgcgggacatcccccataaatcgacggttgacgcagcatagtgatagaggttataatgatatattgctggatgaaaacagcaggggtgcgcctctgccgaataaacaggcgcaccttctgttcatgtcggtgcggaaaggcggctcatcatgaaaaagcacggcagaaaatggctctcccttcttctcaccggcacactggtgctgacgtttagcgcaggctgcgccgatcaaaagggcggcgtctctctcgatccccgggagcccgtcaccatcaatgtatggcactattataacggcgcgcaaaaaacggccttcgatcagctcatcaacgagttcaacgaatcggtcggccgggaaaaagggatcatcgtcgagggcgtcaaccaggggagcgtttccaagctgactgaagccatcatcgattccgcccagaataaagtggggaccgatccggttccgaatattttcgccgcctacgcggacacggcctatcagatcgacgcgctcggcctggtcgcggatctcggccagtatctgacggacgaggaaatcggcgagtatatccccgcctatatcgacgaggggcgcctgcgtgcggatgggaagctcaaaatctttcccaccgccaaatccaccgagatcttcatgttgaacaaaaccgactgggaccgcttctcttcagcgaccggcgcgtccctggacgccctttccacaattgagggccttgtgcagacggcggaagcctactacaactggaccgatgcgcagacccccggcctgccggacgacggcaaagcctttttcggccgggacgccatggcgaattactttatcatcggggcccgacagctcggctgcgagatcttctccgttgacggcaaccaggtcaccttccgtctcgacgaggccgtcttccgcaaactgtgggatcactattacgtcccttacatcaaaggctatttcacggccaacggcagattccgctccgatgacgcgaaggtgggcgatctcattgccctggtcggctcctccacctccgcgacctactttcccacggccgtcaatacgaatgacgaagacagctatcctatagaaaccctggtcctgcccgcccccaccttcgccggcggggaaaactttgcggtccagcagggcgccggcatggtggtcaccacctccaccccccaaaaggaatatgcaagcgtcgtttttctgaaatggtttaccgaggcggagcgcaacctgcgcttctccagcctttccggctatctccccgtcaaaaaggaagccaacgacatcgcccggctcgaaaccgcgctgtcggtcatcgatcaaaaagacgtgaccgaaaatctgcgcgcctccctgcgggtggcggtggacaccgtcaaccaggcgtctctctataccaataaagccttccaaggcggcaccgacgcgcgcaacgtgctggaaacctccctgagcgacaaggctgccgctgaccgcctcgccatacgggacaagatcggcagcggcgtcagccgtgccgcggcggtcgcacagtacgacaacgacgagaattttcaggcctggttttcttctttgaagcgggcgctggacgagtccatcaagtaacctgccgcatcggacacacaaggacgcagtggcggtatcccgggcggcccgccacccgggcccttccgacgctatgatcgggaagtgatatcatgggcactcgccggcataccatcctgataaaaatatcccttccccttcttctggccatgctgatacaggccggactgattttcagcgtcattttgttcggcgggaccaccaagcagatgaaagcgaatgcctacgatatcctcgccgaaaaggtcgtcagccgcaaaaacgacctggaaaacgagatgatccagcgctggtccaatgtttcaggtcccatgcagaccatactcgagctgaccggtgacgtgctcgagcggtatcaggccgggcccgaggcgctggagatcaacgccgacgtgaccaacgagctcctccgccaggtttcttcccctctgatggcgctgatgcggaccaattcggtatcgggcgcgtttatcgtgttcgacggcccgggcactcaggacaaaaaagccggcctttatctgcgggactccgaccccagctccacccccagcgacaactccgacctgctggcggtccgggggccctccccgatcaccaaatatctcaacatccccatggacaccttgtggcagccttccttcggtttgaatgaaactgacgattactactacaaaccgttcctcgccgcgaaaaaggaccgcggcctcgatgccgccgacttcggctactggagccggccgttttacctcaacggccaggaaaacgaaaacgattccacccagatcatcacctattcccttcccctgctttacggggacggaaccccgatcggggttctgggggtggaaatttccattgactatttacggaaatggctgccgtcggacgaacttcaggcggataaccgcggcgggtatctgctggccgtccgctccgcctcccagacggacggcacggcctatacctgcgagcccgttgcgaaaaacggctccctgctcatgcagctccaggaaaccggccccttcgccttttcggccagcagcgcccataccggcgcctataccgtcgtttcgcccgacagcggcgaccgggacatcgacggccagaccgccgcgctgaagctttacaatacccacacgccgttcgaagacgaccagtgggtgctgaccggcctcgtctatcgccgggatctgctggacgcctccttgaagctgcagcggaccatcctgctgtcgctcggtatttccctggtcctcggaatcgccagcatcctcctggccgccaagattatcaccaagccggtcaccaatctcgcgcagaagctgcgggagagcaacccgaaccgcgttatccgtctcaagcggctggggatcaccgagatcgacgagctctccgacgccatcgagctgttaagccaaaaggtgtccgactccgcttcccgcctgtccaagatactggaactcaccggcgtggatgtggcagccttcgaatatgatcgaaaagccgggatcgtctatgtgaccgaccacttctttgatatcctggcccttcagccggagaacgacagccacagcctgacggacgccgagctcgaacgcttattccacccgctgatagaccgggcggaggaggccgacccgcagagcggtacctatgtattccgggtggggccggattacgccccccggtggatacggctgaaggtggtcgagggatccgaacggaatctcggcgtcgtcaccgacatcaccgcggaaatcaccgagaagcggaagatcgaacacgatcgtgactacgacctgctgaccaacatctataaccgccgggcgttccacaacaccatgcagggccttttccgctcccccgccctgctcaaaaccggcgctctgatgatgatcgatctcgacaacctcaaatacatcaacgatacctatgggcacgactatggggacgaatacatccgctgtgcagccgatgccctgctggccgccgccgggtcgcgcgccgtggtcgcgcggatgtcgggggacgagtttttcgtcttcctgtacggcggcgcatccaaagaggaaatccgcaacatcgtccgcagcctgcacagccggctgctcgataccatcgtactgctgccgggccaggaaagcatgcacgtccgggcatccggggggatttcctggtatccggacgactccgccgactatgaggaactgatccgctacgccgattttgccatgtacaaggtcaagcgcaccgacaagggccggttcaaggagttcgaccgcgagacctacgaccgggaacggtacctgctgcagggcaaagaaacgctcaataccattatcgagcggtcccttatccggtaccagttccagcccattgtggatgccgcgacgggtgacattttcgcgtatgaagctctgatgcgtccgcagagcgacgccatcagcaccccggaacagctcctgtccctggccaggtcccagtccatgctgccgcagatcgagcgcctcacctggttccaggcactcgcctgcttcaccacccagcccttttcccagaccggctgccgcctgtttgtcaactccattgcgagccaggccctgtctgagccggatatccgggaaatcgagcgcctatacgggccttatctgaaccggctggtcatggaactgacggaggaagaacggccggacagcgatgccatgcagcataagctccgcctcgccggccgttggaacgccggacttgcgcttgacgatttcggcatgggctacaacagcgaggccatcctggtagacaccccgctgcagtatgtcaagctggacatgtccatcatccggcatatcgatatcgatcaaagccgccttaagctgctgcaaaatctgatctcctactcacgcgaacggggcatcgccgtcatcgcggaaggggtggagactcgggaagaaatgcgggtcctgatcgaaaacggcgtggattacctgcaggggttctatctcggccggccttcctatgacgtgtacaccctgcccgaaacgctgcgggctgatatacgtggattggccaaaaaccggctttgacaactctttggatgatccgtataacccgccgctttgccgcgtatactaaagcggaccggccgctgtcatgggaggaatggatatgtcaaaagacaaccgcaaagtggtgctggtgggcaccggcatggtagggatgagctacgcctatgccctgctcaaccaaaacgcctgtgatgagctggtgctcatcgacctcaatcgggaacgggcccagggcgaggcgatggatctcaatcacggtctggccttttcctcttcccatatgaagatcaccgccggggactacccggactgtgaaaacgccgatattgtggtcatctgcgccggcgtggcccagaaaccgggggaatcccggctggacctgcttcagcgcaacgccaaggtgttccgctccatcgtcgggccggtgaccgaatccggcttcaacggcatctttttggtggcgaccaatcccgtcgatatcatgacccgcatcacctgcgccctctccggcttcaatccccgccgggtactgggcagcggcaccgcgctggacacggccagattgcggtatctgctgggggaatatttcgccgtcgatccccggaacatgcacgcctacgtcatgggggaacacggggacagcgaattcgtcccctggtcccaggccatgctggccaccaaacccatcctcgacgtctgccgggattcgggaggacgctgccgggtggaggacatggaaaggatcagcgaggaggtccggagcgcggcccaacggatcatccaggcgaaaaacgccacctattacggtatcggcatggccctggtccggatcacccgggcgattttcggggacgaaagcagcgtgctcaccgtctctgccatgctgcggggggaatacggggaaagcgatgttttcaccggtgttccctgcatcgtcggccgaaacggcatccggcgggtgctctccctctccttgaatgaggaggaaaccgccaagttccatcaatcctgcgagaccctgcggcaggtatatggagaattggggctctaacacgggccctggcttcctctatgaaggaaaaagcgtgggcttcgcccacgctttttctgtcgcaacttgacggccgtgcccatccggtgtatcctgtcccatataggcaaacgctgaaatccggcgcttacctaagacaaacggaagggggaaccggtgccatggactgccggacctatccgctcggtacgctggaatcctacacatatgtcgtggttttttccttatacgagggcaaactgctgttcagccggcacaagcggcggggcacctttgagacccagggcggccatatcgaaccgggcgagacgcctctcgaagccgccgaacgggagttgttcgaagaatccggggccgtcggttacgagatccggccggccttcgactactgggccggagacgctgccgccggcgcgggcgggagggtgttcgtcgcccgcatccataaaattggaagcctgcccgagagcgagatagcggaaaccgccttgttcacccgcctgccggagaatctgacctacccggacatcacgctggtgctctatcggaaggcggtgcaggatggctggctgtgattcggagtccggctgttttctgccggaatcccccatcctccttctgtttgtgcggaagggggatttttcgtatttcccgaaaatgtttacattttcccggttgatttttcttccgcgggcggtgtacactgcaaaagaatctgtataggaacgaggaagccgccatgttttcacgttacagcgtcaagaagcccctgaccgttgtcctggccgccctgatggtggtactgctcggggtgatctctttcaccaagatgcgcaccgacctgctccccgagatggacctgccctacgtggccgtggtcaccgtctacgcgggcgccagccccgaaaaggtggaaaccggcgtcaccaagccgctggaaagcgccctatccaccgtcagcggcgtacatacggtcaccagtatctcacaggagaacaccagcatggtgatcttcgagttcgaatacggcaccaacatggatcgcgccgttatcgatatgaacaacaagatgggtaccgccaccgcctccatggacgatgcggtagggacccctatcctcatgcagatcaatcccgacatgctgccggtgatgatcgccagcgtggatgtggaaggcaaatcctccaaggatatcacccccttggtttccgagacggtggtccccgctttcgagcgcctgaacggcgtggcgtcggtggaggctatggggctgatcgagcggcagctcaaggtgtctctcagccagcagaaaatcgacgccctcaacgaccgtattctggaagcggtggaccagaagctcgccgaggcccaggagcagctccgggagggagaaaccgccctggaagaggcacgggccgcttttgagaaagagagcgccgccaaaaccgaggagctgaccaaagccggcctcgaactggaacaaggcaaaaatcagctccagcagggactctccaccatcgccgccggcctgctcaccgccgagagctccaagacccagctttccgccctgcgggaggcggccgcggacctgatgggaaatctctcccagagcgggacagagctgctggggccgctgggcgaactgctcgagaaagcgcaggcgctcggtgtccttacgcccgagcaggccgacgccatcctggcggggctggacggcactgccggggacatccgcggatcggtggaagagctgcttgccaagctggacggcgccattgaagaagccgacgcggggatcgccgaggccaaagcccggcaggcggagctgtctgccgggctcgacgagatcttgaacggggaacagcagcttgagcagggcaagatcgccctctcgaccggcctggccgacgccaagcgacagatcgaagaaaacgccgccgccctggaacaggcccgcgccacattcgaaagttcccgggataccgctttggagcaagccggggtggatggtcttgtcaccatgcagaccgtcaacaccctgctggcggccaacaatttctccatgccggcgggaagccttgccgaggacggcggggcggttccggtcaaggtgggggatctcttttccagcgtggacgaagcggagcagatgcccctgttctccgtatccgccggggagatcggcaccattcgcctgtccgatgtggccgacgtgttcgagaccgacaacgctggagagacctacgccaaaatcaacggaaacgatggtgtcctgctgaccatgcagaagcagagtaccgcctccaccacggaggtctccgacctcatccgggagaccatggcagagctggaggccgccgaatccggcctgcatctgaccgcgctgaacgatcagggacagtatatccacatcgtggtcggctcggtgctgcaaaacctgctcatgggcggcgcgctggctatcgtcatcctgtttttcttcctgcgcagcatcaaacccaccttcatggtggcggtcagcattcccctgagcctggtactcgccgtggtgctgatgtatttttccggcgtcaccctcaacgtcatctccttagcggggctggcgctcggcgtcggcatgctggtggacaacagcatcgtggtcattgaaaacatctaccgtctgcgggcgcaggggatgtccgcggcgaacgcggcggtcaagggcgcatcccaggtggccggggccattgcttcctccaccctgaccaccatctgcgtcttccttcccctggtctttaccgagggaatctcccgccagctcttcaccgacatgggcctgaccatcgcctattccctgatggccagtcttctcatcgccctaaccctagtcccctctctctcctccctgctgctgggacgggtgaagcaaaagccggaaggcctgttcggcaaattcgtgtccggctacgcccgctccctctccttcactctgcggcacaaggcacctgtactgatcggcgcggcggtgctgctgggggtaagcgtttttggtgtcacccggatgggcaccgccttcatgcccgacaccgactccaaccagatttccgtatctctaaccactcctgatggtacttccgcagccgaaacccaggcaatcagcgaccaggtgatcggacggatccaggggatcgagggggtccagaccgtcggcgcgatgcagggcggggaccaggcggtgacgatgtacgtcctgctcaccgacggcaagcggggtaccagccaggagatttcccgccggatcgtcgaggagaccgcggacatgggctgtgagatcactgcctccggatccggaatggatatctccgccatggccggctcggggctgcagatcgacatcaccggggacgacctcgacaccctgcggcggatcgccggggacatcgccgctctggtggaaggaacccccggcacagccgaaatctcggacggtatggataagacaagtcccgaaatccgcatcacggtggataaggaaaaggccgccgcctacaacctgacagtggcccaggtgtaccagagcatcgccggggccctgcagactgaatccaccgccaccaccctgtccgccgacgcgggcggtatgccggtggtggtggtccgggcagaggaggaccagctgaacagagacgggcttctcgccttccccctgaccggcaagaccgacgagggagaggtgtccgtcaccctcggggatatcgccagggtggaggatgccgaggggctccagtccatccgccattccgaccgggtccgcaccctgtcggtgacggctgagatcgatccggaccacaacatcggcttggtcagccgggaggttcagaaaaaactggacggctataccgtcccggaaggctaccgggtcacgctgaccggtgaaaacgaaaccatcaacagcaccctgcgggatctggtgctcatggtgctgctggccctggtcctcatctacgccattatggccgcccagttccagtccctgctctcccccttcatcgtcatgttcaccattcccctggctttcaccggcggcctgctggccctgtggatcctgggcttcgatctgagcgtggtggccatgctgggcttcctggtcctctcgggcgtggtggtcaataacggcatcgtctttgtcgattcggtcaaccagctccgcctggaaggaatggagaaacgggacgccatcgtggagaccggccgccgccggatccggcccatcctgatgaccgccctgaccaccattctgggcctgttcaccaccgccctggccgtgggacagggagccgatctgctccagcccatggccgtggtcatcatcgcgggcctggcttacgccactctgctgaccctctttatcgtacccgctctgtacgacattttccgccggaaagagttaaagcgggtcgaattggacgacgataggccggatgcctccgatccggccccgcagcagccctgatgaggccgcctcgatagaaacgaagccccggccgggagccggggcttcgtgctgtttgtttcaggccaatccgaacacttgccgcaaggtgtcgcacaccccgtcctcgtcgttggttttaccggtgacgaaccggcagcgggccagcagctcggggtggccgtttttcatgccgtagctttgcccgcaggcctccatcatttcacagtcgttgaggtaatcgccgaaggccatgcaagcatccggagagatcccgtcccgccgctgcaaaaaggcgagcgcgctccctttgtgggcggacgggttgctcacatccacccagtgctcgcccgacagcgtcaccttgagggtcggataccgtgcacacaaggccggatacaccgcctcttccgccgatccgggcacgtaaatcgtcaccttgcagatccggtccttaccaggcaccccgtaaaggtcctccacatgctccaaacggtcgtaatacaaccgaacctgctcttccagagcgggatcctcccgttcgatataggtggccagcaccccacagaggccgggcaccgcgccaggcagcgcggtgctctcggcaatcagggagcgcacatcctccttccgcatttcgtcataaaagaggagctcccctttttcaaacaccgccgcgccgttttccgccacgaaagtcagacggtccgcaaccgggcggaacagcgattccaggttataatattggcgcccgctcgcgatgacgaaccggataccctggccggtgagctcccggatcatcggaaaaatccccgccggcaggcggcttcgggaatccagcagggtgccgtccatatcggcggcgatcagacggatcggcgtcatgtcacatcctcctcaagcaggggtggtcgttcttccccggcgattatcctcagtgtatcaagatcccgtccccctgtcaaagagcggcggtcaatttttcccctttgtccagattccctgcgttttacccgccggatccgtctattttgtcccgcttccgcggacggtagcccctgttccggcgctcgtccccccggcggccgttattccgggaaggagcggatcggttccacacaaaaagacggaatccctctccgattggacaaatttacgaaatcgtcacaaaaacccctttacattgccgcgccatgttgtataatatagatggataatcccggttatccgaatagaatggatgcgcaatccgcagccgcgaagggagtacaccagcatggaactgaccaatttgatttccaccagcgataccgttgacatctacaaggtcggcaatatggccgtgaagctgtttaaagaggggacggccaaaaccgccgctctctatgaagcactgacccattcccgcgtcgaggcgaccgggctgcgcgtccccgtcatccatgaggtgtcggtcatcggcaaccgctgggccatccatatggattgcatcgagggcgaaaccctggccgaccggatgaagaaggatccggccaatatggaccgctatatcgagcagatgctggatatccagctcgagatccattccaagatcaccccgaagctcagcaaactcaaggataagctgaaccgcctgatcaattccctcgactgcatcgacgacgtcaaaaaatacgagctgctcacccgcctggacagtatgcccaagcacgtcaagctctgccacggtaatttcatgccggaaaatatcatcctcagcgacaagggcacctatgtcgtcgattgggtcgccgcccgccagggcaacgccagcgccgatgtaggcaaaacctatctgctcctctgcctgaaaatgccggatattgcggaaaagtacctcaaccttttctgcgaaaagaccgggaccagcaagcggtacgtgcaggagtggctgcccatcgtggccgccgcccgcctgaccgaggaaatccccgaggaaaaggatttcctgatgaaatggctggatgtcgtcgcgtacgaataaatccgtctctcttgagcagggcgggttcctccgggaacctgccctgtttttcgtccttccctcccgtttccgcttgctaaactcgacgctctttgctaaaatggaagtggactcgacctcttttcggccgcttcggctggctatatatgagcgaaccgcccaaattttaagtctatttcttgtgtaatactgtgaatataccgggattgacagcgagcggtggatgccgtataatgaagttgttaaaaaaataacaatttatgagtttgtgggcaagcagtcaagtacaatcaaaaaatgggaggaacccgatcatggagaaaaaggatcaaaaggccgtccccctggtggacaatctggacgcgctgaatgaaaagctgcggcaggtgcgtgaggcacagcgggcgttcgccacctatactcaggaacaggtggacaacatcttctacgccgcggccatggcagccaaccggcagcggatcccgcttgccaagatggcggtggcggagaccggcatgggtgtggtggaagacaaggttatcaaaaaccattacgccgctgagtatatttataaccagtataagaacaccaagacctgcggcgtactcgagagcgatccggccttcggggtgcagaagatcgcggagcccatcggcgtggtggcggcagtcatccccaccaccaaccccacctcgaccgctattttcaaggccctcctctccctgaaaacccgcaacggcatcgtcatcagcccccatccccgtgccaagaagtgtaccatcgaggcggcccgtgtggtgctggaggcggcggtggcggccggcgcgcccgagaacatcatcgcctggatcgacgtaccctccctggagctgaccaacgcggtcatgaaggaggccgacatcatcctcgcgaccggcggccccggcatggtcaaggcggcctattcctccggcaagcccgccctgggcgtgggcgccggcaacacccctgccattatcgataaatcggctgacatcctgctggccgtcaactccatcatccactccaaaaccttcgacaacgggatgatctgcgcctctgagcagtcggtcattgtggacaagaaggtgtatgccgccgtcaaaaaagagttcgcggccagaggctgctatttcctgaatcccgaggaaaccgagaaggtccgcaagaccatcctgatcaacggcgccctcaacgccaaaatcgtcggccagaaagcccacaccatcgccgccctggcggatgtaaaggtgccggaggagaccaaaatcctcatcggcgaggtggagagcgtggacatcgaagaggaattcgctcacgagaagctctcccctgtcctggccatgtacaaggcggactcgttcgaggacgcggtgaaaaaggcggaacagctcgtcgctgacggcggctacggccacacctcctccctgtatatcgacgcggtgaacgaaaaggagaagatcggccgcttcgccgcggctatgaagacctgccgcattctcgtcaacaccccctcctcccaaggcggcatcggcgacctgtataactttaagctggctccttccctgacgctgggctgcggctcctggggcggcaactcggtcagcgagaacgtgggcgtcaagcacctgctcaatatcaagaccgtggccgagaggagagagaacatgctgtggttccgggcgcctgaaaaggtctacttcaagaagggctgcatgccggtcgctctggatgagctcggcaccatcatgcacaagaaaaaggcgttcatcgtcaccgataccttcctgtatcaaaacggctacgtcaagcccatcgaagagaagctggacgagatggggatccagcacacctgcttctatgaggtagcccccgatcccaccctcacctgcgccaagcagggcgccgcggccatgaccgccttcggccccgatgtcatcatcgccctgggcggcggctccgccatggacgccggcaagatcatgtgggtgctctacgagcatccggaagccaatttcgccgacatggccatggacttcatggacatccgcaagcgggtctataccttccccgaaatgggcaaaaaagcctatttcgtggcggtgcccacctcctctggcaccggctccgaggtcacccccttcgccatcatcaccgacgattcctgcggcgtcaagtatccgctggccgactaccagctcctgcccaacatggccatcgtggacgcggacaacatgatgaaccagcccaagggcctgaccagtgcctcgggcgtcgacgtcctcacccacgctctggaggcctacgtctcggtcatggccagcgactacaccgacggcctggccctcaaggccatgaaaagcgtgctgacttacctgccctccgcctatgaaaacggcgccaaggatcccattgcccggcagaagatggccgacgcggcctgcctggccggtatggccttcgccaacgctttcctgggcctcaaccactcgatggctcacaagctgggcgcctaccaccacctgccccacggcgtggccaacgccttgatcctcaccgatgtcatgcgctacaatgcgtctgagacccccaccaaaatgggcaccttcccgcagtacgcttatccccacaccctctcccgctatgtggaatgcgcccactactgcggtatcgtgggcaaaaacgaccaggataccttcgagaaattcctcgccgcgatcgaagatctcaaagaaaaggtcggcatcaagaaaaccatcaaagactatggcatcgacgaacagaccttcctcgacaccctcgacgaaatggtcgaaaatgccttcgatgaccagtgcaccggcgcgaacccccgctatcccctcatgagcgagatcaaggagctctatctgaaagcctattacggcaaataaccctccccccatacagcaggcggcgcatcgatcgatgcgccgcctgcttttcgtatagcggtatggtctcataacaccagattccaggtcacagaatgccaaccttaaggcaatccgtgagcagaaaatgaggaccttgcgactggaagacggttaaaattgcccttttcagtcccattttcatgttgtatcccgatttttattgcctatttttggatcggcatggtatgctgaactggatgctttatcttattattatataaaaggaggtcaacatgaaaggaaaaattttcgcatgctttgtcgccgccgctctgctggcggccggcatccccaccatggtttcggcggaggatcccacctacacggatatcgattacacgcaaacggtgacgctgggtgaaccgaccagctatacccacgacggggacgacccgtatatcgagctgcaaacccccgattggcagggctacgccaagggatataccgtgaccttggaggcggacaagctttatctcatcaccgccgcggtcacggagccggaggcggactacaccgaccgctgcgtctcgatcctgaccggcggcgagctgaccggttcggaagaagacgatctgattatgtacaagacgggctatgccgacggccccagctgcacaaccaccttgcttttccggccggaggcggcgggggactaccgcatcctcgcccacggctatgctacgactgatctgggcgaggtcggcggcacctgtgtcctgacggtcagcgagctggacacgacggagggcgtggccatttcgacgaaacaggagctcctgaatttcgccgccgaggtcaacgaaaacggtcagccggatgacgccactgtgatccgcatcacggccgacatcgacatgaccggtgaagactgggacggcatcggccggttagcgggcgtgtatattttcggcggcgggcacaccgtcaccggcctcggcgccccgctggtccagggggccgaggccgtggtcatcgacggcctgcatctgcgggatatcctctttgaaatggagaacgagtccggtgccctggattccatcggcgggctcatcggggaaggccacaacgtcatcctccaaggctgctccgtcaccggccggatccaactgacggcggagaatgtctatgctgtcggcggcctggccgggtatctggacggctctactgtaacggaatgctccgccgacgtggagctcgtgcttaaggccgcggaagagatcgggcgtgccggcggcctggccgggtacgtcgattatgactccgccttcatcggctgcgccgcctccggcagcatccaggcgacggcgccgtatatgtatgcgctcggcggtttggccggctactttgaggactataacaccgtccggaacagccacgccggcgtggccatctccgccgcagccccggagggcggcagcgccgaagcgcacgatctcggcggcctgctgggatccatcgacgagagcaaccgcttcgtcaacagctacgcctccggcgggatcacggtcggggatgaggtatacggcaacaacatcggcggtttcgtcggcgattcctcctgctgcggcggcaacctgatactcaactgctacgccctcggcgacgtggaaggggcggaggatgtcggcggcttctttggggaagcctacgagtacgactttttcatcaactgctacgccgccggcagcgtcgcctataaggaacccggggccacccccggcgacacgcccgtcccctatatcggcgccttcatcggctacacggactatccggaccggctggactttatcagcgcctttgcggcggagaacggcggcctgcccctgttctggagctatgacggggacgcggatgtggccctggaggacgtcatagggcttgacactctcgactttagcagcgcccccgcggtaggggagatgctcgacgctttcaacgagatcgtcggaccgtacggcgaggaattccgggaggagctcttccgctgggccggcagcaacgagaaaaacgggccggttttcgccaacctgaccgtcacctttgtggatgacgacgataccgtcatcaaaaccgtgaccgaggtgtacgccggtgaggatatcacctcgaaagccccggcgctgccgtcgagagacggcttcaccaccgcctgggaccgggatttcaccaatgtccaggagagcatgacggtccaggcggtgtacacggagatcccggaaccgccttcctccgatccgggatccggatcggatccggggcccaccgcccccggatctcccgatacgggcgttccgggttccacggctgtccttctgctggcggcgctctccctcgcggctgtctccggtcttacggcggcgaagcggaaaaaagtcggtttaggctaacctaaaagggacggcaaaacggcataaaacagtataaacctgttttcgggaaacggcatggcatagggccatgccgtttcctcgctttgcaggccataagagcaggaacacagagagtatcccacgaggacggaacgtatgaaaggcgcagacggataaaccgtttgcgccttcagatccatatagacagtcagagcatacagagggactgtccttcgatatgcacggggctgtttggggacgttacagctcttcgggagggttctccgcgccgacctcggccttcttcttttttcgcaggatcaaaacgatcaccgcagccgcggcgagaaggcagacggccaggccgatcacgagcggatagacccagccggatatggcggcgccgatatcctcattttgacgggagagatcgacccccgcgcccgtgccttccacaggagaggataggtccggggaaaccggaaggggcccgctccctgaaggggaggagtcctcgccggaagaacccggctggttttgaccggacgtctcgcaaagtccggtatacagggtttctttgcccgcccgatcgattaaaatataagtgatctggaaaaccgggccggttttgccgccggttttattttgcagccggagtgaaaacaacggctgtgcgtcaagccccgcaaaggcggcattttggggctccagaagcaggagaaggcggcccgaattccactgcggcgacaccaaaacccccgcatccttcggcagccaggaaaaggaatcttcccgcaaactgaaatcgcccggctgcaaggaaagctcgatttgggcgtaagagatgccggttccctccggcagtgagccaagggagaaggtaacggagatgtccccgttatcccctggagcggaccgcgccgtcaacgcgggagtctcctccgcgaaggcggcaggcgcaaagaggaggacggccagcacaaaaatcccaaaaacagcaagaactctcttcataatgtgccctccctaccagcccataatggcccggatttcttttgcgagcacttcggcaatcgcggtttgtccctgcacattggggtggttcgcccagcccgatgtgttctcgggcagatgcacaaaatatgcgtttttatcctgccgtgcaaacgtttcgacagcgg

SEQ ID NO: 2944 - DNA, 2224 bp, Unknown
  16S sequences of unknown bacteria
tggatgcctcctacaaaattcagagaggcatccatgtgcacctaattcaattttttatgtgtccagaattctgggtacatatcactgggtgccttcgctttttgcttctgttctgcacacctgaaactgtcagctaacaggaataaggttgaattagttccttatcgctgttaaatcaacagagaggggtcaaaaatacaccgacagccttttagcagatatttatgcagtggagggaaaagcaatcgttgaaacgctaaggaactaccctccggaattcgtatctgcattagaggatttcagtaatcgtttatatcacgaatttatggggacatgtcagagcgaaaaagggaggagtgaaaatgggtagttcgcagttatacgcgaagacaagcccggtaaaactgttttttatgattgcgattcccggtgtaatcagcatgatcgcttcttctttatggggattattcgacggaatttttgtgggaaatttgatgggggaggctgctttcgccgctcttcatccggcgtttccatttgtactgatcaatttctcgctggcggatttaatcggtgcgggctcttcggtcaatatttccatctttttaggcaaaaaagaaaatgatgaagcaaacaattatttcacctgctcgtgcttgatgattatcattacaggcgtgatattctttttcgccgcaccatggcttatgcagttcatgggagcagagaaagagctggcagatttggcgatacagtatatacgggtatatgcgatagcctcgccttttacaacgatggtctttgctgttgataattttcttcgcatctgcggaaaaatcaaaagcagcatggctcttaatattgttatgtcgatcctccatattaggtctggaatatcttttttctgtaacaaaaaatgtgcggcacaagtaggaacttctattttgccgaaagcataaaatgatacaaaatttgattatcaggcaaaggagaaaatatgatgcaaaacggtattgatgtggcaaacatcaacggcgcgatagactggcagcaagtcaaagcgtcgggcattgattttgtaatcatccgtgcgggctggacccattatgcgggagggctgaccgaggacaagcggtttgcccaaaatatggccggagctgctgcggcagggttggatatcggcgtatatgtttattcctatgaccgttccgccgaggcagcgcacattgctgctgaaaagcttcatacattgctgagtaactatggaaccatcaattatccggtatggttcgacatagaagaccagtggaatttgactgcgggaaaacagttgaatacacaaatttgtcaggcgtttctctctcaaatggaagcttacggctattacaccgggatttacagctttgctaactttttgcagggctatctggatatggaagctctttccgcctatgacgtatgggtggctgattatcgcgacccgatgaaataccctgggccatacggtatctggcagcacggcatagtcggcagccagggcgtttttgggcgggattatacgatacgcggccaagtgccggggctgagcggaaactgtgatgtggactatgcctataaagactatccgaccatcattcgccgtgcaggtctgaatcatctgactccggaaccagagccagaaccagagccagaaccagaacccgatccggagtgtgaacagctgaaaattcaactcaaaaaagcagaagcggcactggaagaaatcgggcgcatcgttgccttttggcgggagggtttctccggtcaggaagattgaaaattacaagagcagagagaagaatggtaaaacaaaaattgggtgttgctttgttttggctgtgatgcctgcgtggtgatctgcccattgcccggcggtgcttggttggcgcattcaccaatgaatcgggagaagtttttgcctgggaaaacaaaggcctgacaacgcaaaatcgcacgatgtctgacaaaaaacagccgtgccatccgaaagaatcgggtcaggctcagctgtttttgcatgcgaaaaaatcaggtttcctgtcgatcggcaggaaagaccaataggcggatacgttataggagagaatgctcaatccccatggcgtatggtggcaaactggtgaaaagaaaaaaatgggaaacagggaaagtttatcgttttatcatggagagatttccttttttc

SEQ ID NO: 2945 - DNA, 25792 bp, Unknown
  16S sequences of unknown bacteria
tgcgctgatgatacttggcgggaagctgcccgggaaagtaggtcgttgccggtttgaaaaagcagatacttaattgtatctgttttttgtttatatataaaaaacatgatgcaatgacaaatatatgagaacaataaaagcgataaatttaaataaatacaaaagccgtatctgaggtaatacggcttttgagtgtctgtgcgagttttaataatgtgtaagttaaggttgacaatttaaatttaagtctcgattatttgattatttaggctgtataatctgtacatttacaccgttaggatctttgacgacgaagcacatgtttgtaggaccctgcggagcaggctcggacttgatgattcctctcttttttgcttcttcgtactgtttgctgtaatcgtcgaagaaagtcccgatgtagatatggtcgctgtcgcttgcttctgtctttttcttgctccagatgagttctacttgcataccgttttgatccttaaagaatgcgatatccataaattcgttcggcgaaaatgcagcacccggttccataccgaggaaatctctgtaaaattcttttgattcctcaaattttgtcgtaacgatagttatacaagtaagtttcatagtttacctccgaattatatattttgaaatatgttttgaattcggttaaattttctatgcgcatattttagtttaactttctttctgatatcattgtagcagaagatatttgatatatcaaatatatatgcggtattgcttcgtatacttgatgagtatcgtagaacttgtaaatgttaaagcgtaccggtggcttcaaggctgagaagtgccgccttcatcccaagtcctcctgcatagcctgtaagcgaaccgtttgcgcctattactctgtgacacggcactgcgattatgataggatttttattgttggccatcccgactgcgcggcttgcttttggattgccgatggcggcggcaatatctttatatgtacgcgtttctccgtatggtattttgcagagttcagtccatacttttttctgaaatgccgtaccgcgcagtttatatggaaaattaaatgttttgcggctgccgtcgagatattcgttaatctggcggtatacagtatcagtcaaaaaactttttttttctaatgttttatttgtaatgctgtcaaagcttgagctgtccaatttttttatcgcgataactatatctttgtcgtattctattttgagaaatccaaagtgaaacgggtaaatggcaaaattagacattttatttaactccttttcttctgtattatgttatcattatatcagaaatcaacttgcagttcttcttaatttcgtaaatttaatttgtatttgcagcagtctacattgtatgatatactgatttacaaaatgagcagtggtgagataggggtggacttacggtgaagaagcaagaattgtatcaatttttacgggcaaaagatatagtttttgagattacggaacacaaggctgtgtataatatggcggaagtggcgaaaatagggacgccgcatcctggtgcggatgcaaaaaatatttttgtacgcgacgataaaaagcataattattatctgataacagtaaagggtgacaaacgcgtagatttaaagagttttagggagaaaaacgctacaaggccgcttagttttgcctcagagaatgatttgatgagcattatggggctcattccgggagctgtcacgccgtttggacttctgaatgacgatgagcggagagtgcagttttttattgataaagagttcgatattgaaggagctcttatcggagtgcatccgaatgacaatacggcaacgatatggcttaaagtgagcgacttgctaaaaattatagaagagcatggaaacagggtgcatattatggagatataagatgagtgctgtttgcggaaaatgagaaaatgcagagaagataaatctttgtatataaagaaatggagtgataataatatgtggttgttatttgcgctgctttcttctgtatttgcggcgcttacttcaatttttgccaaaattggaattgacggagtgaattccaatcttgcgacagcgataagaactattatcgtcctcattatggcatggggaatggtatttttgacgggtacgcaatcgggaatggctgatataagcaggaaaagctggatttttcttatagtatcgggaattatgacaggcgcgtcgtggctgtgctattacaaggcgctgcagcttggagatgtgtcaaagatagtgccaatagataaattaagcggggttttgaccattattttggcttttatttttttgcacgaggagtttacagcaaagtcggttatcggctgtattttaataggagcgggaactttatttatggtaatttaagcgtgtcgagggcattttattatttgcggcgtgcggagagcgatttttgtgcagcgtgtttgtcaaagacgcgttaatatggtataataatttgattgcagaattaaaagccaagagcgggttaagccgcttgcagagggggtgttaatgtgaagagtgtgaagccggggcgcgggccgtcgatgatgaatgcggcaggttcaatttttgcgatactgttcggaattatatggactgcaattgcaatgtcttcgggagcaccattctttttttcgcttttcggcatttgctttatagggcttgcggtagtgcaggcggtgtataattttaaaaatgcgacggggaagaacagatattcagcgtttgatatagtagatgaggatgaggagaatgatcctcttaatgaaagatttggcggcgaacgtgaaatacgcgaagcagttatgagagagcgtgcacagattgcggaagcagcaaaaaccgcgaatgcggcacaaaatgtagaaatgcaggaaaatataaaggcagcagatgggttttgtccttattgcgggacggaagcggagagcgattttgagttctgcaaaaaatgcggaaaacggttgccgaaagattagttatacgaagggagataagcggatatgggaattattaaaattgtatttgtggggctttgtgccgttccgtttgtttgtcttgcagtatttcttatttcaaagagcatagatgatgtgctgaaaaaataaattattaggaaaaattatgaaaaacggactttttatttcaatagagggaccggatgggtcgggtaagtcgacgcagatagaggtgctcaggaagtattttgaaaagcaaggtattgatgttttattgacgcgtgaacctggcggaactcccataagtgaaaagataagggagataatactcgataaaaacaatatggagatggacgatatgacggaggcgcttctgtatgcggcttcgagagcgcagcatgtggcagaggtgataaaaccggcgcttgcggcgggcaagatcgttatctgcgataggtttatagattcgagcatagcttatcagggctacggacgagagcttggcgattgtgtacgggtgataaacgagtatgcggtgcgcggctgcataccggatatgacttttttgatgaaaatggatccaaaagttggtaaggaacgcataagtgaaagcgagcaggacaggctggaacaggaaaagcttgattttcacaggagagtatttgacggatacatagagatggaagagcgttttgacagaattatcggtattgatgcggagaggagcatcgatgaaataagcgctgatattatttctcatattgaacgtataattggagaaaacgggcgaatttaggttaaaaaatccgatagattaagcctgaaaaagagaaacaaaactttaaaaggcagaaggacaggtaaaagatgacctttgacgatataaaagggaatgaaaagatatttgcaggattaaaaagagcggcgcttactgggaatgtcgctcacgcatatataattgagggcgatgcgggtgtgcaaaaggatatggtagctaaggcatttgccaaggctattctgtgcagagaaaagcgcggcgcaggctgcgatgaatgcgttatatgcaataagatagaacatgataatcacgaagatattttttatgtgagaaaagacggtaattcgataaaagacgagaatatgtcagctttgcaggagcgccttaaaaacaagcctctgggtgagcgaaatattgcgattgttgaagatgctgacacgatgacgctgagagcgcagaaccgtattcttaaaacactggaggaaccgccctcaggaacggtgataatcctcctttcagaaaacactgaaagtctgataccgacgattttatcgaggtgcgctgtcataaggcttgcccatacggaagatatagaagatgcggaaagcgcggaaacggccaagcgtgttgccgatagcctgatagatggaaaaccgtttgtcgaaataaagaaaatgctcagcagtgtaagtgagaacaaggacaaagcgtatgcttttctcgatgcgcttgagcatttttatggaaatatggcggtgcgtgatgatgaggcgagcagaaattacccgaaagaatacatttacagccgtgttggggatattgaggaggcacggcgcgacctaaagcgcaatgctgtaacaggttatgttataaaaagttttgtgctcaaagcgatgaattgaagcattatcagattgaatagggaaatataatctgcaaactgcggattgatgatatatgaaaatagaaaaaagcagggatgagaaaaactctgcgcagtgcataatgtaaggagaacagaaatggtaaaagtagtaggagtgaagtttaaaagcgtcggtaagatgtactattttgatccggatgattttgaactgccgctcggaactaatgtaatagtggaaacggcgagagggatggagtttggtacagtgagtcttgaaccaacggaagtggatgaatcggaaattgtctcgccgcttaaaaagattataaggaaggcaagcgaacaggacaaggcgcagcacgaagagaatatcaaaaaaaaggaaaaagcgcttcaaatttgtcaggaaaaaatagacaagcacgggctcgttatgaaactgatagatgtggaatacacattcgataacagtaaggtgatattttactttacggcggatggaagggttgatttcagagagcttgtgaaggatcttgccgctgttttcaagatgcgtatagagctaaggcagataggtgtgagagacgaggctaagatgatggggggcatcggtgcttgtggaagaagtctttgctgtaattcgtggctttccggttttgagcctgtttctataaagatggcgaaagtacagaatttatcgcttaatccatcaaagatatcgggcatatgcggccggcttatgtgctgtctgaaatatgaaaacagcacttatatggagcttaggcgcggtatgcctgatgtgggtgagagaataaagacgcgggatggtatagccgtagttgttgaatcaaatatacttgaaaataagataaagacaaggcttgtagttgaggaaaagcagggcgacaggccggaaaagctgagcacagaatattacacatataaaaaacaggaaattaagagacttgaaaaaggacataaacctaagaaagaagacttgtttgaaggacttgacggcgagcttcttgaagaaatcaaagatttgcttaaggactgagcgatatgcgaaatgatgcctttatattggagggggaacgcctcgacagcataggtttcggagatctcaggctgattcaaaagcctgaggagttttgttatggtatagatgcagtgattctcgcggattttgcggcgcgtggtttgctggaaaagggacgcgcgtataaggatggtataacggtctgcgatctcggcactggaacgggaataataccgctcattctgagtcataaactgcccgattctgcacagatattcggagtggaggtgcagaaggacagttttgagcgggcaaagcgaaatgcggcacttaatggactttcagcgcggcttcatatggtccttggagatgtcagtgacagtatgctggatgaagaactttgggatatgatgaaagaggtgaaaaaaggagcgcattttgagggttttgatattgtgacgactaatccgccttatacggagggcggccgcggcatagaagggaaaaatccagccaaagtgatagcgcgtcaggagacgagcggcacgcttgaggattttatacgtacggcttacgcgctgctcaaagaaaaaggcgatttttatatggtgcatagaccgtcgcgtcttactgatatttgctgtctgtgcaggaaatacagaatagagccgaagactctgcgctttgttagtccgagggatggcgaagcaccgaacatcatgctcgttcacggcgtgcttggcggcggtaaagagcttaaaatgtgtgcgccgcttgctgtttatgatggaaacggcagatatactcaggaaataagcatgatatacgagagatagacagacgcaagtacgcctgcaatatagccaataacgcctgcgggaagtgcgtggcgcagtttttttacggaagtgacgccgtagtaaagtgcgagcacgtaaaaaaccgtttcacacgagcctaccataacgctggcgcttgtgccgacgaggctgtctgtgccatatgtacgcataagcctttcggcgagcacgatagagccgcttccggatacggggcggagaagtatgatcgaagtgagttcccgcggaagcccgatgagttccataaagggaccgatgagtttttgaaaaaattccattgcgcccgaggatgttatggcttcgatacctatgaaaatagctattataaacggaatcatttcaacacaggttttaagcccgtcttttgccccggccgtgaaataatcatagacgggggcttttttgtatatgccgtagacgattacgccgatgattattatcggtatgaaaagggaagatatttcgtttaatagtgatgacatttgcgcattccgcatcagagatgcggctccttccattcatagaatttgcatactgcgatagatacagccatagagatgagccctgcaagtattgatgggattataataatgccgggattaggtgaaccgagatcagtacggatttttagtattgtaaccggtacgagctgtatcattgacatagataccgcggtgaacatacacattgtgttgctggcaagggtgctgtgcttattttgagcgtccattcgttccattgcttttagggaaaacacggtagcgctgttgccggcaccgaaaatattggccgtaaaactcataaggataaacgctatcgtgtccttatcgcgttccttagggaagagaaaacgcataaacggcgcggcaaattcggcgagttttcctatgagtccgcttttgctcgctatttccataataccgctccaaacagccataatgcctgcaagacctatcataaaattcacggcttcaccgcagcttgccataagaccatcagaaaaggacgaaagattgccgtttgcagctgcgaatactgctccgattatcagcatacctgcccataaataattcatcatagtaataaaagcctcctactctaataatactattcagggaagggaaaaagatgttgctatttttgtgcaattgagggataatatatatacggacaaaaaaaggaggtatcggcagatgcagataacaataacgatacaggaattagtactgctcatacttggaatagcaggtattgtatttgtattttatctcataggtcttgtaaaaaatcttacggagactgtaaaacatacaaacagagtgcttgaagatacagaggtgataacaggcatcgcatctagcaaggcaaaggatatagacgctgctgttgacggagtagtggaggctgtaggcattatatctgagcttataaaaggtaatcaaagtgcagtaaaagcggcgacaaatgttgtgaattcgctggcaggctttaaaaatattattagtcctaaaaataaaaatcaaaaagaataaaaagtgctttacagcaatttacaaaaatagtaagatgaatatagaaaagatattgctgtaagaaattgttgtaaaaacaggaggattataaaatgaaagctacaggaatagtacgaaaagtagatgaactcggccgcatcgtgctgccgatagagctgaggagaactcttgatatcgaaataaaagatccgatagaaattttcgttgatgacgaatacatacttctcaagaaatacgagccggcttgcatattctgcggcaatgcaaagaatgtaagacgcatcaaagagaagaatgtatgtgaagattgccttaaggaacttaaaaatataaaataaaagcagataaataggtattcggtgcaggccagatacctattgcttttgagcggaggaaaaaaacgaatgatacaatttgatattataagaaggacggctcccgatgtagcagaggcgatgaaggcggagcttaaaagacagcgcgacaatatagaacttattgcatcggagaattttgtttcggatgcggtgctcgcggctatgggaagtcaccttacaaacaaatatgcagaaggctatccggacaagaggtattacggcggctgcgagtatgtggatattgtagaaaatattgcgcgcgacaaggcctgcgagcttttcggtgcggagcatgccaatgtccagccgcattcgggagcaaatgctaatttatctgtgtatttttcgcttcttaagccgggagatacgatactcggaatgagtctgtcgcatggaggacatcttacacacggaagtcctgtaaatatgtcgggaatgtattttaattttgtatcttacggagtaatgccggatacagaaatgatagattatgataatataatggaaatagcgaagaagagtaagccgaagatgattgttgccggggcttcggcatatccacgcgcgatagacttcaagaaattccgcgaaatagctgatgaagtgggcgcgcttctaatggtggatatggcacacattgcgggtcttattgccacaggttatcatatgaatcccgtgccttatgcggatgttgtaactacgaccacgcacaagacactgcgcggaccgcgcggagggatgatactttgcaaagaaaagtatgcggcggcaatagataagggtttgttcccaggtacgcagggcggtcctcttatgcatataatagcggcgaaggctgtgtgctttgaagaggcgcagcggcctgaatttaaagaatatcagagcagagttgtttccaatgccaaagcgcttgcaaagagccttatggataacggcatcagacttgtttcaggcggtactgataatcatctgatgcttgtagacctcgggacggacggtattacgggaaaagagctcgagaagctgcttgacagagtgcatataacagccaataagaattctgtaccaaacgagacgagaagcccgtttataacgagcggactcagactgggaacaccggcagcgactacgcgcgggctcaatgaagaggatttcactaaagtgggcgagtgcatagctaagatgataaaagaaggcgaaagcactgttgacgaggtcacgaaggcagtcgctgaaataacaaagaagtatcctttgtatcctgaatcaatgtaaaacaatttcgggaggatttaagtggcgaaatttttagtaagaaacagcggtccgcttataggtgaagtgactataagcggttccaaaaatgctgtgcttcctataatggcagcgagcctgctgacaaatgaaaagtgtcagataatggatgtgccgcggctgcgagatgtcgatgtaatgtgcagcattctgagcagagtaggcgctgaggttgaagaagactacggcaacaatcagctgtatatagaagccggtgatattttagaaaacgaagctccttatgcgcttgtaaacaagatgagagcttcagtacttttgatgggaccgctccttgcgcgaactggacgagctaaaatgccgcttccgggtggctgtgcaataggagcaaggccaatagatttgcatcttaaaggctttgcggcactcggagcgaagatagaagagacgagcgattatgttgaggcaatagcagagaacggactcaagggctgcaatctttatcttgattttccgagtgtgggagctacggaaaatgtgataatggcggccgtgctggcggaaggaacttccattatagagaatgtggcagaagagcctgaaataatagatttggcaaatttcttaaacaagatgggggctaaaataaaaggagcggggacagataccatcaaaatagagggtgtgaaagagcttttcggcgtgcgtcacagtgtaattcccgatagaatagaaacgggaacttttatggtggcggcggcgataacgcgtggaaatatactcataaagaatgcacttccagatcatgttaagcctgtgatagcaaagctgagagaatgcggtgttgttatagacgattatctcgacggacttatggtgcgcggcgatgtaaatccgcttatcgcgacggacataaagactttgccgtatccaggttttccgacggatatgcagtcaatatttatggctttgcttgcaacgacggagggtacgagcaatgtaatagaaacggtatttgaaaatcgctttatgcatgtgctggagctggaaagaatgggtgctaagataaaaactgaggacagaaaggctacaatcgagggaacgaatgcgctgaaaggtgcaaaagtgctggcgacagacttgcgtgcgggtgcggcagtagtgcttgcaggtcttgctgccgaaggtgaaacggaagtgtcggagatatatcatatcgagcgcggctatgagaattttatcgaaaaattcaggtcgcttggagcggatatagagagagtagaagagaagataaaggatatataaaagacataaggatataaagacataaaaataatagaaaactcctttagcggttttatccgttaagggagttttcatttttaaggtacaataggggcttatctggtataaaataaagctgcatgcgcgttattcgatgatgacgccggtataataatgcgaaagaatttctcggtaattatatcctttttttgccataccattggcgccgtactggctcatgcctacgccgtgaccgtaaccatttgttgtaaaagtaacataatcgccatttgcgcttatatcaaaggttgcagaagcgaggctcagggcttcacgtatttcgcgtccgctgtaagaggcgctgccgacggtgaattcggatacagttccgccttcggttctggattttatttttacatcgtttgctgtaaagttaccggtataacggtctttatacttgccgttcagcctttctgcgaggtcaagcagcgaaatggtaacttgctcgtttttgtgcgtggcgtcttcttcgtaagggctgtcgacgctgcggaggtagggtacagcgctggcaaacacatcttctgaattttcggtgcggccgccgctcgatgagtgaaacagcgcttgagatacgagctcaccgtcgaagtacataagttctccgcgggtgctgtctactgcttttttaactttttcgtagccgtttttcatccattcttcgccctttaaagcggcgagagtttcttcgcttctgtacacttgacagtgaacatcgtcgcagagcggtgcgcttggatgagcttcgggaaaaccgctttctccggagcgcagtacttttgacaggctataggtgcgggcggctacggcctgagctttcagcgcttcgtcttcaaatgaagagggcatttcgctggcgacaacacctgtaacatagtcttcaaacgctatttttttggtttcccctgtagctgtaatatagacgcttatctctttgggaatatccgctttgttaatgcgcgatcttaatgcgctgtttacacctggaatacgcgaaaccgcagaaaaaagtccgatgatgacagccggaattatgatgagtgcaagcaggttgactgcaagagagtacccgcttgctatgagagcgtctctttttattttcttcataagtatttacctccgcatatgtatgtaaatctctatgataaaatatatgcggacaggctgcctgcttatgcgttttttacacttttaaaatattaaaatcgctttcgaggatggcgcgtccgccttcaaacggcggcataatgttccatatgctgatgccggcaaagccgtattcgctcacgagattgaacttggcctgccagcttctttcgtcttcaaaccagactacatgctcgcggttttcttcgtcgtagtagtaatagtaaggcgattgatattcttcgttgtattcgatggcgactccgtaacgtgcggctcttgcaacagcttcgccgttactgattttttcggctcgtgattcaccctgcacaaacggcagagtccaatcgtagccgtagtttggcatacccatgagtattttgtctggcggaatttccgatacgccgtaatcgagtacgcggcgcacggatggcagcggtgcgactggcagcggcggcccgtaggtgtagccccactcgtaggtcataagcagcacaaagtttgcagcctgacccataccaaaatagtcgtggccttgatagagaagtccgggctggtctcttgacgtttttggggcgagagcgactgtgacgataaaacctgcctgattgcaacgctctgtagcttctgcgacgagcgcggtgtattggtctctgttttctgcgagtacatattcaaagtcgaaatctacgccgaaaagctctttttcgtaaagtacatttatgatgttatctatgagattttcgcgggcagcgggattttcaagaagctgcctggcgagctcgttgctgaaaacaccctctgaatcgagtggagtaagcaccatgagattgccgacgccgcctgcttcctgtgctgcacggataagattttcatcgtcgaggtcaattatatctccctcgggtgtgaagccgtagctaaagtttgagagaagcgtgagcgatggaagccacgaggcaagcgaatcggggtcgatgcttggataggcatagccatttactatgatggtttctttttcattcataaaaacacctccaaaacaatatatgcaaaaatagcagttactttcaaagtaataatatgttaaaattagattaacagctttactttgaaaaaggagtgacaatggacaacaatttacgatatttgcagctgctcgcgaaggattatccgaatactatggcggtgttcaaagaaataataaatctcaaggccatacttgcgctgccgaaagggacagaatattttatatcggatcttcacggtgagcacgaggcttttatacatatggttagaagtgcctcgggcgttatacacgccaagatagaagaactttacggcagagtgctctgcgaggaggaaagagacagccttgctgcacttatatacaatccgcaggcggaaattgcacgcaggaagaagtcggaagaggatatgagcgtatactatagaaatgtaattttcaggctgatagaggtctgccgctcggtatctacgaagtacacgcgctcaaaggtgcgtaaacgacttcctcagtattacgattatataatggatgagctgctgcacgcggatgatgaagcgaacagggcttactattacagtgaaattataaattctgtcatttcgctcggcatagccgatacatttatatcggagcttgcggattcgataagcaggctagcggtggatcacctgcatataataggcgatatttttgacagaggagcgcaccccgatgatattatggattttctcatagaatttcacgatgttgatttccagtggggcaatcatgatgttgtgtggatgggtgcggcagcgggcaacattgcctgcatagcaaatgtgctgagaatgaacataagttataacaatttcgatatgctcgaaatcggctacggcatcaatttgaggccgctgacaacatttgcggagagattttacggaaacgatccgtgtgaatattttaagccgaaggtttttgacgagaataagtacgatccggtaggagcgctgacagcggcaaggatgaataaggctattgcgatttgtcagtttaaggcagaagggcagatgataatggcgcatcccgagtacaatatggaggaacggcttcttctcgataagatagattatgaaaacggaacgattgcaatagacggcaagacttacgaactgcgcgataaaaatttcccgacaatagatccgcagaatccatatgaatttacggaagatgagaaagacctgctgcgtcgtctcagagcctcgtttgagcagagtgagaagctgcaaaagcatataaggtttctctttagtcacggtgcgttgtataaggcgtacaacaacaatcttatgtatcacggctgtgttccgatgacggagaacggcgagtttgaagaggtgacaatctttgggaaaacgttaaagggcaaagagctgtttgattatcttgatgagcaggtgcgggcggcatattttacacctgaaaatgctgatggaaaagaagatgcgacaaatcttatgtggtatctctggctgggcagcaaatctccgctttttggcaaggataaaatgacgacgcttgagcgctgctttgtggcggacaagagtacgcacaaggaacgcactgtgccgtattattcactgatagaggataaggcgatatgtgaaaaaattttggcggaattcggactcgatccggagaacgcgcatatcctgagcggtcatgtgcctgtcaaagtaaaggacggcaagagtccgataaagggcaagggcaagctgtttataattgatgggggaatgtcaaaggcataccagaaagacactggtattgccggctacacatttatatataattcgcgatttatggcgctgtcagagcataagccttacagtccgctgaagagcgatggtacacaggagtttcatacttctactatgcgcacggtggagctgtttaagaagagaataatggtgcgcgatacagatcaaggcgatgtgattcagggtcaggtggatgatcttatgcagcttgcagaggcgtacaggaagggcgagataaaggaagtgtattaatgtgtgcggtgaacgctgttttgcgcttgtagtttgccgcttaagggtcagttctttaatttcaatttcgcggtaaaagagataatatctgtaattctgatagcttttattttagctttatggttaaaaagacaattataaaaaaattggagcgtgttttgcaattttttgtgttaggattgttatgttaacagataaaagcaggcagtagaaatgctgccggtataattaacaggtgaagcgttcgcaaaaagccgggaaaaagtcgggaaaatcaaaaaaatatattaaaatcagaaaaaataaaagccttgaaattattaaaacttcaaggctttttggtgcgcgtgaggcgatttacacaggcgcaatgctgcgcctgccgagctgcggctccccattcggtcgccttgctccatagcctattcaaacatccaccggatgttttcataaacggctatgcacttgcgtgttcgaatcgcttcattcatacaaataaaaatgtgactgggaaaatccagtcacattttttggtgcgcgtgaggcgattcgaacacccaacctgctgattcgtagtcagttactctatccattgagctacacgcgcaaatatatgtgtactttaatggtacggataatattatacaatcttaagtatactttgtcaaatagaaattatgaaaacaatttaaatacatatttttgtcgggaatgtaaatactacaaatataaaactgtgtggaggaaaagctatgcaaaatgacatagatatgcttaataatataagaaagacaacggaaatgggacagtacggcataaactccgtgataaattacgcaagtgatacagagctttacagggctttgaaacagcagcagactgagtacgataagatatgcgatgcggctgaccgtatgcttaaggcgcgcggaatttccggctctcatgtaggcgcgatggctaaaatgtcgacggatatgtcagcggcgatgaatatgatgatatcacccactgcatctaaaatagcggaaatgatgataaagggcagtactatgggcattaccaaaaatataaagaatatacacaaaagcggtgagcttagtgatgatatcaagtctcttgcggacaagcttgttgcgactgagcaggataatatagaacagatgaagaaatttttataaatagcttgacactttgcgcagatgcgatttatattagtaaagtgcgtagagcaagcgggacaagccgcccgacaaaaagataaacgggcggcgatatgtttgacagattatttaactgaagaagaggagtatgtatgcagtacataggattgatagttggatttgtattactgataaaatgtgctgactggtttgtagatggcagcagtaaccttgcaaaggctttgggcgtaccgacgctcgtgataggacttactatagttgcgtttgggacaagcgctccggaggctgccgtttccatttcggcttcggtttcggggcagaatgaaattgcggtgggcaatgcggtaggaagcagcatatgcaatttgcttcttgtgctcggtgcgagcgcagcggtgtttccgatggcggcgccaaggagcgtgctgaaaaaggactatatgtttgcggtgatggcggcattcgtacttatttttgtgacgggagatgtatttttggatggcggtctcggcacttttgcggatatgttgaagaattcttcgagtatgccggtaatttcttatgtgacgagaagcgaggggcttatacttctcacttttgttataatgtatgtgtactcgctcgttataggggtgcttgaaaaaaaggacggagagaaggaaaagggtaagttcagctggaaggactttttgatgattatcgtcggaatggcgggaattatgctcggcggcgatatggtagtggacagcagtgtaaaaattgcggagtcgtttggtgtaagcacgcagctcattgcgctgacggtggtagcgctcgggacatcgctgccggagcttgtgacgtcgattgtggcggcgagaaagcgagagactgatattgcgcttggaaatgtaataggaagcaatattttcaatatattttttgtgctcggctcagcagccgtagtgagcccgcttacgcttaatgctacggcatttgtcgatattctcataatgacggcggtgtcgataattgtgctggctttagcgagcttcagaagcaatatcagcaggcctaacggaatatttatgctgatgatgtatttcgcgtatacggcgtatattgtgatgcgttagttatggcggtaagaaaatgcggtgaaaaaacatattgacaaaagatttttaaatggtataatagtttcaattaccgattgtggatttactgcataggtcattaaaaacttgcagaaaaatggtgagttttgatgtaagtcatatacaaaggctgtgacgaagagggcttgacatttcttgtttgcagagagtcggcggttgctgaaagccgatagcgggggtgtcttgcagcctatggcttctgagccggaggttcgaaagtgcagattgaagtgcggaaaacgcacggctggtatagcggtaccagccgcgcaagtcgaaatttctatgcgccggtaggctcctcccgtgattgctgcgttaatgcatagggcttgatggagcctgagaggtggcatatttttatatatgcaatttgagtggtaccgcgggtatttcccgtctcaaagtttatttgaggcggattttttatattatgggatatttttgcagttaaaatatttaaatttaattttatatcaaggaggtaaaaaatgagtaattacagaatcgaaacgaagtgcgtgcagggcggatatacaccggggaacggcgagccgagacagatacctatcgttcagagtaccactttcaaatacagtacgagtgaggatatgggcaagctgttcgatcttgaagcggagggctatttttattcacgtctgcaaaatccaacctgcgatctcgtggcggcgaagatatgtgagctcgagggcggcagcgcggcgatgctgacatcttcggggcaggcggcaaacttctatgcggtatttaatatcgcaaactgcggtgatcatgtggtgtcttcgtcaacaatttacggcggaacttttaatctttttgcagtaacgatgaaaaaaatgggcatagactttacattcgtggcgcctgactgcagcgaggaagaactcgcagcggcattccggccaaacacgaaggctgtattcggcgagacaatagcaaatccggcgcttacggtgctcgatatagagaaattcgctaaagcagcgcatgatcacggcgtaccgctcatcgtggacaatacttttgcgacgccgataaactgtcgtccttttgaatacggagctgatattgtgacacattctacaactaagtatatggatggacacggcggcggtgttggcggctgcattgttgattcgggtaatttcgattggacagcgcatgcggaaaaattcccgggcctgtgcacaccggatgatagttaccacggtataacatatacggaaaaattcggaaaaggcggagcctttataacaaaggcaaccgcgcagcttatgagagattttggttctacacaatcgccgcaaacggcgtttatcttaaatttagggcttgaaagcctgcatgtgagaatggcgcgtcactgcgaaaatgcgctcgcagtcgcaaaattcttaaagtcgcacgagcaaatcgagtgggttacttatccggggctcgagggtgataagtactatgagacagccaagaagtatatgccaaatggtacctgcggcgttgtaagttttggcgtcaaaggcggaaggagcgcggcggaggcgtttatgggacatcttaaaatagcgtcaattgcaacgcatgtagctgacgcaagaacctgctgcctgcaccctgcaagctccactcacaggcagatgaatgatgcagagcttgaagcagcgggagtatcggctgatcttgtgcgcctctcctgtgggcttgaaagcgcagaagaccttatagaggatatagcacaggcgcttgctgcggtaaaatagggcagggcacagcgcataaactgaaaaaaggcagtgcgacattaaaaatatgacaagaaagtggtgaaaacttatgcctataaatataccgaacgagcttccggcaactaaagtgctggaagccgagaatatatttgttatgaatgaaacgcgggcgacgactcaggatatacgaccgcttgaaatcctaattttaaatctgatgccgacgaaaatagatacggagacgcagctttcgcggctgctcggaaacacgccgctgcaaataaatctcgagcttatgcacacgagcacgcaccagtcgaagaatacatctgaagaacaccttttggcgttttataagacttttgatcaaataaaggacaattattacgatggtcttatcataactggggcgcctgtggagaaaatggaatttgaagaggtagagtactgggaagagctcacggaaataatggagtggagcaagcatcatgttcacagcacatttcatatatgctggggtgctcaggcaggcctttattaccattatggcatccgcaagcatgagcttgcggaaaagatgtttggagtttttccgcataggctcgagcgcaagcgttcgattttattccgtggtgcggacgatgtattttatgtgccgcactcaaggcacacgagcatagcgcgtgaggacgtagaaaaggtgccggagctgaaaatactcgcatcgtctgaggaagcgggcgtgtacgcgatatccacagacggcggcagccagatatttataatggggcattccgaatatgatgcggacacgctgagaaaggaatatgagcgtgataaaaacgctggacttgaaataaaaattccgaaaaattactttccgggcgacgatgatacaaaggagcctcttgtcacctggagagcacacgcaaacttgctgtattccaactggctcaactattttgtatatcaaacgacgccttacgatataacaaagatacagaaataagaggtcataagctgcggaaacaggcgtattttgccttataaaaatattttgaaaaaatcttatgtttaaaaatccagtgttttgctgataaaacattggatttttataagcatagagtagtgaaaaatccaatattgtactaacatatgtttatttgcacggcagtttgtggtatactaacggtatgatatatgtaaatgagaagtataatacagaagtagaatttccacgtatattggctcagtattttgaaggtcttaaaatcggtgtgtttgatatagagactactggattgtcgccggattactgcgcgtttatactcggcgggctgggaacggcagacggcggagagcgtttgccgggcgcaggtacagaagctgccgggaatgaatatgctcaggccggcgcgggcgcctgcaaagagacagcgcctgagggcgcgatgaagatagagcagttctttgcggaatcgcgctatgaagaggaagcggcgctcgatcggtgtatggaagcgctttcggggctcgatgcagtgataacatacaatggaactcgtttcgatatgccttttgtgaaagcgcgcgcggcacggtacggacttgactcgatgtacgatacgccccataatctcgatctttatcatattatcaataaattttctgaactgcggaaggtgctgccgaatctcaagcaaaagacggtggaaaacttttttgggctatggaatacgagaacggacgaaatagacggcggcgaaagtgtggcgctttacgagcgctgggagcggcgcggtgagcgcgatttgctcgaaaaaatcctgcttcacaacagcgacgatgtgagacagcttacgaggcttacgcctatagtaaaaaaggccgatgtacatagagcaatgtctaatataggatttccggtaaaaagcctttcggtaaggggcatccgttttgaatttggcggcagtgcggcagatttgaacataggcagcggcggcaggcttacggtgtcgggggtgcagaggaaaaggccgctcagttactattcatacgatgcaagtggacggaagggtgacatagcattcgatgacaggagggctgaattcagctttacagtaccgcttaggcgcgttggagaccttacggtcatagaccttgacagggtacttccggatcataccgggctttccgaatcaccgttttacgaaagcggttttttgatagtaaagcagggagaagaatacaaatacgcggaaatcaatcattttatcagactgttcttgacgaaagtattggaggaattagcttaatgcgtacggtaaacagacttgaaaaggtttatcaaaacgcctgctgcattgattttgacgacagttcaaaattcgtgtttttcagcgatatacatcgcggtgatgacggactttctgacgattttggcagaaataaacacatatataacttcgctctcagcgattactataaaaaagggttcacttatgtggaggtcggcgacggcgatgagcttcttgaacgcccgaaattcgagcacataaggaatgcgcatgccagcacatttaacaggctcaagaggttttacgatgatggacgattttatatgcttttcggtaaccacaacataaaatttgcggatcccgaaaaggtaaaggacacgctttacagagtctatgatgaatacgagggcgaatacgttgatttgtttcccggaattacagtatatgaggcgctcattctcgttcattccgaaacggggcagaaaatatttgtcgtgcacgggcatcagggggacttgtttaacgatcagctcgcaccgcttacgcattttggtatcagatttttctggcgctttatgcatctcgtcggctttcgctatgcggcaagccctgcgaagagcaggcgcaagagacataaggttgagaaaaattataccaagtggaataaagatcacggtgagataataatatgcggacatactcacagaccgagatttccgagaccagaggaaggctcatattttaatacagggtgttgtatgcacccgcgcggtattacctgcatagagcttgaaggcggcaaattatcgcttgtagtgtggcgcgtgcatacaagcgatgagggtacaatgtatataagaaaaactgttcttatggggcctgcggacatacgcgactacgacggcaagataagcgccggcgcaggtacagagaaaaaataaatattttcggcataaaacgttacaaaacagcggaaaacagaaaggcggaaaacggcatatggattacagagaaacggcaagagtgataaagcaggacagcgtgaagctcggcgcactcggatgcgaggtcagaaacggtgcgctttatgcgataaaaaaagcgctcattgaaaataaagaggcaatttttgaagcaaacagagaggatatggagcaggcaaagcgtgaaagcctgccggcaccgatattgggacgtttaaaattcgacgaacataagcttgacgatgtgacaagcggcatagaaagtcttatttccataaaagatccgataaagcagacggtatttcgccgtgagcttgacgaagggcttgtgctcgaaagagtgacctgccctataggtgttatcggcgtgatatttgaatcacggccggatgcgcttgtgcagatatcggctctctgcattaaaagcggcaactgcgccatattaaaaggcggaagcgaagcggcaaggacgaacagagctctgttcgatgtaatacgaagtgcagggcttgctgcgggtcttcctgacggttttataaatattatagaggacagagagggaatagatgaacttctcaaatgcgatgactcggtggatctcataattccgcgtggaagcaacgcctttgtgaaatacataatggacaattcgcgtatacctgtaatggggcatgctgacggaatctgctgcatctatgcgcatgaagatgctgatgtggaaaagagcgtgaggataataatggatgccaagacgcagtatgtggcggcgtgcaatgcggcggagacactgcttgtgcaccgaaacgcggcgaataagctgctgcctgcgcttgcgaaagcggctgaaggaaaagttgcgctcagaggattttccgatgtaaaaaaaataatagagtgtgaaacggcaaaggaagaggactgcaaaacagagtatcttgattatatactgacagtaaaaatcgtagacagcatagaagaggcgatagagcacataaatagatacggctcgcatcatactgactgcatactgactgagagtgacgaagctgcggaaaaatttatgacttatgtggatagtgctggagtttacagaaactgctcgacaagatttgcagacggttttcgttacggctttggagcagaggtggggattagtacaggcaagctgcatgcgcgcggacctgtcggtgttgagggactcgtgacgtataaatacaggcttacgggaaacggacaaatagttgcagactacgcagaagggataagtacgtttaagtttagagaactctgatatagtttgatggaaaaacaaaagacgcctgaattttaatgtgatttaacaaattttaaaaattcaggcgtcttttcatgtaaaaagcagcagttttttcgatgcggcagaggtttagcaagtgccgaacagggctatcctcgtttacgtccgcccgcgcttatgcatctttgccgtttgtctctatgtatcttttgatttcggcaacagcattgtctatgtgctggctgagtgaaagctcatttatgcttacaacatgtatgtggcagcggtttataggcagcagtactttataggcactgcttgatcctatagctgtagccattttcggtgtgagttcgccgagcatcgagttggcgttgagtatggcgattactccgcagattatgtcgatttttggcatattgtgtattatagcgttttcacctgtggcgccgtcgtctgctccgcctcgcatcatttggcctgtggcggcggagtttgtgccgagggcgagtattgactcatccggcagtgcggcctttaatttttcacatatagagcgtccgatgccgccgccttggccgtctattaccgctattaccataaaacttcctcctgtaaataataaaatggtatatctaaagatattttatcattaaaaacggcatttttaaagcagaatatgcggctgcaaaacaaaacagactgcaggggagcagtctgttttgttcaaaaggggtattgggattagagattaatgaggttatcagggggataaccacgatttgattgtagcagagattgttgtaaaaagcaagtgttttgtcgaaaaaaagcagaaataagatttttttgacgagtaaaagcactataaagttcccaaaatatgttatataatgttacttgtaaataaaaagcctttgtattaggtattaaaacaagcattgaaaggggaaacaaaaatggaagtgttaaaagtatcggccaagtcaagtccgaattcagtcgcaggtgcgcttgcaggagtgttacgagaaaggggcggggctgaaattcaggcaataggcgccggagcgcttaatcaggcgattaaggctgttgcgatagcaaggggatttgtcgcaccgagcggtattgatgttgtgtgtgtgccggcatttacggatattcagatagagggagaagagagaaccgcaataaaacttattgtggagcagaggtagaagtaagggaatacggataatacataaaaagtatataaacagttttatgctcttaaatgatacgatatctatgtttagcaaggaaaagattaaaattcagagaaacgcttttgctttatttattaagcaaaggcgtttttctgtttgaaaaatagttgcgtaccaaatttttcaatgttacaatgtaagacaataaaacataaatgacaggagaagattttatgaacaaagttgttgacatcaggacagccatagacaagattaagtccggcgataaagttgcagtaggcggatttggcaatgtaggcggaccgatgaatcttttgtatgagcttgaaaagcatccggaaataaatcacctcacgactatttccgaggattttcagatgagtgagactccttataatcagggatttacgggtctccttttgaatggacagattgatgaaatcgttgtttcttttttcgggcataagaaggcgcaggctaaggtggatgctggcgaagttaagcttacgcttattccgcagggaactcttgcggaaagactccgagctgcgggcgcaggcctcggcggct

SEQ ID NO: 2946 - DNA, 32759 bp, Unknown
  16S sequences of unknown bacteria
ttgagtggctgcctgaaatagtgatgcgatgctaaaattcgtaccccagcagggggtagcaagtgttaatcccttctagggtctgtgcaaaccactagtttactagtggttttgttttatttgccccaaaacagagaatgtgacgaaaaagcggggtatgagaaaggggacggcggcatataatagagcatgaaaaaaagacgtatcatcgaatcggcggtgtgttttgtgctcgcgggggtattatgcgctctgtccgtatttatcgccgtgcccgcgctcacggcgaaatcctcctcgccccagtcccgctcggggatcgtgcggctttggaacatcgacacgttcgagggcggcaaagggtcgcgctcggcgtttctcaaccgtatctccgccgcctacgaaaaggcgcacgacggcgtatatatcatggtttcctcctatacggcggagggtgcggcggccgcgatacgggaggggaatctgcccgatatgctctctttcggcatcggattttccgaggcggccgaaagctgcctgaagatcaacggccgttcgtttgcgggcgggctggtgggaaaggaatgtcgggcggtgccctggtgtcgcggcgggtacgcgctgttctgcctcgaggacggatttgaggacgcgggcgcggcgaataccgtcgtctctctgggcggaagcaatcagccgctcgccgccgcggcgcttctgccgcttacgggaaatattgccgcggaggaatccacttccgcttacgtgcggtttctcaacgggaaatataagtatcttctgggtacgcagcgggacgtctgccgcttcgcttcgcgcggcgtaaacgtttactgcaagccgatctccgattattcggacctctatcagtatatcgccgtgacttcgagagacgcggagatcaaaaagatttgcgacgattacgtagagagtctcctgggcgaaaaaaatcagaagaagctgaccgagatcggtatgctcagcccgtattacgacatctattcgtccgacaaccccgccgccgacgagctggaacgcgcaaggatcggttatacgctgaacgtctttacttcggccgaaggcttaaacggggtaaacgcggccgcgaaggacgtactcgcgggcggaaatgcggaagttttgaaaaattttctgaaagcgatttgaaacacttccaaaaaataaaaaaatatgctaaaataaaggagaggaaattttgaaggattggacgggtcttctcgacgacgaatgttcgggtatcgcgcacgaagcgcctttcgggttttcggcgcattgttccataggctgcgggggcggcgcgcgggcggcgttttatcccgccaataccgcggagcttttgcttctcgtcgatctgttcaaacgggaaggcgtgaaatttctcgttctcggcaacatgagcaacgtgcttcccgcagacggtatgtacgaaggggcggtcatcttcaccaaacggctgaggtcggtggggataggacagacggtgtttgccatggcgggcgtaaaggcaaaggcttttttggacgcctgcgaacggcacggcaagagcggcgcggaattcctcgcggggattccctgttcggtcggcggagccgtctttatgaacgcgggcgcgcacggaaagcatatttcggatatcctcgaaagcgcgctggtctataaagagggacgtatccgcgtgacgtcggcggcggaatgcgaatattcgtataagcacagcgtctttatgcgggacggaagcgtgattttgggcgcgtcctttgttttggaggacgcagacgcggaaacggtggcaaaaaagcgggccgaatatctcgaaaaacgcagaaggcttcccgcggggcgcagtatgggctgcactttcaaaaatccgcccgcggaaacggcgggaaagctgatcgagggcgcggggctcaaggggctgcgggtcggcggcgcggtgatttcgacggagcatgcaaattttatcatcaatgagggcggggcgacgtccgcggacgtgcgggcgcttatcaatctcatcaaaaacgccgtctttgcgcgctacggcgtcgagctggaggaagaaatcagatacatagggaactgagggtacggggaaagcggcgcatattggaaaagaaaaggaatacgggggaaagcgacgggcgtacataaggcaaagagaggcacacacatgattttaacggcggattatcatacgcataccccctattcccacggtaaaggcacggtggaggaaaatgcggcgcgcgcaaaagagctggggctgaagcagatcggaatcaccgaccacggcttttcacatctcgcgttcgggcttaagcggaaaaaagttcccgatttgattgcggactgtaaaagggcttcggaaaagctggggatcgacgtgcttgtcggcatggaatcgaatattcgcgggataagcggacttaccgacctcacggaagaagattacgacgacttcgatctctttatctgcggcaagcacgtctttatcgcctatgaaactttttccgattggctgcattatttcggcggcaattttacggtggataaattcgggcgcaggccgccgaaagaattggtggaacgcaacacgcgggcgtatatcaatatgattaaaaaaaatcccgtcgatatcgtcagccacttaaactatgtctgtcccgccgacgccgcggaagtggccaaatgcgccgccgactacgggacgtatatcgaattgaattcgaaaaaggcgcacctgaccgacgaggagctgttcgcggtatgcgaaacgggcgtgcgcttcgtcgtcgattcggacgcgcactcggtcgatcgcgtaggcgatacgaagcttgtggaggaacagctcgcgcgcgtttgcctgccgcctgagcggatagacaacatcgacgggcggcttccgaaattccgttttgcggaattcaaaaggcacagataaaggcggaccatgaattttacttcggatgtcaaaagggagattatatcgcgcggcatttcgggcggggcggcgaaaaaggcggctctgtccgctttcgtgcgtacgagcggcgttctgggcgaaacgggcgggcggcgcacgttttatatcgtcagcgagacggaaaacgtcgcggaattttttacttcgctgtttggggatacatttggcgaggagctttccgtcgcgcgcgcgtccatggatcgaatgagcggccgggataagctggtgctcgcgtgcatgagcgaaaatcccgaaaagctcctgcgggagctgggactgttaaagcggggcggcggggaattttcctcggggatatccaggcgcacggtgcccgacgaagactgtgcgatcgcgtatatcaagggcgcgtttttgggcggaggaagctgtatcctccccgccgagggcggaaagacgggatatcatctcgaattcgtctttcccgaaaagcgtacggcggaggagtttcgagggcttctggcggaggaagagcttatttccaaagtggtggaacgcagcggcgccgccgtggtctatatcaaaagcaaggagacgatttccgattttctttctattttgggcgcggagagctctctgaaaaagttttccgagctggtggaacgccgcgacgaggccaaccgctccaaccgcgcggcaaactgtttttcgggcaacgccgacaaatccgctacggcggcggtgaggcaggtgcttgccattcgggcgatcgagcgggaggagggcttggaaaacctggaaaccgagcttaaggaaacggcgcgggcgcggctggaaaatccgtcgctgtccttgaaagagctggcggaaaagctggaaataagcaagagctgtctcaaccaccgcatgcggaagatagaagagcttgcgtcgaaaatttcggcgaagtgagtataaaaaatattttacgaggagaaaaggggatgaaagtaaagagtatcggcttattgtttggcggaatatttatcgctttaagtctttttgccgcaggctgcggagctttgcagggcgactcgacggggagcgagcagccgcgggaagaagctttgctattcgatacagacgagctgtacggcgagtgcagactgtcgaatttacgggatttttcgggcgccgttttggaaattcccgaattctatcaagggaaaaaggtggccgaaataggaaggctgagcggggacgcttctcttgacaaaatcgaaaaaatcgttttgccgcaaagcgtaaagaaaatcggcgattatgccttttacggaatgagcaatttggccgaaatcgtcgtgtcggacgaagcggttttggagcgtataggcgatcaggcctttgcaaattgttcctctttaacggaatactcgcttcccgcaaccgtaaaaacggtaggcgaagaagcttttatagggtgttctgccttgacggagtttacggtcggcgcaaatgcagaaagtataggaataaatacgtttttaggctgcgaggcattgacggcgatcaatgttgatgcggaaaacttatattattcaagtcgggacggggtgctgtttgacaaagataaaacaaatttgatagaatatccttacggaaaaacgacagagagctatacggtccctgctaccgtgagtgaaattggcgcatgggcttttttcggcaataaaacattgcgaacaatagatttaaatcaagcaattatggttcgtaaatatgcttttgccgaatgttctaatttaaccgccatttcagcggacaaaatcaagtatgcggaaataggagtcgtcgaggaaacgccttggttaaataataaaacaaacgatttcattatgctgggaggcgcgttgttggaatacagaggaagcgccaaggctgtgagtttagaaacagcggtttctatttctccgttcgcctttgctgaaaataaaaatttaaagtcgattacgataaaaaacggattggtgaatataggagaacgcgctttttataaatgcgagaatttgagcgccgtttatatgaacaatacaaatcagatggtgtttatcggcacaaacgtattcggaagaaacgctgcggacagaaaaatctatgtgccccgcaatctctacgacgaatacaaagaaaacactttttggaagcaatactttacctctctcgccgtgtaccggacgacgctcaaatttgacagcaacgggggggcgcgtgcgccgacggcagtgtggagtatcttggatatgtcggagagcttcctgtccccgagaaagaaggatataaatttttaggctggtacgacacccccgattttgcaggaagaaagatcgacacggggctgagttgggatagtatggatgacgaaattactttatacgcaaaatatgaggaaaagaagccgattgtatatccgattaactattaccctaacggcgggatcatagccgccggcgcagtgcatacctatacggcggaggacgacgtaatcctgccgacggctacaaaaagcgggtacgaatttaagggctggtattacgacgaagaatttacccggcccgccggcagcggctggaaaaagggcgagacgggtataaaatacctgtacgcaaaatgggaagccgtaaaatagacggccgacagataaagataaaaaagacagaaacggaaaggataaaatgacagattttgtacacttacatttgcataccgaatacagccttctcgacggagccgccaaagtggacgacctcgtcgattatctcgtaaaaaacaacatagactgctgtgccgtaaccgatcacggcaatatgtacgcctccctctattttgcggaggagtgcgtcaaaaaaggaatcaaatatatcatcggctgcgagctttacgccacggacgattatctcgacaagcggccgggtaccaagacggagcatattatcgtgcttgccaaaaacaagacggggtataaaaatatcgtcaagctggattcgctttcgtatatcgacggattttacggcaagccgaggatcgactataagctgttgaaacagtaccacgaaggagtgatctgcctttccgcctgccttgcgggaagaatgcctcagttgctgatgcacggcgattacgacggcgcaaaggaatgggcgagggaaatgaaagaggtattcggggaggatttttacatcgaaatccaggatcacgatatccccgaagaaaagcaggtaattccgcagttgattcagatcgcgcgggagctggacattcagcttgtcgcaaccaacgacgttcactatatctataaacaggactgggaggcgcaggatatcctgctgtgtattcagacgaaaaaaacgcttgccgatcccaagcgcatgaagtttgaaacgcacgaattttatatgaagacgggcgacgagatggcgcagctgttcgattatgtgcccgaggcgatttccaatacccgcgtgatcgccgataaaatagaggagcctgttttcgacctcaaacccaacgggacgcccatccgggatacctcgcttatccctctctacacccccgacgacggttccacctcgcccgattatcttacgcggttgacgtgggaggggcttcccaaacgctacaaagatatcaccgatacgattaaacagcgcgtcgaatacgagctgggcatcatcatcaagatggggttcgccgattactttttgatcgtctgggactatatcaactggtcgcgtctgcacgggatacccgtggggccgggcagaggttcgggcgtaggcagtatcgtcgcctattcgatcgggatcaccgacgtcgatcctttgcggtacgaattgattttcgaacgtttcttaaaccccgaccgggtttccatgcccgacttcgacgtggacttctgtaccaagcggcgttatgaaacgattgaatacgtgcgcgaaaaatatcaccccgaaaacgtggcgcagatcgttacgttcggtaccctcgcttcgcgggccgtcatcaaggacgtggggcgcgttatgggcgtgccgtattcggaaacggataaggtcgcaaaactcatggacggcaaatccacgatacgcgagcttttggggctgaatatccccgtcatggagaagaagcttcaggacccggctctgcccgaggacaagcggattgaaaaggaaaaggacctcgcggagcagaaaaagaaaaagaaccccgaatttatcgacgtttacgaaaacaacgaagaactgcatcgggtcatcgacatgggcttaaagctggaaggcatgcccaaaaatacttccgagcacgccgcgggcgtggttatctgccgaaaggtattgtccgacaacgtgcctctggcgaggaacggcgaggatatcgtcacgcagttcgacatgaaggaagtggaagcggtcggcatgctgaagatggacttcctcgccctcacgacgttgacggatatccagaataccctcaattatatcaaggaggggctggggatcgacgtcgatttcaacgagataggctacgacgtccccgaagcctatcagctgatttcctcgggagatacggacgcggtgttccaactcgaacaaggcggcatgaaaaagtttatgaaagaccttcagccgagctgtctcgaagatcttatcgcaggaatctctctctaccgacccggccccatggactttattcccacctatatccgcaataaaaacaatcccgataagatcgtttacgacacgcctttgctggagccgatcctgaaaaattcttacggcgtcatcatctatcaggaacaggttatgcagatattccagaagcttgcgggatattcgttggggcaggccgacctcgtgcgccgcgctatggcgaaaaagcacaaggacgagctgatggcgcagaaggacaaattcatttacggcgacatcgacaagggggggaatattacgggctgcgccgcgcagggcattcccgcggacgtggctgcgaaaatttttgcggatatggaaagcttcgcctcgtacgccttcaacaagtcgcacgcggccgcttacgccgtcgtcgcttaccgcacggcctatcttaaatatttctatcccaaggaatttttggcgggtatcctcaacgatcgtatcgataaaatagaggaaatttccaagtacatcgcgtacatgaaggaaaagaatatcgaggttctgccccccgacatcaataaatccaaggcaattttctccgttcagggcaacggactgcgcttcggactcggcgcgctccgcggcgtcggacaggcgcctatagagggcgtcatcaacgaacgcaacgagcacggagaatttaaggattttgccgattttgctctccgttgtgcgaaatacgtcaataaaaggattgtggaaagcctcatttacgcgggcgctttcgattgcttcggctatacccgctcgcaattcgcggcggtctatgacgaagtgatcacccgcgtcaacgccatggataaacagaaggcgggcgcgcaaatttccctgttcggggacattatcgaggaacaatccatcgatattgactatccgactattcccgaatacgagcagacggaaaagctctcaaaggaaaaatcggtgctgggcgtttatgtcagcggacacccctttgagaaattcgcgccttatttcaaggataaaagctttaattgttctatgcttaccgagtatctcgaggacgaggagacgggcgcaaagacctatacggaaatctccgacggccagcaggtgacgatgggcggcatggtcgccgcgacgaaaaaattgcagacccgttcgggctcgtttatggcgtttgtcaccatcgaagatctctacggcacggtggaatgcgtgtgttttcccaatgtttacgaacggattcgaagcttcctcgtcgtcgatgcggtcgtttccttaagcggaaagatcgacatcaacgaggacaaggcgcccacgattatcgtggacagaatgacggagtttaagctcgacgaagcgcccgcggcggcaaataaagcggccgcgcccgtcgcggaggaaaattcggcggcgcccgcgcggcgggaagaaaagcccttgcgagagaaaaagctttggctgaacatcacgggactggagaacgcggatgtggaagaactgatggaaacgctgtgtttttacgagggggaaacctccgtatgctttgtaaacgcagggaaaaaatttgtctgctcgcagaaggttaacccaaaccgcgccctgatggccgagctgtcgagctttttaagagaagattgtataaaacttgtctgaaaaatttcgaaaaagaagtgcaaaagactttgttttttttgaaaagtctgttataatatatcggaatagcgtttttatgccgacaaaaaagcggaaaaatcgacgggaatcgaggcggcgggaaaagagcgtactacgccgcgcgtaaaacagcgaaaatttttaggatttataaatttattctgacggaggattatactatgaaacgtatcggtctgttgacgagcggcggcgatgcacccggcatgaatgcggcgatccgcgcggtagtcaggacggcgatctattacggcatggaagtttacggaatcgagagaggctatgcgggccttttggaggacgacgttatccctatggaaatgcgcagcgtttccgatatcgtacagcgcggcggcacgaagctccgcacggcgagatgccttgaaatgctgacgaaggaaggtcagcaaaaagccgtcaaaaccttggaaaacaggggaatcgaaggcctcgtggtcatcggcggagacggatctttccgtgcggcgagagatttaagcgacggcttcggcgtgcctacgatcggcattcccggaacgatcgacaacgatctcgaatacaccgattacacgctcggcttcgataccgccgtcaatacctgtctcgatatcatcaataagctccgcgacacgatgacctctcacgagcgcatctccgtcgtcgaggtgatggggcgtcactgcggcgacatcgcgcttttcagcggtatcgcttcgggcgccgagatcatcgtcgtccccgagatcactttcgatatggacgatatcgtcatgaaaatcaaccgttcccgcgcgagcggaaagcactccaacatcatcgtggtggcggagggcgtcatgagcgcggaacagtttgcgcggcagcttcaggacgtgactacctattccgtgcgcccgacctgcatcgggcacgttcaacgcggcggctcgccctccatggcggacagaatgctggcggcgcagttcggcaataaagcggtgcggctcctcaacgagggcgtgggcaaccgcgcggtgggaatccgtaaaaacgaaatcatcgacatggacatcatcgaagcggtgtctatgaagaaaaaattcaattacgaattgtacgaaaccctccagatgatttccatgtaaggacttcgaaaatcgaggccgttttttctcccgtagaaaaggcggccttttttaaggcggagcgcctcggatcaaactttcggaaaggtgcgcataaatctgacaaaaatttacgaaaaaagggaaaaatttttccgtttggtattgaaatttttttcgttttattatataataggtaaggtcggacggcggagctggtttttcgtcgccaaaaaggagccgattccatgattttaaccgtttgtttaagtccctgtacggacatcacgatagaactcgattccctcaacatcggaaagacgaacatcgtcaaaagcaagacgctttcctttacgggaaaagcgctcaacgttgcgatcggcgtggcacggctcggcggcgaaccgtacgccacggggctgatgtacaacgaaaacggctatatgtttgaaaacgcgcttgacaaagagggcgtgccgtttacgtttgtgtggaacaagggccgcgtacgggaaaactataagtttatcgacaataaatccatgctcaccgaggtaaacgacgtaggcgaggaggtcagcgagggaaagacgaccgagctggtcaatatggtgcagatgctttcctcccgcagcaacgtcaccgtcatttcgggcggcctgccccgcggcgtgtccgcggactattacgaaagcctgttccgctgtgtggactcgaaaaccctgaagatcgtggacgcggagggcgcacggctttttgcggcgctgaaagcgggcgtggatctcgcaaagcccaatctcgacgagctgcaaaatacgctgggcagagagattgtcgataaagaggatatgctggcgggctgcagagagattatcgatcggggcgccaagacggtgcttttgtctctcggcaaggacggcgcggtgatgacggacggcgcgcatcattattattgcaaaagcataaacgtcgccgtcaattctacggtcggcgcgggcgacggtatggtcgccgcggcggcgatgatgatggaacagggtgcgcctttgcccgatatcctgcgcgcgggggtcgccgcggggacggctaccgtgacgacgtttggacagatatctttcacgcaagaaaaatatagggagatattaagcaatttgcgcgtgacggaatttttttgagaaaaattttgaacaaacgaaaaattacggttcataaattcgttttgcctgcatataatataatattgttacgaagggagaaggcggtttcgccgcgcaggtaagggaaaggaaagcgaggaaaatcggttcgcttttccgatggcaaagacggacgccggaaaaggcgccgcacaaaaacttctttgctccgccggagaatggcacttaaaatacgcttcggataaaacggttaacggcgctttgcaactgctcggttgcaaaggcgcataactgaaaggctaaaaaaccgaaaacttcgaccgcggcgggctgcgccgcggtttttgtttgcccaaaggcaggcggtgggaaaatatacggcaaaaaataaaaaatttacaattttttcactcaaaagcattgaaaaaaatgtcgaaatttattataatatagataggaacaaatattagtaattcttaaggttgcgtaaagaggagataagatgttttcaataataatccccatatataattgtgaagaatatttagctcgatgtttgaatagcttgataaatcaaacttctaaagagtttgaattgatttgtataaacgatgcttctactgataaaacagccgtgattttggagtcgtatatttctgaattttcttctatgaaaatatttacaaacgaacgaaataagggcgctgcatattccaggcagcgcggaataatagaagcatcttatgaaaatattgtttttatagatgcggatgattatgttgccgcggaatttgcggaaaacatcaacgacgatatagacgatgaaagcgagttgatttgttacggtcatataaagataaacgaaaaatggagaaaaagcgaggttgtcggagagaataaaacgttcagtccggatgaagctatagtttcaatgaattgcaaagggtatattacaaattacttgtgggataaggtttttaaaaagagcattttttttgggataactccagctaaagaaggaatgataataggcgaagattatcatcttctttcccattatctgctaaaagtcaaaaaggtagtaaagtatattaaaaaggcgttatattattatataatacatgacgatagtatctctcatcgaaaattttccgataagtttatttctacttatgaggcatataaagaattatatgtggagctctgccaacaaaaatctcaattgaaacctcaattttcttatttttttctttttgaaagcagtatcttggtgtcgaagattgagaaaaaagataaagaatcaaaaaaatttattaaagacgtacaacaagaaatacgtgtaaattatcattttataaaacagtgtaaacaaatttcatttacatctaaaatgagtatatggattttaaaaatcaattatcaatggtttagaattatgtttgttatatataaaaagttaaagctttaaggaggcggcgttatggatttcaaggcggaacaagacagattagacaagatcaagtgggacgacagcatgcgggaaggaagggacaaatgcggaacgtacgatttttgcgcttgctgtaaaaaagaggctcaatatccctgtgcccgcgcggctcatcgctatcgtaacggctacgtccgcattgcgattctgcgcgcccgtgaataaattttttaccgctcaaacgggtcggaaatctgataaacagcggcttttttcttcggaaagggatagtacggccttttttaagaaggaaaaagctttttttattttgaggaaaagatgaaaacgaagaaagaatttagcgaagtcgcccgcctttttgaaggctgggaggaaacgatgatttatacctgtctcgagggacggatgggaaaagtgatatcggacggaaataatccgcctcgtgcggcgctggccgaggtgggatatttttgcttttttgcgggcgagcccgacgaggaattgattagacgggcgtctgctcccgcattgacgccgcaggacgaaaggtggtgccgcgcaatcgaacgggtatgggggccgcgcgtcgagcgaacgcttcgctatgccgtgaaaaaggaacgggacgttttcgagctcgaaaagctgcggggatttgttggggcgctgccgcccgaatataccttgaaggagattgacggcgggcttttcgaaaggctgctttccgaggaatggtcgagagatttttgctcgctgtatccctcgtatgaggaatataaagcacacggcttgggctttgcggcattgaaggaaggcgtgcccgtcgcgggcgcttcgtcctatacgttttggtcggaggggatcgaaatagagatagacacccgttccgattgccgtagaaaagggcttgccacggtctgcgcttctgcgcttattctcgaatgtctgcgccgcgggctgtatcccagctgggacgcgcacgacctgcggtctctcgcgctggcggaaaagctcggataccacagggataaaccctatcccgtttattcgttaaaagcctaagccaagggacgcgctttaaggttaagatatcgtataataaaaaaggagaggaggacgaaaggagatgggtaatatcgaagtgagagacctgaaaaagatttatggcggtgcggataatcccgtgacggcgctttcgggcgtttcgttttcgctggatatcggcgaatttgtcgtgattttaggaccctcgggcagcgggaaaagcactctcctgaatatactcggcggtatggattccgcatcggagggaagcgtcgaggtggcgggaaaggatatcgtccgtttttccgagaaacagctggtgacctatcgcagaaacgatatcggatttgtctttcaattttataatctgatgcaaaatctgaccgctctcgaaaacgtcgccctctcggagagcgccggaggtatggaagcggcggaagcgcttcggctggtggggctggaaaaacgcgcggataattttcccgctcagctttcgggcggcgagcagcagcgcgtcgccattgcccgcgctgtggtgaaaaatccccggctcctgctctgcgacgagccgacgggcgcactcgacagcggtacgggaaaaaatattatttccctgcttttgtcgcttgccaaaaagaaggataagacgatcgtcgtggtgacgcacaacgccaagcttgcggaagtggccgatcgggtaatcaggctttcggacgggcggatcgtcagcgacgagcggatgggggcgccgaaatcgccggaggagattgactggtgatgaaatcgggaaaaatacttcgtcggctcgccgcgcgcgaaatgaagaaaaaccgtttgcagttcgcttccatgatcgccattaccatgctggcggtgacgttgttctgcggctttatctccaataccaaaacgctggaacgggcggtaaacaaatatttcacctcgacaaacctctgtgatctttgcgtacagatgggcaagataaccgatacggaaaaggaatacttttcctcgctggacgccgttgcggaataccgcgcgtatgcggagggcactctggacggaaaaagtgcaaagctttacgtgggagatacgtccgtctcccgtcccgaggtggtgcagggcgtttcgggcgtgacgatcgatcaacgtacggccgagctcaacaacatctcggtgggggccgacgttacgctgggcgttacgcttcctttaggctcccgctactacgacgtagaaatggaaacgaaagtgacggggctgatgaattttcccgaaactaccgtttccgtctcgtcggtggcggtgtatatttccgaagcgaagtttgaggaaatggcgaaagaaaaatatccgtatataaatatcgacgtctcctatttttataaccaggtggtgataaaggcgtccgaggccgacgctttgaaggcggaaataaacgaacgtttcgaaggggacggcaatctcatttttatttacgaccgcgagagtatggaggcgcctctccttttggacggcgagatcagccaaagcagaaaaatgctgtatgtgtttcccgtcattttcctcctggtatccgtgttcgttattctcaccacggtcaaccgtttgattttggacgaacgcacggaaatcggcacgttgaaggccttgggcttcagccgcggggagatactgcgccactacgcggggttcggcggcattttatgcctcgtcggcggtgcggtcggggcggtggtcgggccgtttatcgtgcccaacgtcatgaaggtgaaatatcagctggtgtataatctgtccatacccgcaatccccgcgttcgacgttttgggcactgtttttgccgtcgggacggtggcgctgttggcggcggtcatcagcgtcctcgtttgcagaaacgtcgtcaaggaaagccccgcttcctgcatgcgccccgccgtaccgaaggataatttatttctgcggctgggaaagcgcagagacgttaaggaaaaagcgccggagcgcgtcagggaaaagggaagggtttccttcaagggcagaaaggacggcgcgctctccttcaaaatggccgtccgcaatattgcgatcaagcccgtgcgcgcgctgatgaccgtcatcgggattacgggctgcgtggcgcttctgatgtgcgcgttcggaatcggggacaccgtcaacaacagtctggaaacggagttttataaacaatttacctacgatatttccacgccttacaatacctcgggctttacgaaaaaaatggacgcgatgaaagcttcgggcgaaatagaggcttttgaaatctataaaattcattacatgacggcaatcggcgcggaagcgaataaggacgtcaaggtctataatttttccgaaaatatgacgatgaccacaatcgatacgagcggcggaagggtggtgatgtcccgttcggttgcggaatttctcggactcaaagagggcggaacgtttacgttaaattcgggcgcgcagagcttcgagcttacgttaagcgaaatcgtcgataccgctatcaccaaaggcgtatttctgcataccgaccttttcgaggatatttacggcacttcgtcggcgtggatcagggcggacaatatcaccgacgagctgatcgataagataaacgaagcggggggcaccgcgcaggctaccagcgtggaagatatgtgggggtatgtggaagataaggtttcttccataaacgcgatgaaatatacccttatgatctttgccgtgctcctttcggtcgtggtgctttataatctgtccctgctgaatatcaacgagcggacgcgggatatcgccacgctgaaggtactcggcttcaagcgcggcaaaatagcgctttctctgctgtttgaaattatgcttctgacgctggcggggactgtctgcggcttgatcctgggctatccgctcacctatctggtattgagtataaacaaagtggaaatcatgagttttctttactatctcaagcccgtgtcgtatgtgtattccgctttgctggcgctcctcacctcgtttgcgattaattatatcttcggcagaagcctcgataagataaatatgatagaatctttgaaaagcgtggaataaaatttttgctaaacctgttgacttttacaaaaacaggtgtataataattatatcgtaaaaaacataaaaaaaaggaggaaatcacgtgaagacctctcaaaaggtcgttgccgcggcgctgacggttgccctcggcgtactcttgatcgttttgaaaagcgggctggtcaatatcgttttggtcggtctcggcgttatgctgatcgttctcggcattttgaatatcgttgacaaattggttccgttgggcgtgacgaaaatcgtcatcggcgcgctcgtggctctgttcggcggattgttttggaaggttatgctctatatcgtggcggctttgctgctgatctacggcattcttcagctgtacggacggatcaggctcaaggtaaaatgttcccgaacgatcgatacgattatcgcttatgcggcgcccgtattgtgtatcgtcatcgcgttgctcttatttttcaatcagggcggtacgatcaactggatatttgtcgtgtcgggcgtgttcacggtgattgaaggcgtactcatgctgatagactcgctgagaaaaaattgaagacgtactgcggagatacttcctgcaatttgcgccgagtttcggacggagcgcgttttcagcggcggggcggagaacgccgaacgggaataacggaaaaaggagtataaaaaatatgaaaaagaaaaaattgtttgccgtcgtcttgtctttatgcgcggttgctctcgtgagtttgggaatggcggcctgtcagggcgcgcaaggcgaaaaaggcgataagggtgataaaggaatacaaggcgaagcgggaaaagacggcaaagacggaaaggacggcgtaacgcccgtgatagagataagcgccgacggtttttgggtaatcaacggcgagaagaccgaatacaaggcggttggaacggacggggaagacggaaaggacggggctgcgtccgtgatagggataagcgccgacggtttttgggtgatcgacggcaagaaaacggaatacaaagcggttggttcggacggccaagacggcgacaacgggcgcggaatagaatccgttttttacgacgaagacggaaatctcgtaatcgtttataccgataaaaccagagagacggttgttttgcccgaaagggaagagcatatacatagtttcggcgaatggcagtattattccgaagcgggaacgggctgcgggggagggctttattataaagtttgtaccgcatgcaatgccgtcgagtggaaaatggaaacgggcggggagcacgtctgggaagaaacatattcctacgacgaagacacgcattggcaggtttgtaaaaactgcggcgacaaacgaaacgtcgaaccgcacgttttggacgataacggagattgtacggtctgcgggcaacatatcaacggcgttcggtacgaagtatcttccgacaaaaagtacgcgaccgtaatcggatacgacggtacggaaggcgacgtgacgatttcggccgaatacaggggcgtccccgtaaccgctatcggttcccgagcgttttcttcctgtgaagaattgacgtccgtagaactgccagacagcattataaccatcgggcatggtgcgttttataattgcaaaaatctgaaaggaattcgattgaacgacggcttgaaaacgattgagagcgaggcgtttaactcctctggtcttgaaacaatcgttatccccgccagcgtggagaatgtcgggacttccgcgttttataggtgcgcttcgctgaaaacggcgatgtttgaagacgacaacagtctgaaaataattgcaaattttctttttttcgaatgcgcacagctggaaaacgtcgttttcgggaaaaacagcaaaatggactttatcggaaacagttcgtttgataaatgcgtttcgctgaaaagtattgacatacccgaaggcgtaacagttattgattacggcgccttcgaggggtgttcgggattgcagagcgtcaaatttccttccacgctgcaaaccttaagatcgcattctttttacgattgtacgtcgctgacggcggttgcgattcccgccgcgacggtttcgatcaaccacaattcgtttacgggctgcgacgcgctgagagagattgtcgtcgaggcgggaaatcctacctatcattccgacggaaattgtatcattgaaacggcggcgaaaaagcttgcgatcggatgttcgggcagcgttctgccgcaggacgacagcgtgacggagatcggtacgtgggcgtttggagataatccctgtctgaaaaaaatagaaatttcccgctatatccaaaaaatcgacatcatgtccttttataactgcggcgggttggaggaaatcgtcgtcgataaagacaaccccgtatttcacgaggcgggaaattgtctcatcgaaacgcaaacaaagacattgctgcgctttggcttgggcggcaaaattccgtccgacggcagcgtgacggagatacgggacggtgcgttcggcgggtgctttatccgaaatctttatattcccgcatgtattcaattgtttgtaatcagcggacacgggattgtggggctggaaaccgtttccgtggaagagggcaacgccgtttattacagcagcggaaattgtctgattgagaaatcctcgcaaaccctctacgtaggctgtaaaaacagcgtcattccttccggcgtgaaaaggataagaacgggtgcgtttgaggggagcgaaatcgcgtcgatcaatatccccgtaagcgttacccgcattgaaacctttgcctttttcgattgcgccgagttgacggaaattcgctacgaagggacgacggaacaatggaacgcgttggaaaaggacggcagctgggataaaaatacgggaaattacgtcgtgaattgcagcgacgggactttgataaaaaaatgaaataaaattcgtcttttgcgatagagacagaccgttgaaacgggcgcgcctttcaaacttttcgaagaaagaaggccgcgcccgttttgcgtgcaaaaagcgtttttctgcttgaaaaaattatcgatttactctattttttatcgtatgtgcaaatatggcaaagtgtgtggggtacgttcatgatttgtgtttttcgctaacgcggaaaaaggggaaaatacagagaaaacgtgaattttttatcgaatgagcaattattgatttcagttgttgagatttaagagaaaatatgatataatatgaaccgtttgaagctgacgggaagcggggaagaaaaagcggcttcttttgacgaaacggaaaaaattttaatacggagtgtgaataagtatgagcaacaaagttactattatcggtgcaggttcggtcggcgctaccatcgcctatacgctggtggtggacagtccggtttcggagatcgtcctcatcgacgtcaaccgcgaaaaggctctcggcgaggctctcgacatcaagcaggcgacgccctttctttcccccacgaaagtatatgaaggctcttacgaggatgcggaaggctcggatatcgtcgtcgtgacttcggggatcggcagaaagcccgggcagtcgcgcatcgatctcgcgcagaccaatgtcgatattatcaagagcattgcgcccgaaatcgtcagacacgctcccaatgcgatttatgtcatcgtcgccaatcccgtggacgttctcacttacgtattctgtaaggtgacggggctgcccaagggccaggtgttgggctcgggcaccattctcgatacgatccgcttaagaacccgcctttccgagctgtattccatcaatcagaaacaggtgcacgcctatgtgctcggcgagcacggcgacagctctttcgtcgcatggtccacggccgacatcacggggatacccttaaacgattacgacgcggctttgacaaataaagccgttttgcccattacgccttacacgcacgaggaagtggaggaatacgtccgcaaatcgggcggaaagatcatcgcgggcaagggcgccacgttctacggtatcgccgcctccgtatgccatatcgtcaagagcatctattccggcgcggataccgtcatgaccctttccacgcttttagacggggaatacgggctcagcgacgtgtgcctgagcacgctctgcatcctcggcaacaacgggattcagacgacgctcacgcccaagatgtccgaagacgaacttgaaaagcttaagcacagcgcggaggtgctcaagggcgtaatcgcacagctggctatctgaaaggagaaaggaagcatggaataccgcattgaaaaagacaccatgggggaaatgaaggtccccgcggacaaatattgggcggcgcagaccgaaagaagccacgaaaatttccggatcggcacggaagtgatgccgcgggagattacgcacgcgttcggtatccttaaaaaggccgccgcgcttgccaactataaattagggatactgcccgaagaaaagaagaaatttatctgtgcggccgcggacgaggtgatttcgggcgcgctcaacgagcattttccccttgtcgtctggcagacgggcagcggcacgcagtcgaacatgaacgccaacgaggtgatcgcgaaccgcggcaacgagctggcgggcaaaaaattacttcaccccaacgacgatatcaataaaagtcaaagctccaacgatacttttcccaccgcgatgcacattgcggccgtcgttgcgattgaagataagctctttcccgcgatggataaactgatcgaaaccttcaaacgcctggaaaaggaaaacgagggaatcgtcaaaagcggccgcacccatcttcaggacgccgttcccgtcgcgttttcgcaagagatcagcggctggagaaatatggtcgaaaaaacgaaaagtcagctgacgcttgcgctttcgggcttgaaggagcttgcgctcggcggcaccgccgtcggaacggggcttaacgcgcccaagggctttgcggaagaggtcgcggcgcagatcagcggattgacgggcaagacgtttgtcaccgcggaaaacaagtatcacgccctcacctcgaaggacgaactcgttttcgcgcacggcgcgctgaaggcgctggcgtgcaatctcatgaaaattgccaacgacgtgcgctggctggcttcggggccgcgcgacgggctgggcgaaatctttatccccgaaaacgaacccggttcctcgattatgccgggcaaggtcaaccccacgcagtgcgaagcgatgacgatggtggccgttcaggtcatggccaacgacgtggccgtgggcatgggcgcttctcagggcaatttcgagctcaacgtatttatgcccgtcattatctacaatttcctgcagtcggcgaggcttttggcggacggaattatttctttcgagaaaaactgcgtcacgggcatccgcgcgaacaaggaaaaaatgaagcataacctctacaattcgttgatgctggtgacggcgctcaatccctatatcgggtacgaaaacgcggccaaaacggcgaaaaaggcgtataaggaaaatatttccctcaaagaggcgtgcgtggcgctcggcttcctcacggcggagaaatttgacgaagtattccgccccgaggagatggcgtatccgcagaaataaaggtagcgatatgaaaatctgttattatcccggctgtacgctcaagacgaaggcgaaggatctggacgtttacgcccgccgctccgccgcggctttgggcgtggaaatggaggaaatagaaaactggcagtgctgcggcgccgtgtatcccatggcgaaggacgagattgcaaccaagctgtccgccgtccgcgctttggaatacgcgaaacgcaacggcggtaaattgcttacgctttgttccgcctgccataacgtcatcaagcgtacaaatgaagatatgcgcggcgatgaaaatatttctttcaaggccaataattatctgaagtttgaggagccgtaccgcggcgaaacgcaggtattgcattacctcgagcttttgaaaaacgagatcgggttcgacgaaatagcgaaaaaggtcgtccgtcccttaaacagaaaaataggggcgtattacggctgtcttttgcttcgcccgagcggcgtcatggcgttcgataaccccgaaaatcccaccgtcatcgaggattttatccgtgcgatcggcgggacgcccgtcgtctatcctttccgcaacgaatgctgcggcgcgtatgtcgccctcaaaaactccgccctgcccaaagcaaggagcgaaaaagtgcttcaaagcgcgcgggaaaagggcgcggaggaagtgattacggcctgcccgctctgcctttataatttgcaggcaaacggcggcggcatattgcccgtgcgatatttcacggagcttctcgccgaggcgctgggggtgaaagaatgacgaaagaagaacagtttgaaaatcttctccgcatcagcggtacggacgtgagaaagtgcatgaagtgcggcaaatgctcgggacggtgccccgcgtttaaggatatggacattaagccgcaccaatttgtttccctgcttgccaagggcaaggcggaggagcttttggaaagcaaagcgatctggagctgcctctcctgcatggcctgcgtggaacgctgtccgaggggcgtcgcgcccgcggcggtcatagaggcggtgcgggataccgtcgtccgcatgcaaaacggaaacggcatcaaggcggaggacattccgcccatcgtggacgaactcattccccagcagctgctcgtcagcgcttacagaaaatacaacaaatgatttttagagaaaagagagttatataaaatgcaaagaataggtgtttttatttgttggtgcggcagcaatatcgcggcaacggtagatgtggaacgggtcgccgagctcatgaaagcagaacccggtgtggttttttcggcgaattatcagtacatgtgttccgaaaacggtcagcagctcatcaaaaacgcaatcaaagaatataatctgacggggatcgtcgtcggctcctgttcgccgagaatgcacgaggcgaccttccgcaggacggcggaggccgcgggacttaatccctatatggtggagatcgccaatatccgcgagcattgctcctggatacacaaagacagggaggaggccaccgaaaaggcggtcgttctcgttcgcacggcgatcgccaaagtcaagctcaacgcgcctttgcaagcgggcgaaagccccgtcgtcaagcgcgctttggtcatcggcggcggtatcgcgggcattcaggccgcgctcgatatcgcggaggcgggcttcgaggtcgatatcgtggaaaaaaatcccacaatcggcggccgtatggctcagctggacaaaacgtttcccacgctcgactgttcggcgtgtattttgacgccgaaaatggtggattgcgcccaaagcgataaaatcgatatcctttcctactccgaagtagaggacgtgaagggctttgtcggcaattttacggtaaagatccgcaaaaaggcgagatttgtcgatgagaccaagtgcacgggctgtaagatttgtatggaaaaatgcccgtccaagaaaggactcaacgagtttaatatgaatctgaacaaccgcaccgccatctatatcccgttcgcgcaggcaatccccaacgtggcggtgatcgatcccgcgcagtgtatcaagcttaagacgggcaagtgcggaatctgtcagaagttctgcggcgcgggcgcgatcaattacgaaatgaaggacgagcttatcgaacggcaatacggcgccatcgtcgtggcgacgggctttaagccgattgcgctcgacgctttcaacgaatacggctacagcgataacaaggacgtcatcacctcgctcgagctcgagcggctgatgaatgcggcggggcctacaaacggcgttctgctccgcccttccgacggcacgcaccccaaagtgattacctttattcagtgcgtcggttcgcgcgatacgtccggctgcggcaagccgtattgctcgaaaatctgctgcatgtacacggcgaagcacgccatgcttatacgggaaaaatatcccgacgccgaggtgcacgtgttctatatcgacgtgcgtacccccggaaagaattacgacgagttttaccgccgcgcggtggaacagtacggcgtggattatatcaagggcatggtcggcaaggtctataacgaaaacggcaagctgatggtgcagggctcgaatcttatcgacaacgagcaggtgacgatcgcctccgacctcgtggttttggcggccgcgatcgaaccggagccttccgtgagaaaggtggccacacttttgacggcgagcatcgacaccaataacttcctcaccgaggcgcatcccaagctccgccccgtagaaagccccacggcgggcgtatatctggccggcgtatgtcaagggcccaaagatattcccgagacggtgtcccaggcttccgcctgcgcctccaaggtcatcgggctgttggtaaaggatcatctgaaaacaaatccctgcgttgcccattccgacgaaaatatgtgcaacgggtgcagtcagtgcgccaacgtctgcgcgtacggcgcgattacttacgtggataaggaattccgtctcggcggcggcaaaacggagacgcggcgcgtggcgtccgtcaatcccgccgtatgtcagggctgcggcgcctgtacggtcacctgtccttcgggcgcgatggatctgagcgggttcagttccaagcaaatcatgtcggaggtggaaaccatatgcaggaggtaacgatggaaaagaaagaatatgtgcccaatatcgtggctttttgctgcaactggtgctcgtacgcgggcgcggaccttgcgggctccagccgtttgagctatcccgcaaacgtcaagatcatccgcgtgccgtgctcctgtcgcgtcaatccgatgttcgttttgaaggcgtttcagcagggcgcggacggcgtaattctctgcggctgtcatcccggcgactgccattacgtgacgggcaattattatacgagaagaaggatggctttgctgttcagctttttgaattatctcggaatcgagaaggaacgcacgcgcgtggaatgggtttccgccgcggagggcgcgcgtttttctgcggtcatgaacgattttgtcaagacggtgagcgcgctcggcgaaaacaagcggctttccgatcttcggtgcaaggaggagtaaggcgatgaaagacgttgaaaagaaaatgatcgaacgggccgccgaacttctgaaaagcggcgatgtcgcccgcgtggtcggctggaaaaaaggcgaattttacttcgatcccagccccgcttcgtttgagacggaagcggagctttcggagtttgcgtataatggcttctgcggcgcgaacctgtctaaatatctgattgccgcgtcgaaaaagcccggaaagacggcgatgtttctgaagccctgcgatgcctacagctttaacgaattggtaaaggagcatcgcgtcgcgcgcgaaaacgtatatgtgatcggcgtcgagtgtcagggaaagctggatatttccaaaatcaaaaaacagggtgcggacgccgtgacggaagtggaagaaaacggcgataaggtgctggtttcttcgctctacggcgataaagaatttgaaaaggaggaaatactcctcgaaaaatgtctctgctgtaagggcaaaaagcatgtcgtaagcgacgagacgattattctgcacgacatgcccgagacgaaaaacgaccgtttttcaggcgtggccgagctggaagcgatgactgcggacgagcggtttgcgttttggaaaaaggaattgtccaaatgtatccgctgtaacgcctgccgcaacgtctgccccgcgtgttcgtgcgtgaaatgcgtgttcgacaatcccgcgtcgggcatctccgccaaggcgaacgattcggagtttgaggaacagatgttccatatcatccgcgcgttccatgtggcggggcgctgtaccgactgcggcgaatgcagccgcgtctgtccccaaaacatacccttacatctcctgaacagaaagtttattaaggacatcgacgctttgtacggggattttcaggcgggcgaaaccgccgacggaaagacgccgctcaccgattatacggaaggcgacgccgagccctcgacagccgtttgcgcggaggataaacatgcttaaaatcagtaaggaaaatttgaacggattatatcggaagctctccgccgccatgcccctgtatatgcccttgaaaaaggcgggcgaagtcaactacggcctttggacggaaggcgcggaaagctctgtcgaaacgcttaaaacggtaaaatcgcccaaggatctgttttttccgcagagcgagaccatgatgaaatttaagacggagggcaaatcgatcgagatcgtcgatgtgcgcgaagagaagaaacctttcgttcttttcggcgtccgcgcctgcgatttcaaagcgttcgacgtgctcgaccgcgtatttctcgccgatcccgtggatacctattatcagtcgcgtcgggaagcgggcgtgatcgtcacgctggcctgttcccgtcccgaggagagctgtttctgcaaagcgttcggcatagacgcggcggaacccatgggcgacgttaccgcatggatggacgaaaattatctctactggcgcgcaaataccgaaaagggaaaggcgctgacggccactgtttcggaattgtttgaagaggacggagataagcaggtaaacgaacagcaggaaaagacgagggaaattatcgaaaaactgcctttttcgcagctcgacctgtcccgtttcaagggtgaaaacctcaacgaactgtttgaggctcccgagtggcagactctttccgaggcctgtctcggctgcggcgcgtgcacctttgtgtgtcccacctgccaatgcttcgatatccgcgatttcaaaaccaaggagggcgttatccgctaccgttgctgggattcgtgcatgtattccgattttaccctgatggccgcggccaacagccgtaccacccagctgcagagataccgccagaggtttatgcataagctggtctattatcccgcgcagcacgaagggctctattcctgcgtggggtgcggcagatgcgtcaataaatgtccgcagcgtctcaatatcgtaaaagtaatcaaaacgttgggaggaaaagcgcatgattaacgaaaatcttattcctaagatcggcgtaatcacggatatccgcaaagatacgcccgacgtaaaaacattccgcgtcgtgggaacggacggcagaaagctgttcgaacacatgcccggtcagtgtgccatggtctccgtgcccggcgtgggcgagtgtatgttttccattacttcctcgccgaccaacgaggaatttatggagttttccattaaaaaatgcggctgcgtcacggaggtgatccattccctcgaagcgggacagcagattaccgtgcgcgggccgtacggcagaagctttcccgtcgaaggggaattcaagggcaaagatatgctctttatcgcgggcggtatcggccttgcgccgttgagaagcgtcatcaactatattcgccactaccgcaataattacggcagagtggtggtggtttacggtgcgcgcagcaaggacgatctcgtggatatcgacgagatccgcaccgaatgggaaaaggagccgaattttgaggtatatcttacgatcgaccgtccgcaggaagtctgggacggacacgtggggtttgtgcccgcctacgtcaaggagctggggctcgacccgtccatgacggcggtgctttgcggcccgcctatcatgataaagtttaccttggcggggcttttggaactcggctttgacaaatcgcgggtatatacgacgctggagctgcgcatgaagtgcggtatcgggaagtgcggacggtgcaacgtgggcgataaattcgtctgcaaggacggcccggtgttccgtatggacgagctggacgagctgcccgacgagtattgattagaggagatcgacatggaaaatttagtaaacgtttacctcttcggcaagagatatcaggtgcccgaaagcctgacgatcatgaaggcgatggaatacgcgggctatcagctggtgcgcggctgcggctgccgcaacgggttctgcggcgcctgtgcgacgatttatcgtatcaaaggacagcaggaattaaagacctgtcttgcctgccagacgcaggtggaggagggcatgtatgtggcgacgttgccctttttcccgttggtgaagcagatttacgatattgaaaagataaagcccacgcagcagatcatgatgcagctctatcccgaaatttattcctgcataggctgcaacgcctgcacgaaaagctgtacccaagggctcaacgtcatgcagtatatcgcttacgcccagcgcggcgaatacgaaaagtgcgcggaagagagtttcgactgcgttatgtgcggcgtgtgctcctcgcgttgtcctgcaggaatctctcatccgcaggtggcggagcttgcccgccgcttgacgggaaaatatctcgcgcccaagagcgaacatctcgaaaaacgggtggaagagatcagggaaggaaaattcgaggcaatcatcgaaagcctgatgcaaaagccgatcgaggaaatgaaagagctttataaccatagagaaatagaaaaataaggagaagcgtatgtatcagtacaccgaagaacaaacagtgtccatgaaaaaggtggaagcgacgcgcgcttcccgtttcggcgcggatatccgcagaatgacggccgaggaaaaggacgaggtgctcgcttcctttcatcccgactatattacttctgcttatgaggaattgaaggtcggccccaacaagggcgggaaagtccttcacgagctggcggcgctgctcgaaggccgcccgcgcgttttggatatgcagatcgatctttcgcagcccgattacgacgtggacgtccttatcatcggcggcggcggcgcgggagcctccgccgcgattgaagcggacaactgcggcgcaaaggccatgatcgtcacaaagcttcgtctcggcgacgccaataccgcgatggccgagggcgggattcaggccgcggacaaggaaaacgacagccccgcggttcattatctcgacgctttcggcggcggacatttcaaaaataaacccgaattgctttataaattggttacggaagctcccgaagccattcagtggttaaatgacctcggtgttatgttcgacaaggcgcccgacggaaccatggttacgacgcacggcggggggacttcccgcaagagaatgcacgcctgccgcgactattcggggtctgaaattatgcgtgtcctgcgcgacgaagtccttaaccgcggtattacggtggtggatttcacttccgcgatcgaattgatcaaggacgcggacggcaaagccgcgggcgcggtgctcatgaatatggaaacgaaagagatactcgttgccaaggcaaaaacagtcgttattgcaacgggcggcgcgggcaggttgcattatcagggattccccacgtccaaccattacggggcgacggcggacgggctcgtgctcgcctatcgcgcgggcgcaaaattgctctatcccgaaacgttgcagtatcatcccacgggcgcggcggcgcctacgcagatttacggcgctttggtcaccgaaaaagtgcgttcgctgggcgcgcagctcgttaacaaagacggtatagcgtttgtcaatccgttggagacgcgcgacgtcacggcctcatcgattattcgggaatgtaagaaaaacaacggcggaatcaagactacggacggcgaaggcgtctggctggatacgccgcttatcgaaatggtaaacggcgaaggaacgatcgagaagcgaattcccgctatgatgagaatgttcggaaaatacggaatcgatattcgtaaggaacctattctcgtctatccgacccttcattatcagaacggcggaatcgatatttcggcggacggcatgtcgggagtcgaaaacctgtatgtggcaggcgaagcagtgggcggtattcacggcaccaatcgcttgatgggaaattcgttgctcgacattatcgtattcgggcgcaatgcgggaagacgtgcgggcgaaaaatgcaagaacgtcaaagtgaaaaaactgacgctcgattttgtaaaagagtatgagagagcgctggaaacggcggggcttcgtcccgaaatgccgtctccgaggcttttgcctgattatagaagaaaagacaattaaaaaggagtttttatggagacgtttgcaactatatttgaaatcgtgatggtgctgtgtttcggcgcttcgtggccgttcaacatcatacgcgcctataaagcccgtacggcaaagggaacgagccttcaatttacgattttgatcggtatcggctatgtcggcggcattttaagcaaggtatttttcgcattggaaaagggcgcgggatattggaaaccgcttactattctggcttttattttctatttcattaatttagcaatgatcattacggcgatcattatttatttcagaaacagaaagcttgacgcggcaaaagccgccgctaaaactcaagagaccgaggcttaataacaaaaagagaacgcttggcaaagattggcaggcgttctctttttgtttgaattcataggagatattttttatttcaagcattggatttccttgaaaacgtggctaaaaagagttgctttttttttgtaaatagtatataatactaacgatgcagagatggcggagcggtcgaacgcgcacgattcgaaatcgtgttatgcaggaatgcatacaagggttcaaatccctttctctgcgccaaacaaaaaatgattgtatttcacgaaaaatacatcaattttgtttttaatttcctatttcccgttgtgagtttgctaaattcttcgggaaatagggattttttttgcttttgaggggtacgcggggggtacgctacttcaaaaagtcctcaatgatcgcgaggatttccgcatattccttgcgtaaaatctccagcctttcttcctctttcaggcttccgtttagaaaggtttcccggtcgagctgttcggggtgcgtatagattctcaaagtggtttctatggtcgaatgtcccatataaagcgataccgttttgatgtctaatttgtttacacaaatttgtatcgttccataggtgtgcctcaaatcgtgcaacttatgcggcgcaccatattttttgaaagtggtatccgctacatattccgaaaatggaaaatattta

SEQ ID NO: 2947 - DNA, 32759 bp, Unknown
  16S sequences of unknown bacteria
tcctttgaagagcgcgaggccgcgccctacgccgcggcggcggtcgccgcggccaaggcccgcgcggcccacgcacacccggccggcggctgcccctccgcggcggcgcggacgctgcgccccgcctccgccccggcgggcgaggcccggatggagagccagctcgtcaactggcccgtgcagatccagcttctgcccctgcgcgcgccgtacctgcagggcgcggacgtgctcatcgccgcggactgcacggcgttcgcctatgccaacctgcacgcggacttcctgcgcgggcgcgtgacgctcatcggctgcccgaagctggacggcgtggactacgcggaaaagctcgcgcaggtcttcctgcaaaacgagatccgctccgtgacggtgctgcgcatggaggtgccctgctgcggcggacttacggcggcggtggagcgggcgcttacggcctcgggccgcggcatcccgctgacggtgcgcatcgtcggcatcgacggaacgctccgctgagcgcgaaaaagcgcgccgaagggcaatccttcggcgcgtcaggctgtagtccccccttcttatcgcttggggggatgcaggaaggggggaacccccttcctctgaaatccgcagcggcggcgtgtacgccgcgaggtcgcgggccttaggcccgctttccggtattcggcgcgccgaagggaaatccttcggcgcgctttctgtcgttttggcgcttattccgccttgggctcgtggatgccgccctccttgaaggtgaccatgacggtgcccttcttgacgacggtgcgctcgggcatgccggggaacatgccgggcacggtctcggcctggtagttgccggagacgagcgcgtcgcagcagtcgatcaggttgcccatcacgtcgtcgtccaggggcttgccgaaggggcggaagtcgtggtgcccgttgaagcagacgtcccagagcttgcccttgagggcgtagatgtccttcagggccttgcccgcggtctccacgctgacaaaggtcgcatctcccggcagggagccgaagagcgtgttgcagttgcaggcgtcgcccgcgaacaggatgcgcgtcttggggtcgagcagcaccatggagccgggggtgtggcccggcgcgcgcatggcggtgaccacgcggtcgcccaggtcaaagctctgcccatcctccaaatcgcggcgcacggggtgcgcgtccgcgggccaggggcggatgtccgtctccgggtcatacggataggtcttgcccgagcgctgggcgatggagtgcgcgtagttgcggcggaagtccgcgccgcccatgtcgtacttgccctcgtccgcggcgttcatgtagtattcgtcgaaccagcccaggccgccgatgtggtcgccgtgggcgtgcgtgatgaccaggacaatcggcttgtccgtgatcttgcggatgacggccggcaggtcgccgatgcccgtgcccgtgtcgatgaccatggccttgtccttgcccaccagcacgaagatggacccgcagtcaaactcgtcgatctcgtaggtgtccttggcgatctccacaatgggctgtgcagtcgtcagcatctcgcattcctcctctttttcgtttcaattcttctctttgattttacgtccgcctaacatgtcttgtcaagacaaatccggcgcgggcaaaaaagcgcccctgcgcagggattgcgcaggggcggccatcgcgtcaggcctgcggcagggcgccggggagctcctccagggtggcgaagccctcggacagcgcgcggtcgcggagcttggcgtagagctcggcataggtggcctgcacgtagggctcgacgaagaacaggccgatgccgcacagcagcgagcccagcaggatccagcccaggaaggagagctgcaggacgaagatctcccacttctgcccatccgtcatctgggcggagatcgcgcgggcgcgcgcgccggacaggttcgggttttcggccaggatgtagggcacctgcgaccaggccaggcccttgatgatgccgggcacgatcagcagcagcgaccacaggctgacgaagaggttggtcaggaacatggcggtcgcggtgttcatgtagttccgcttaaacccgtagaagagctggccaaagctcgaggttccgttccggctctccatgtagtagcggaccatgcccacctgcatcggcccaaagacaaagaacgagagcacaaagccgatcaccagcccgatgagcgatccgagcagggcgatcagcagcagcgcccccagcatctccggggaaatctccaggcccgtgctcgtgctcggcgcagatcccgtcgccgagttgttgacgaacgaactgccgctggagacaatgcccgtgatgaggctgtagaccagggagaccgcaaaggccatccagtagttgttgcgcagaacgtccttggcgttctgcttgagttccgcacgcgtccacatggcgaactcctccttctccatctctttctaaatttcgcttattttaccaggacggcttcgtattcgccgtccggttcaaacccgatcttgcaggccaggcgcaggctaatgggattggccgcgtcccagttgagcttccagccgcggtccagggcctccagcgccgcccgcgccgccgcggccgtcgcaaggcccaagccgcggtatgcgggatgggtggcgatgcccagctccattccctcgtcgtagacggtgaacgtgcagcccacgcaggcgatgtccgcgccgcgccgcacgatctgcgcaaagccctgctccaccaggtcccgcgcgctggcgaactgctcgacaaagtgcgcggaccactccatttcccgcagggcctgcacgtccgcctcctctgcgcaagcgagggaaaacccttccggcagcgcgcagagcgcgcgcaggtgcgcgcggtccagcgcggccatctccccctttacgcggtagcgcgttctcccctcggcgcgcgggcccaggacctcgtaaaagcgcgccacccaggcgggctccagggagacgaggcagctccccgcctctgccgcgcggatgcaggacgcggcctgcgggtgcgcggggtccccgccaaagtagaagaagttgccgcagcgcgcgacgatcagccggatgttctccgggtcgtccgcctgcacgctgcccgcgtacccctgcaggaccgacagcagcgcggtgtcccggatgcccgggaaccatggcgcgcaccggcgcgcgatggacgtttgcaaggaaaccatacgtctctcccttccgtttcgatcgtgcttccattgtactgcatgggggcgcgcctgtcaaagccgcgcggtcaaacgcctcgcttttgcgctccaacggcttgttccgcccgcccaaagcgcaaaaaaatgggcgcctgctcctccaaggtctggggagcggacgcccactcgctctgcggtttattcctcgcgcacggagaactgatccttgcccacgccgcacagggggcaggtccagtcgtcggggagctgctcaaagggaacgtcgccatcgtactcgtagccgcagacatcgcagacatagaccttcttcatggggtgtaacctcctcatcgtttgcttccctcattataccacacaaacgggatttgcaaacggctattccacatcttcgcgcaaaaatttcatcgggtccagcgcctcctgcagctgccagagctcaaagtgcaggtgcggcccctccgcgcactcgatcgcggcgctcgtccccatcgtgcccaggacctggccgcaggcgaccttcgccccctcctgcacgaggccgggcgtcgcaagggacgcatagcgcgtgatgtacccctcgcggtgcgtgatctcgatgcagttgcccatcagcgggtcctcccagacgcgggtgacggtgccgtcctccgccgcgcgcacggggtcgccctcctcgccgaggaagtccacgccctcgtgcgtgcggtattcgcgcagcgtctcgctgtagaccagcgtctgcgcggcaaagggcatgcccacctggccggcgctcgggaagacgaagggcgcctgcgtctgcgcgggctcgatcgtcacgtccacagaggccggctgcggcgtgggcgcgggcgtgggcgcggcataccgcgtcacctcgggcgcctgcggctcctccgcaatgggccgcgtccagaccgccgtgaccgccaccatcgcaagacaggcgctcagcacgcacaaatagccaaaccggtcccagaaccgcttccatccttcgcgcaagaagcgtcacctcccctttggaggtaaccttccccgcagcgcggcgcgctatacgtccccgacgcgcagaggcgcaaacgccacgcccgtgtagtagtgctgcaggatctcccgatagctgctgccctgcgcggccatggcgttggcgccgacctggctcatgcccacgccgtggccgtagcccacggtggtcaggaccgcttcctctcccgcataggcgatggtgaagttcgtggagcggaggccgagcgccgtgcgcaccgcgcgcccggtcgccgtcacctcgccgacctggacgacgtccgcgcggccgctgtccgtgcggctgcgcacggaaaacgcgctgcgcacgttctgctccgtgaggtttgcgcccggaaacgcctcgttgagcgcggagacgagcgccccgatctttaggcgcacctccttgccgctctccccttcctccgcgctctccacggacgtcagatacggatacgccgtgccccagaccgcctgcgcgtcctcggtctgcccgccgctggccgagtggaagagcgcctggatggggctgccgttgtagagcatgacctcgcccgccgtggcgcggaccgcctcctcgatgcgggcgcggttctccgcgtaggcctcgccccagcgctcgcgcatctccgcctcgctccagtaggccatgcagtgggtggagtccgtgcacacgtccgtgtccacgccctggctgcaccctccgccgccaaaggccggcatcttccaggcgaggtaggagcgcgcggcgaccgcctgggctttgagcgcctccatctcgtaggaggcgggcatctcccccgccacggcataaatgaggtagtcctccatgtccatgcggacggcgcgcccctcgtcccagaccgtcagcacgatgggctcctcctgcgcctgggcggagagcacgcgcgccgcctccacgcgcacggtctgcgcgcgcggcgcgggattgtccgcctgtgtgggggcgggcgcaggggcttccgttcctccatggaggagatagacgcccgccgcgcaggccagcgcgcagagcaaaagagcgaacttgcgcattctctcacctcgtttcggtgcatgtatacgcgccgcggcccgccttgatgcgcctcactccacgcgcacgatgggcgcgcccagcgcgcgcagcgcgccggccaggtccacgtacccgcgctcgatgtgggagatctccgtcaccgtggtgtgtccctcggccgtgaggcccgccagcaccagcgccgcgcccgcgcgcaggtccgtcgccgagacgcgcgcgccgtgcagcgactccacgccgcgcaccacggcgctgcggccgcgcaccgcgatggaggcgcccatcttccggagctgcggcacctgcagaaaccggttctcaaagatgtgctccgtcaggatagagctcccctccgcgcggcacaatagggccatcatgggcgcctgcaaatccgtcgggaagccgggataggccagggtctccacgtccacgccctgcaggcgcccggcgcgcacgcgcaggccggcgctctccgccgtcacctgcgcgccgcactcgcgcattttcgcgatgaccgcgccgagcgtgtccgcctgcgcgccgcgcagcagcacgtccccgcgcgtcgcggccgcgcagagcatgagcgttcccgcctcgatgcggtcaggcatgggcgtaaagcgcgccccgtgcagcgccgggacgccctccacggtcagccggctctgcccgatgccggagatcttcgcgcccatgcgccgcagcagccgcgccaggtccgcgatctccggctccttggccgcgttgtcgatgacggtgacgcccttggccagcgtcgcggccatcagcaggttctccgtcgcgcccacggagggaacgtccagatagatgaccgccccgtgcagcccgtcggtccgcgcctcgacgcacccctcctgcagcgcaaagcgcgcgcccatggcgctcaggcccttcaggtgcaggtcgatggggcgcgaaccgatcgcgcacccgcccggaaagctcaggcgcgcccggccgagccgcaccagcagcggccccagcagcagcaccgaggcgcgcatccgctcggcatagattccctccgcgcggcagccgtccaggttctccccgcaaaggcgcatcccgccccgcacgcgggatacctgcaccccgattccgccaaggagcgccgccatgccgtccacatcggtcagccgcggcacctccgcaagttccagcgcctcccgcgtcagcaccgcgcaggccatcatcggcaaaactgcgttcttggatcgctgcacgcgcacttcgccccgcaggggcgggctcttttccattccatattgcgccatttttcttcccctctccttcgcccctagtatttggggcgcgcgcgctccccatgcaggcaatggccggcagcgctggcgaaaaaataaaacaaaacttgcgcttccctattgactttaataaaattaaagatataattgaattaaattaaaacccgcgcggaaggcgcgcgggaagcggggggagggcagcgcgtggagatcatacccgaatggatggcgaacctggacgacgaagacgtgaccttcatcaagaactttctgctggtttccggatcgctcaaggaggcggcggcgatgtacggggtgacgtacccgacggtgcgcctgcgcctggaccggctgatccaaaagatccgcctgagcgaggacgcggcgagcgatccatacgtcatgctcatcaagcgcctggcgatcaacgataagctcgattttgacacggcgaaagtcctcatcacggagtatcgaaaggccctcggggcggccagcgcccggaaagagggcccgaaccggacccccaaaccgactgcgaaaggagaatgaccgcgatgtcttacgctggagctctcttcatccttctccccttctttgtggggctgcttctggccgttgcggccgtgggccttggcgtgttcttcctcgtgcgctatttccgccgccgcggcgcagaaaagcgccggcaggaggcgcaggagcgggagatggaccgcatgaagatcgacgacctctaagggcaaaaaaatcgcccctgcatccgaaacgctcgggatgcaggggcgatttttgcgcctagtccttgaacttgtcgaagaattccttgacggatttcttccagttgtcgccccggctcgcgccggaggccttgccgcccatggcctcgtcgaagaggcgcagggccattctctgccgctcgttgaggcgcttggggacctcgaccttgagggtcacgaacaggtcgccccgctgcgagggattccgcaggctgggcacgccctcgccgcgcacgcggatgacctggccgggctgcgtgccctcggcgatggtctccttgaccgatcccttgagggtttcgatctccacctcgtcgcccagggccgcctgggcaaagctgatggtcatctcgctgtagaggttcgcgccgtcgcgccggaacttgcggctgggccgcacggtgatggcgatgtagaggtcgccggccgggcccccgcgctgtccgggctcgccctggccgcgcagggtgagcgcctggccgttgtcgatgccggccgggatggtcacggtgatgctgcgctggcggcggatggtgcccttgccgccgcacttggggcagggatcggtgatgatcttgcccgtgccgccgcacttggggcagggggagctggtgcgcatggagccgagcatggtctgctggatgcgcgtcacctggcccgtgccgtggcactggtcgcaggtcttggggctggtgccgggctttgcgcccgagccgccgcaggtatcgcaggcctcgtcgcgggtgatgctgatctccttcttgcagccgaagatcgcctcttcaaagttgatggtcaggttgtaccgcaggtcgtcgccgcgcaccgggccgtttgcggcctggcgggtgctgccgccgaagccgccgaagctgccgaaaatgctctcgaaaatatcgtcaaagccgcccgcgccgccggtataggtggtgtagctgccgtagtttccgcccgccgcggtcgggtcctcgtggccaaactggtcgtatctcgctctgcgctggtcatcggaaagcacctcgtatgcttcgttgacctccttaaacgcagcctccgcctgcttatcgcccgggtttaggtccgggtgatactttttggcaagcttccggtaagcgctcttgatctcggcctgcgacgcaccgcgctctacgcccagcacttcgtaataatcgcgttttgccaaaggtgtttcctcctcgcctgaaagggaatgacgcctgctgcgcgccattccctctcacgatctttttctgcgcttacttgtcgtcgtgcacttcgtagtcggtctccacgttgccgttggcgtcggggccggggttggtggcgcctgcgccgggctgaccggcctgctggccgccctgctgctggtagatcttgccgaagacctccatggagatctggttggtcttctccatctgcgccttgatggcctcgacgtcgccgccgtccttggccttgcgcaggtcgctgagcgcgtcctcgaccttggccttgtcggcggggtcgaccttgtcgcccaggtccttgagggtcttttcgatctggtagatggtggagtccgcgttgttggtggtctcgaccttctccttgttcttcttgtcctcgtcggcgtacttctccgcgtcggcgacggccttcttgatgtcctcctcggagaggttggaggaagcggtgatggtgatcttctgctcgttgccggtgcccaggtccttggcggagacgtgcacgatgccgttggcgtcgatgtcgaaggagacctcgatctgcggcacgccgcggggcgcgggcgcgatgccggtcaggttgaagcggcccagcgtcttgttgtaggcggccatctcgcgctcgccctggagcacgtggacctcgacctgggtctggccgtcggccgcggtggagaacacctggctcttgtgggtcgggatggtggtattgcggtcgatcaggcgggtgaagacgccgcccatggtctcaatgcccagggacaggggcgtgacgtcgagcagcagcacgtccttgacctcgccgcccaggacgccggcctggatggccgcgccgaccgcgacgcactcgtcggggttgatgcccttgaaggggtccttgccggtggcgttctttacggcctcctgcacggccgggatgcgggtggagccgccgaccaggatgaccttatcgatgtcgttggcggtcagggacgcgtcggagagcgcctggcgcaggggcttgatggtgtcctcgaccaggtccgccgtcagctcgttgaacttggcgcgggtcagggtgacgtccaggtgcttggggccggaggcgtccatggtgatgaagggctggttgatgttcgtgctcatgacgccggacagctcgatcttggccttctccgcggcgtccttcaggcgctgcatggcctggcggtccttggacaggtcgatgccctccgtgcgcttgaactccgcgaccaggtagtccatgatgcgctggtcgaagtcgtcgccgcccaggtgcgtgttgccgttggtggagagcacctcgaacacgccgtcaccgatgtccaggatggagacatcgaaggtgccgccgcccaggtcgtagacgaggatcttctggctgccttccttgtccaggccgtaggccagggacgcagcggtgggctcgttgacgatgcggagcacttccaggcccgcgatgcggccggcgtccttggtggcctggcgctgcgagtcgttgaagtacgcggggaccgtgatgacggcctgggtgaccgtctcgcccaggtaggcctcggcgtcggccttgagcttctgcaggatcatggccgagatctccggcggggtgtaggacttgccgtcgatggtgatcttttcattggtgcccatcttgcgcttgatggagatgatggtgcggtcggggttgacgacggcctggcgcttggcgatctggccgacgaggcgctcgccgttctttgcaaaggcgacgacggacggcgtggtgcgcgcgccctcggggttggtgatgacaacgggctcgccgccctccatgacggcgacgcaggaattggtggtgccaaggtcaataccgatgatcttgctcataactgatgaagcctccttcaagacttttccatgcaaatgcgttcaaaatagattcttttaattggccacgcggaccatcgcgtagcggacgaccttgccgcggacggcaaagccggtctggaagcattcgatgatggtgccttcggggtgttcctcgtcggcctccgtcatcatgacggcgttgtgcttttccgggtcaaaggccgtgccgggcgcggcttccacgcgctccatgcccagctttttgagcgcctcctcaaagccgcgaagcgtcatctccacgcccttgtagaggctgccctcctcgccggcggcctttgccgcctcgagcgcgcgctcgagattgtccagcgcgggcaggacctccttgaccgcgtcgcggacggcgtcgtccgcaacctcggtgcgcagggaggcgtttcgcttgcgatagttgtcaaagtcggcctgcacgcgctgggccatggcgaggtattcgtcccgcttctgctctgccgccttgacgtaggcgttgagctcttcgagcttttcgcgcgtgatggtgatgttgttgctctcctgcggcgcctcctcgggcgtttcgccctccggcgcgggatcggctgcggcgcgggccttcttttcctcagcctttgcggcggcctcggccttgttcttcttattgtccttcatgtttctcctctttccgcgttccgccttccttccggttgcccggcggaatcagcgcttcattcatcacgtttttcatggcttccagcacggagatcacgcggccgtagtgcatgcgcgtcgggccgatgatgcccatggtgccgacccccgtgcccacgcggtaggaaaccgtgaccagggagcagtcctgcatgccctcctccgagagctccggcccaatggccaccgagaactccacacccgagcgccgcagcagcagctttgccaatttctcctgcgtctccagggtggagagcaggctgcgcgccttcttcaggtcgctgtactcgggatgggagagcatccgggccgcgccggccacgtgcacggagtgcgcgtccggctccatctgcttttgcaggctatccatcagccgcgtgaacagctccctttggccgctcatctccttgccgagctcctgcatcaccttgggatattcgctcacgcgcttcccggcgaggcgctcggtcaacaggttgctgatggcgtagaggtgatcgggcgtgacgcccgcgggataggggatgaccgagtccttgtgcacgccctcgtccgtcacggtcaccatcagggccgtggtgtcggtcagcggcacgagctggatgcgcgcgatggagcggatctgcggcgcgatcatcaccgaggtgtagtcggtcatggccgacagcgcctgcgtggccgaggagagcacgtcctccatctggcccatgcggctggaaaagatcttccgcagcaggctgtactcgctgggcggcagggcgctgacccgcagaatctgatcgacgtacaatctgtacgcccgccaggacggcacccgccccgccgacgtgtgcggggaggccaggtaccccagctcctccaagtcgctcatctcgttgcggatggtggccgaggacagccccatcccttccttgcgcgagatggtccgagagccgaccggcatggcggtcgtgatgtagtcgtcgatgatggcctgcaaaatcttaaactttctctcgtccaagtccacgtttcgtccggctcctttcctgccctttcgggcatcctgttagcactcaggtttgccgagtgctaactcatgatgtaagcatagcaccacatgcaaaacttgtcaagggttttatggagaaaaacttacgaaagtttgcaggcagccgagcgcggcctgcactgccagtttgtgcaggcgcgccggcttttataataaggaaaacgctccgcactggaagctcgttccagcgcggagcgcctttttcacggcaaaaattcctccaggatggcgttcatgacgtccatgccccggggcgtcaggcgcacgcggcgccccgcgccctcgagcagcccctgcgcccggaagcgctcgatcccttccgcaaaccgggcaaaggcgcgcgcggacagctccacgccgtccacgaggcgcaggccgagcatgagcatttcaaagtcctcgtcctcgggcgtcaggcgctcctccacggcaaagggcgcgccggcgaggtacgccgcaaggtctgaggggtttgcccggcgcaggtttccctccagggagtgcgccgcgcagcccaggccgatgtagtcctcccgcgtccaatagccgaggttgtgccggcaggcaaagccgggctgcgcgtagttggagacctcgtagcgcgcaaggcccgcctggccgaggatgcggatcgcgctcgcctgcatggccagctcctcgtcctcgctcgggcggggcaggcgtccgcgtgcgtccagatcgccaaagggcgtgccctcggccaccgtcagcgcgtagcaggagcagtgccggggcgagagcgagagcaccgcgcgcaggctctcctcccagtccgccagcgtctgcccgggcagggcgtacatcaggtccgccgagaggttggcgatccccgccgcccgcgccagggcgaaggtctcctgcgcctgcgcaaagtcgtggatgcggccgatgcgcgtcagcagcgccggctgcacggcctgaatccccacgctcagccggttgacgccgccctcggccgcggcggccagccattcggccgtgacggtgccggggttgacctcggcgctgatctcgcagtccggcgcgagcgcgtagcgctgccgcagccccgcgagcaggcgcgccagcgccgccggcggcagcagcgagggcgtgcccccgccgaagaagacgctcgtcaccgtcccggcgcagggcctgcggtccatctccgccaggagcgcctctacatagcacgcgatcttgtccgcctgccccgcgtaggagacgaagtcgcagtacgcgcacttgcgcacgcaaaaggggatgtgcaggtagagcatcatgcgcgcgccgcctcctccccgcgcaggcggcggctgagttccgccgcgccgcaggcggcgctccgctccgcacccgcgcgcaggagcggccgcgccagctcgtccgcgagctcatccgcgttgtgcaccgcccaccagggcagcgcagggctgtacccctcgcgctccgcgatgcagaagcagtacccgcgcagccgctccccctcgaagaggaagaggaactgcggcaggctgccggcctgcgccgcctggaccgccgccgcaagctccgccgcgccggccccgccgcccgggcaaaagcccagggccagaacctcccgcagggcctcctcccgttccgccctcgtcatgtccagggaattccgaatggaaatcatgtgcgttccctcccgtctttgcaggaaaaccagggcagcgcagggctgtatccctcccgctccgcgatgcagaagcagtacccgcgcagccgctccccctcgaagaggaagaggaactgcggcaggctgccggcctgcgccgcctggaccgccgccgcaagctccgccgcgccggccccgccgcccgggcaaaagcccagggccagaacctcccgcagggcctcctcccgttccgccctcgtcatgtccagggaattccgaatggaaatcatgtgcgttccctcccgtctttgcaggaaaagagcccgcaccccagggggcgcgggcccgaagcagcgtcagtccgccttgagcacggcgatgaaggcctcgctggggagctcgacgctgcccagcgtgcgcatccgcttcttgccctccttctgcttctcgagcagcttcttcttgcgggtgatgtcgccgccgtagcacttggccagcacgtccttgcgcatggccttgaccgtctcgcgggcgatgatcttgccgccgaccgccgcctggatcgggatctcgaagagctggcgcggaatgacctccttgagcttttcggcgatggcgcggccgcgcgggtaggcgcggtccttgtgcacgatgatggagagcgcgtcgcagatctcgccgttgagcaggatgtcgagcttgaccagctccgagcgggcgtagccgttgagctcgtagtcaaaagacgcgtagccgcgcgtgcgcgacttgagcgagtcgaagaagtcgtagatgatctcgttgagcggcatctcgtagtggatctgcacgcggccggcctcgatgtacttcatgtccacgtagacgccgcgcttcatctggcacagctccatgatcgtgcccacgtactccgagggcgcgaagatctgcgccgagaccatgggctcctccatgtactcgatgtccgcggggtccggcaggtttgtcgggttgtcgatgtagagctccgtgccgtcgcgcttgaccacgtggtagacgacggagggcgcggtggtgatcaggtccaggtcgaactcgcgctccaggcgctcctggatgacctccatgtgcagcaggcccaggaacccggcgcggaagccgaagcccagcgccacggaggtctccggctcaaaggagagcgaggcgtcgttgagcttgagcttttccagcgcgtcgcgcaggttttcatagtccgagccgtccgcggggtagatgccgcagaagaccatgggctgcacctgcttatagccggggagcatctcccccgcggggttttgggccagggtgatggtgtcgcccacgcgggtgtcggccacctccttgatggaggcgccgatgtagccgacctcgcccgcgcgcagctcgcccacgggcacgagctcgccggggcggaagtagccgacctccgtgacgtcgaactccgcgccggaggacatcatgcggatgcggtcgcccacgcgcacgccgccgtccacgatgcgcacaaaggaaagcgcgcccttgtagttgtcatagacgctgtcgaagatcagcgcgcgcagcggcgcgtcctcctcgccccggggcgggggcacgaacttgaccacggcctcgagcacgtcgtcgatgttctgcccggtctttgcggagatgcagggcgcctcggacgcgtccaggccgatgacgtcctcgatctccttcttgacgaagtccggctgggcgctgggcaggtcgatcttgttgatgacggggatgatctccaggtcgtgctccagcgcaagataggcgttggccagcgtctgcgcctcgatgccctgggaggcgtccacaaccagcagcgcgccgtcgcaggccgccagcgcccggctcacctcgtaggagaagtccacgtgaccgggggtgtcgatgaggttgagcgtataggtcacgccgtccttggccgtgtagggcatgcgcacggcctgcgccttgatggtgatgccgcgctcccgctccaggtccatggtgtcgagcacctggtcgctcatctcgcgctgggtcatgacgcccgtgcgctcgatcagccggtcggccagcgtggacttgccgtggtcgatgtgcgcgatgatgcagaaattgcggatggtgtcttctctcttcatggttttctaatccttgcgctccttctcttgcaaaaagcggcccagctccatgagcgcgcgcccgtcccggaggatgaaggcgttcagctcctcctgcgtgaattccgccgtcgtcttttccgcgccgtcggggatgaagaggcgccacagcgggctcttctgctccggccggtccccgccgcgcagcgcctgcgccacgctccccgccgtctcggaggagaagaggcggatctcctccccgtcccaataggccacgcactgccgaaagcggcagcgccggtcctgctcgcccgccatgagctttgcgatgccctcgacgccgatcgtgcgcaggacgaagttcacattcgtccccggaaagccgcgcagcgcgtcgatgaagaacccggcgtcctgcacgaagaagggcgcggggaccttctgcgcagccgcctggcggaccttggcgcgcgcgatctgcgcaaggtcgtcgctgcgcggctcgtcaaagtccgcctttgcgccgcggacctcgaccccaaagcggccgagggcgcgctgcgcctcgaggagcttgcccgggttccccgtgacaaagtacagcgtcatggatctttccccctcagaagtctgccttgatgttgagcgacttttccagcttgcgcttgacgcgctggagcgcgttgtcgatggattttacgtgccggtgcaggtcgtgcgcgatctcctggtagctctttccctccaggtacgaggtgagcacctccatctccaggtcgctcaggacctcggagatgcggttttccacgctggagtagtcctcctgggagatgagcagctcctcgggcccggccatctgcacctcgctgagcacgtccatgagcgtgcggtcggactcctcgtcgtagatcgggcggttgagcgagacgtaggagttcaaggggatgtgcttctggcgggtggcggtcttgatggcggtgatgatctgccgcgtgacgcagagctccgcaaacgcgcggaaggaggagagcttgtccggccggaagtcgcgtatggccttgaacagcccgatcatcccctcctggacgatgtcctcgtggtccgcgccgatcaggaagtaggagcgcgccttggagcggacgaagttcttatacttattgagaaggaactcctgcgcggcgtcgtcgccgtcgcgggcgagcagcgcgatctcctcgtccgtcatttcctcgtatcgttccttcttgaggccttccggcattcggccttccccccttttgccgcccaatggcagcccttactcgttcccgggcgcgcgccgcatctcctccaggcggcggcgcacgtcctccggcaggcggtcctcgatggtcttgacctggtcggccttctgcggccggttgtggcccgcctgcgcgctcttggcgctgcgcacgatggcgcgcatctccttggccgggatgcgcacggcgccgcgcgtaaagatcacgttctgctccgtcgcgtcggaggtcgccacccggatggcctgccgggagaaccgcggcaggttcgccatccgctcgtccaccgtgcgctcgatgaagcggtccgccgtctcgctgcgcttggtgaagatgacgtcgatgcccgcgacgcgctcgacgctggtcttgggcttatcgcccttgtatccatcgaacacgagcatcagctcgtccccggtgaaccccgcaaagtccgccagcatcgagatcagcagctcccgcgactgggagatgtccgttaggccgcggaactccggccaggcgccgatcatgttgtagccgtccacaaggtacagcatggcttcagcccctttgccgcgcgatctcggccaggatcacgcccgcggccacggaggcgttgagcgagtcgatgtgccccttcatggggatggagacgacctggtcgcacgtctcccgcacaaggcggctcacgccctggccctccgcaccgatgaccagcgcgcacccgccggaaaagttcacccggcggtagtcctcgccgtccatgtccgtggcgtaggtccagacgttctgcgccttgagggtttcgagcgcgcgcgtcaggttcgtcacccgcgccaccttgatccactccagcgcgccggccgcggccttcatcgccgccggggtcagccccacggcccgccgctccgggagaatcacgccgtgcgcgcccatgcactcggccgtgcgcacgatggcgcccaggttgtgcgggtccgtgatgccgtccagcaccacgaggaagggcggctcgcccttttcccgcgcgagggccaggatctcctccagcgtggaataggcgtacatcgaggccagcgccgcgacgccctggtggttctcggccatctcgtccaggcggcggcggtccacctcctgcacgacgacgcccttttcgcgggcgagggccaggatctcccgcagggacccggtcgcctcaccccggctcacgagcagcttttccatgtcgcgccccgcgcgcagggcctcgcgcacggcgttgcggccgacgatgaggttttccggcgtctcccgcggcgcctcgcgccggggccggaagttcgaggatcgctccgtcattccttctccctcctctcctggcaagcggccttgcgcgcgcggacctcgtccgcccggccgcagctccgcttgccctcggggcaggcgccccgcacgcagccggggcccgcatccgcgaacaccgccggcgcaaggggcgcgacgagtgcatacatctgccaggcgagctcccggatctcccactgcgcgcggttgcacatgcgcagggagaagaagtgcaggagctcccgggcgttcatcgtgacagtcatgcgcgtggccgccgcgcccggcagcacgaagcgcgcgtcctcggccgcgtcctcgcccagggcctcggtccactcgtcgtaccagcgctgcatggtcttcatctgcgcgaggtacttctcctgcgcctcggggccgaggccgcggatgcgcggggggcacacatagtcaaatacctcctggcccgcgaccgaaacgtagcgctggctctgcacggagaagctggccaggcggtggcgcgtgatctgcgcaaggagcgtgcgcgaaacgccctcgatgccgaaggtgaaggaggcgtgctccacgaccgaggtgtggccgctggcgagcacccgccggatataggccgcgttgtccgcggtctcggccttgtcgcgcaggccgcccaggtccagcgcggaatagcaggtgcgcgaggccatggcgatgattttctccggctccggcgtgtgggcgatgagcgttacgtgcagtttcacttccggcatgggggttcctcctctgtgcgtcgtatggcggcaaagagctcctccagccgcgaatgtcttcccaataaatacaggtagcccaccagcgcctccagcgcggtcgcgcgggcgtagtccccggggtcctggttcttgggcgggcgggagtgggcgttgcggccgcgccgcgccacgtccgcctcctcctcggtcaaaagcggctccaccgccgcaaaggcccgcgcctgcgcgcgggcgttgacatgcgcgaccgcgcggcggtgcagctcccgcacgcacgcgtcgtgctcctcgagcacctgcgtgcgcgcatataaatcatagatcgtatctcccacaaaggcgagctgcacaccgttgagcccgcgcacccttgcttcctccactgtcttcctcagcgccttcccgccgcgttctctgcgccttgtgcgcatatatcagcattttattatagcatatttccgcgcgcctcacaaccgggaaagcgcgcaaaaaaccccgcccctcagcgcaaaaacgacctccccgcgccttgtgttgcagggaggccgccgctttggagatttggtttaggcctgggccgcgtgcgcggcgcgtcaggccttggcgcgcgcgccgaggttgcgggcgaagcgccgcaccggcgggatgaagccgatcaccgcacagatgagcgcgtccacgccgacgcttgtgaggttatagcccagggaatagaccagcgggtccatgccctcgggcgcgtagtcggcaaagtagaccacgccggagagcacatggcagatcacgcgcacgacgcccgccacgatgacgccgacggagaaattgagcggcgagtcccacttgcggaagagcgctaccagcgccagcaggccgaagggcagtatgtagtccagcgccgcctgcacccagccgacgatatagggatcctggaacatctgcaaaatgccgtaggccacgccgcagagtatgccggggccaaagccgtaggcgtaggcgaacatcatcaccggcaacatggaggccggggtgatggagccgccctggggcatgtgcaccaggcggatgtaggaaaggacaaagccgatggcgatgcacagcgcgccggtggcgagcatcttggcgttccacttgaccttgggggtgaccagggccaggatcacgccgaaggccacgatcagcgccagcgcgatccaggtggcagcggggatctccagaaacttgccgaagatttcttccatggggaaaggactcctctcttctcgccgggcggcagacgggcgtaaaaaaaccgtgctcagcctgatgaacacgggatgcgtacacgttgtgcaaagggcgcgcaaatccagcgcgcgagccttgacttatgcgcttccctacggtaggattaactacacaggttcaaagggttgaagctccgcttctctcagcccgagggctcccccagctttttcgatgtagatcatacgcgctccgccgccgtttgtcaagtcccgcgggcagatttttcgacgcaaaagggggaattttccgttgagacgccattttttcgcttacatgtcccgcatgaagcacatcaagcgctgggcgctgatgcgcaacacctggcaggaggacatcgcccagcactcgctgcaggtctccatgatcgcccacgccctggcgctgctgcgcaaccggcgcttcggcggcggcgcggacccggagcgcgcggcgctgctcgccctctaccacgaggcgccggaggtcatcaccggggacctggccacgcccatcaagtacttcaaccccggcatccgctcggcctacaaggagatcgagggcatcgcggccaggaagctgcactccatgctcccggaggacctgcagggcgactacgcgcacctgctcctgaccccggagagcgaccccgagtggccgcgcgtcaaggccgcggacaagatcgccgcctacatcaagtgcgtggaagaactgcgcgcgggcaacgacgagttcgcgcgcgcgggcgagtccatcctcgcccagatcgaggcgctggacctgcccgaggcgcgggcgtttctctcggagttcctgccctccttccgcctgacgatggacgagctgaactgaggcgcgcgccgtaacaaatgcgcgccgcgcatcgtttattcatcagtccccggcgcagccgggcgcccgcttttgagaatggttttgcacgttttcttttttcccttcatccctgaaattggaggccgctcatgatccgcaaaatcctgctcttcctgctctgtttctgtctgctgttcgcttcggcctgttccacccagaccccgtccgagggctcgtccgcgccgtcggcctctccggacgcctccgcatccgccgagacccccgcgccgggcggcgcggcttcgggcgcgccgacggagacgttcgatcctacgctcgtgtccgacgccctgatgcagacggaggaattctccctgcagctcatgcagaacctccggaccgcgtacacggaggggaacacgctcttttccccgctcgccttcaacgcctccatggccgcgctctacgccgcggccgagggcgacaccgaggaggaactgcgcgtgctcatgggctaccagaccgagcccgccgacacggtgagcaccttgacctatctcatctccaccgtggacagcgcgcgcttttccctgggcaacagcctgcacctgaccaagcgcgtcggcttttccgagtcctttatcgacaacgtgaccacgccgctgcgcatcagcacctattcgcaggactacgcggatcaggccaccttccagtccatcaacgcctgcgcggagctgctgaccgacggccgcgtgtccacaatcctcgaatccacggccgcggcggacacgctctacctactctccgccttcagcctgaacggcacctttgacctgccctttgacccggagagcacgacggccgcctcctttgagagcccgacgggcctggtctccacccagatgatgacgggcgactttgtcacgggctatgccgaggacgagtacatgcagatggtcagcctgcccatgaacggcggcgccatggagctcaagctcatcctcccgcgcgagggcggcgcccaggcgtttgacgaggccttcccgcagtatgcggacacctggctcgcgccggagacgcccacgtcccactccgtgcacctgagcctgccctccttcaccgtcaacagcggatcgagctacctggagatcctcacctccatgggcctgaacaccaccctgcgcgcgcagagcgtggacctgagcgggatgctcaactccgacctcgtgctgcccacgccgctcaacgacatcttctccgtggcgagcctgaccgtgacggagagcggcatcaacgccgaggcgggcgcggagcccgtgccggccgagtcctccgaggagagcgtggagctcacgttcgaccgcccgttcctgatggcggtgacggacacgcagaccggcgtcctgctcgccatgggctgggtcaacacggtcaacgagtccaagtaaggcagatcccccggccccttgcgcagggaccgggggagttttgcgctcagagcgcgttccagatcaggaggaaggcggccacgcagccccacgcgttccccgtctcccgcttcaccaggagcatcccgtatatcgcggcgaatgtggtcaggctctccagcacgccccaaagagagatctccatcggatggaacagcaggcagaccgttgcgcagacgagcgcgccccagctcaggaaccgcggcttagccggatagcgcgcgtcgatcttgtcgcagatcacggcgtagttccacccctcaaaaaaagccccagaccacagcgatcagcgccatgccgaggatcgacccgggcatgccggcgctgcgcacctcccgcgcgatgcggatgtcctgggggcagtacccctcgaccttccccgccccgaggcgcacgagcacgctcggcacaaagcacagcagcgtgccgaggattgcgggaagcgcgccctttctgcgcaggccgaagctcgagaggcgctcccgccgcaggatgcagacggcgacgctgcccagccccgccacgccgaactgcacgccggcgttcagcagcagccggggcaaaagcgggcggccagcgtccagaacaaaggcctccaggggcccggaaaacacggcatacagaaaaaacgcgctgtctcttcctccctttctgttctgcgctcccattgcagcatgggcgagcgcgcgcagcaaggcgcatgtgctttccttgccgcgcgctttcgtgtataatagcagaaaaggcgggggccgggcctcggcgccccgtttgatggaggcaatgtatgatcaacggcaatacccagggcatccggcaggcgctccttgcgcagatggaggccatgcaggaaatcgagtgcgaccgggacgtgttccttcccgaggccttgatgcaggagatggcgcgctttacgggcctgctcaaccgcgaaatctccgtctacctctcccgcagcggcagcgtgctggacgtgaccatcggcgacgcggacaccgtgggccttccggaggtccacaagcggcgctcgctggcgcgcctttcgggcgtgcgctgcatccacacccaccccggcggggacagcacgctctccgacgtggacctgcagtccctgcagcgcttaaagctcgacgccatggccgccatcggcgtcaccgcggagggccgcgcccgggcgctctcggtcgccttcctcgacgagccgggcagggaggggcagtacaagctgctgctcgccggcccgttcccggcaaaccgcgtgccgcaggccgggctcatgcagcagatcgaggaggcggacgcgcgcatcagcgcggcgctccccccgccccagcgcacggtggagcgcgcgatcgtcgtcggcctgtgcgaaagcgaggacgcgccctcgctgctggagctcgcgcgccttgcggacacggccggggcgcaggtcgtctgccgcctcttccagaaccggtcgcgcgcggaatcggccacctacatcggctcgggcaaggcgcaggagatctccctgctcgtcggcagcgcggacatcgaccttgtgatcgtggacgacgagctcaccggcgcgcaggtgcgcaacctggaggagatcgtgggctgccgcgttgtggaccgcaccgcgctgatcctggacatcttcgcccagcgcgcgaccacgcgcgagggcaagctgcaggtggagctcgcgcagatgcagtaccagctcccgcggctgacgggcctgggcgtcgcgctctcgcgcctgggcggcggcatcggcacgcgcggcccgggcgagacgaagctggaggtggaccgccggcgcatccgccgccgcatcacggacatctcccgcgagctcagggaggtcaagcgccagcgcaaccagcggcgggagcgccgcgagcgcaacgaggtgcccgtcgtggcgctcgtgggctataccaacgcgggcaagtcctccctgctcaacctgctctcgggcgcaaacgttctggcggaggacaagctctttgccacgctggacccggtcacgcggcgcatccgcctgcccagcggcatggactgcctgctggtggacacggtcggcttcatcagcaagctgccgcacgacctggtggacgccttccaatccaccctggaggaggcgctgcacgcggacctgctgctcatcgtgcaggacgtggccgacccgaacttcgcggaccaggcggtggtcgtggaccaggtgctcacttcccttggcgcgggcggcaagccggtccttcgcgcctacaacaagcacgacctggccccggaggtgtccgccgaccgggaggacgtcgtgctgctgtcgaccaagacgggcgagggcgtgccggagctcctcgccgccatccagtcgcgcctgcagcacctgcaccgccggctcgagctcaccgtgccctacgaccggggcgacgtcgtctcctttctgcacaagtacgggtccgtgctggaggaggagtacggcgaggcgggctgccgcatctgcgccctggtcgacccggtcaccgaggagcgcgcgcgcaagatgctggagcgctgagggcaaaacaagaggagggcgcgggaaaacttcccgcgccctcctcttgtggcgctccggccttgggttcctgttccccttcccgcgcttgcgggagagggagccgcgatgcccagcaggcattgcagccgcaggcgcacatagtcgcccttcgtgcgcgcaaagcgcgcatccgcgcgggccggcgcaaacaggagcacaaaccagccggaaatccgcggccagtcccagtttctcctccgtttcgccatgcgatctctccttttccaaagaagagggcggcatccggcgcgccgcgccgaatgtcgccctcctttgcggaccccgggtcagtccgccttcttttccagcatcagggcaaagccgccgttggccgcaagggggatgtccagcgcgtcgcccttcttgacggggaaggactccacgcgcatccggtgcaggtcgtgcgcgtgcagcgcgggccggccgggcatggcgtccagctttgcgcagagctcggcatccgccgggggcagcgcgccctccgccgcgtcaaagggcgtctcgtcccccagatcgtcggcaaagagggaggccgtgtacgccgcgccctcctcgaggaagtccagctccagccggacgttgcgcggccgccgggcgcagatgcccgcggcaaaccagtcctcgcccttgcggcgcgccatggtcacaaaggacgcggggtacgcctccagcacgcgcgtctcgtcccaggcggtgggcaccttggacaggaacggccgcgccgggtgcgcgagcaccgtctccgcccgctcgccgatgtgcagaatataggaggtgaagatcaccgtcagcgcggtctggtgcgcgtcggtcgtgccggtcaggtaggcgcggtagcagacgggcgtgtagtccatggggcccatggcgttgcgcgtaaagggcagggtgcagttgtgcgccgcgtccggacccatgggcaggatgttcgagaagttctgcaggtactccccgcccagcacgccctcgcgcgtcagcacgtgcggccaggtgcggatctcgcccgcgggcttcatggcgccgtggaagttgaccatgaggcggtacttcgccgcgatgcgcgccaaatagtcatactgcttcacgcgctcggcgcggtcgctctcgaagaagtcgatcttgacgcccaccacgccccaggaggaccagagcttgaacttctcctccgcgatctccggcgagcgcacgtccttgctgtgctcccagagccagatcttgacgttccgctccgcggcgtacttgaccagctccgggatgtcgacgttccccggccagccgccgtccgccaaatagtaggggaagcccatctgcgcggcatagtccacgtgttcgcggcagcgcttggggtcgcgggtggagtcgttctccgccatccagctccaggccgcgacgcccggctggacaaaggaggcgtcctccacgatggagggcgggttgaggttttccagcgtgttggaggtcacgatgtcgttgaggtcgccgcagagcacgacgcgccagggcgtcgtcacggggaagtgcgtcagcgtggggctgagctggtccggcgcgcgctgcaccatcagccgctgcgggtcctcgcgcgtggagagcaggttgcttccgccgtagtcgccaaagaccgcggcctccgcatagagcgcccagacgcccgcgccgcagtccaccagcaccgggaaggccaggcggttctggtacaggtcgcacttggggatggggtagtacatgtcctcgtaggtgaagaggtacttcatgccgtagacgtcgccggcgccggccgggatggaaaagccggtccgctccccgaggacggaggcgttcccctcgcccccggcgatgaggcgcagggccacgccgtcgtcgtaggcgcggccttcgacctgcagcgtctcctcgtgcttttccagcaggagcgtcagggtgttggcgtggttttcgcacgggctcttcttgaacgcgggcagggcataggtctcctggatggaggcgtagttgctcgaaacgagggtgaggccgcagctcaggtccgcctggcgcagcagaaggcccaggggcgagcggtccacgacggtcacgccgtccttttccgcggtgtagtgcagcgcgccctcgcgcagggtgacggtcagcttcacccgcccgttgggcgattggatggaaaaccggggcattttgttcccctcctttttctagcgttttctgccttaatggtagcagtttgcctttcgcctggcaagatgtttttccagggcgcgcgcaaggaaatggcgcggcccgggaatactgggaccagagcgcgcgttcgggttcccccgcgcgcctggaaaggggttttcggagaaaatgaaacgcacgctgcttctgctcctgctcgccctcgcgctgacgggctgcgcctgctccacatcgccgggcgggcgctcgcccgctccctcgccctccctgcgggcggctgcctccgccgcgcccgcgcccacggcggcggcctccccgcagccggcggccgattatgcgctcccggagcagctcaccatcggggacaacggggtgccgctggtcgaggtctacctggcggaggaagaggtcgtggagaccatggactttgagagctatctggccggggtcctggcgggcgagatgcacaacgactggccgctggaggcgctcaaggcgcaggccatcatcgcgcgcacgttcgcgctgcgctttatcgaggacggcggctcccggtacgcgggcgcgcagctctccacggacatcggcgaggcgcaggcctacgacatgagccaggtgaacgaccgcatccgccaggcggtcgaggagacgcgcggcctggtcatcctctgcgagggggagccgatccaggcctggttccacgcgcacgcgggcggcgtgacggccctggcgcaggagggcctgggctatgacgaggccgagccgccctacacgcgctcggtgcaggtgcgcgagtcgccctccgcgccggaggacgtgcgcgcctggacggcgaccttcccccttgcgcgcgtgcagtccgcgctggacgccctgggcggcggggacgccgcggcgctggccatcggcgagcgcggcccctccgggcgcgtcacgacgctgaccgccggcgaaaccacggtccgcgcggtggacttccgccgggagatcgggagcacggagatgaagtccacgctccttacggacctgagcgtgggcgaggagggcgtcacgatctccggctcgggctacggccacggggtcggcatgtcccagtggggcgcctatgagatggcatccgacggaaagaccgcgcaggagatcatcgaggccttctaccagaacatcgagatcgcccgcgtctacggggagtgaggggagcgcgccccgcgctcaccggccggccatgtcctccagcttggagatgctcgcattggagccgatggccacgagcacgtcgtccttctccagggcgtcgatgccctgcggcgcgacggagatgtccccgccgacgtggcggatggccatgacgttgatgccgtagcgcacgcgcaggttgagctcccgcatgttcttgcccacccactgcggcgggacgctgatctcgaccagggaatagtcgggcgagagctcgatgtagtccaggatgttggtcgacacgaggttgtacgccgtgcgcgcgcccatgtcccgctccgggaagacgaccttgtccgcgccgacgcgctggagcaccttggcgtgcaggtcgctcttggcctttgtcagcacgtacttgacccccagctccttgcagagcatggtgaccaggatgctggcctgcaggtcgctgccgatggagaccacggccacgtcgaagttgcgcaggccgagcgagccgagctccgcctcgtccgtcgcgtccgcgcagacggcgtgcgtcacggagtccgcgatctcctccacgcgctcgacgctgcggtcgatggccagcacctcgtgccccatccggtacagttccgtcgccacggagacgccgaagcgccccaggccgattacgacaaattgtttcatagaatttcttcctcccaatcccctgcggggtttagccaatcatgaccttgccctcgggataaatcagatggttctgccccttgggatggcggcgcgtgatccccagggcgatggtgagcaggcccacgcggccgacgaacatcacgacgcacatcaggatcttgcccgccgcgttgagctccgccgtgacgccgatggtcaggcccaccgtgccgaaggcggagatcacctcgtacatgatgttgctggaattgaccgcctccgaaggctccagcagcagcgtcagcagcagataggagacgatgatgagcgtcagcgcgagggtgaagagcacgaccgcgcggttcatctgcccctggttgaccgtccgccggaagacgaccacgcgctcccggccgcgcagcacgttgtaaatcaataggaagaacaggccgaacgtcgtcgtcttcaatccgccgcccgtggaggccggggaggcgccgatgaacatcaggatcatcgtcagcatgagcgagggcggggtcaggtccgcctggttgagcgtgttgtacccggccgtgcgcgcggtcacggactggaacagcgcgttgaccggccgcatgtaggggtacatctccgggtccgcaagcgtgcgcgggttctcgatctccagcacaaaaaagcagatcgcgccgcccagggtcaggatggcggaaatcaccagcacgagcttggagtgcagcgacaggcgcgcaaagcgcaggtggttccgctgcaggtcgaacagcacggaaaacccgatgccccccaccgtgatcagcgcgcagatgatgagctgcaccacggggtcatttttatagtaggaaaatcctcccaccaggtcgaatcccgcgttgcagaacgccgaaatcgagtggaagaccgagtgccagacgccgcgcgccacgccgtgctcagggatcatgcgcgtcatgagcagcaccgcgccgatgccctcgatggcaaggaccagcaccacgatgcgcacggtcagggcgaccatgccctgcagcccctcctggttcaggctgttggagatgaccaggcgctcgctgagcgtgatgcgccggcgcagaaggatcaggatcagcgtgctcagcgtcatgaaccccaggcccccgacctggatgagcgcgatcagcgccacctgcccaaagagcgtaaggtcgctgccggggtcgacgaccgtaaggcccgtcacgcacacggccgaggtcgccgtaaacagcgcgtccaggaaggggaggcgctcgcccgtgctggccagcggcaggtgcagcagcagcgcgccgaggaggatgagcgcgccaaagcccagcatcagcacgcgcgagggcgaggtcaccgcctttttgaccttcagccgcgcgagggaatggggggcggcgatggcgtgcagccaggttcgaattccaattcttctcatttttatgctccgcagtttcgttctccgttttttccatggcagtcaagggtattgtaccccctgccgccgcaaacgtcaatcgtccggcgttttcacaaaaaaagtttttcctttttctttttgatgaatctttcgacagtcaatcttcgtcttaatagaggaacgctccctcatttcccacgcggatttgcgggcttcgtttcccaaatccgttacaatttgaatttttctgtcaaaacgccgccagggtttgcaatcccgcagcctttgtgctacactaggcaggccgaacggattcgctttgtggaaaggactgttgaaatgaagcgcagcgcgtcgaacctcatcatcatcctccttctcgtcgtgatcatcgtgggcgtgatcgtctacgcctcggacaagcagctcgcgccgagctatgcgccggcggacggcagcgcctccggggatgcgtccctgcccgcgggcgcggcgggccttgtgctctccgaactcatggtggaaaacgacggcgccgtgcgcgacgaggacggggactatccccgctgggtggagctgtacaactccacctccgccgagctctcgctctccggctactcgctctccgaccgcgaaaacgacgcgaccaagtaccccctgcccgccatcaccctggcgccgggcgagtaccgcgtggtcttcctctccggcaaaaaccgcacggccgccgacggcaacctgcacacgggctttaaggtcaacggctccgagacgctctacctcttctcgggcagcaccatcgtggattccgtctccggggcggcgacctcctccaacatctccaagatcaaggtcggctccgcctgggaggagacggagctctactccccgggctttgagaacaccgaggccgggcacgaggcctacctggacgtctgggacaagcgggacgagagcgcgctcaagatcaacgaggtgcagtcctccaacgccacgaccctggccgacgagcagggcctctaccccgactggatcgagatcgtcaacaccggcacggagaccatcgacctttccggctacggcctctccgacgacgtgaacaagcccatggagtggaccttcccggcgatgtccatcggcccgggcgagcgcgtcgtggtctttgccgacggcacgaacaacctcgaggcggagatcccgcacgcgaacttctccatctcctcgggcggggagacgctctccctctacgacgcggagggctacctcctggaccgcgtgaccgtgccggagctggagacggacacctcctacgcccgctctccggacgctacgggcgactttgtcgtcgagcagacccctacccccaacatggaaaacacgttggagagccagacgacgctctccaaccgtttttttcaggaacacaatcagggtgtctacatctctgaggtcatgacgcgcaacgccaccacgctggaaatcggcacgcagacgccggactgggtggaaatcaccaacgcctccggcgcggcggtgaaccttgccggctaccgcctgaccaacaaggcgaacgcgacggcgcgctacacctttccggacgtgacgctggaaaacggcgagagcaccgtcgtctacctcacgggcgcggagatcgacctgggcgaggagtacgcggcgcagtccgcggactt

SEQ ID NO: 2948 - DNA, 32759 bp, Unknown
  16S sequences of unknown bacteria
gcggggacggggcgatttttgcggcggaaaatcccattttccagagcgaaaatcgtttctttgcagtttctgcgcccggaaatccgtaggattttagcggaaactggtggggcgcacgaaggccgcgcgcagtgcgcgaaacaggccgtagtgagcccagtgaagcagggagcaccgcgagtgagcttgcgaacggcggaggcccgaagggctggagtggcgagcacacgaagcgaagcgcagtgcgcagccacggaacaccgcgcaagcgtcagcgcagggcggtgcgaagacgcggagtgaccatgctgaactgagaggcgggaacactgcaagccgccaggcgcagcagggtgaccattgcgaattgtggatagcttgctcccccgtccaccagcttgtcaaaaagtctttttgacaagctgatacggattattcttcttcgtccagatggatgcaggaggcgaagatttccgcctgctccaggagcacttcttccgaaagatacacgtcttccgaatcaccagagacgctcaagagcatcacgatggtcgtgttccgcgggccttggaaatagcagttgaacgactggctatagttgaccacccccgtctcctggtcggtattggaggcgttgtaatagtagtagtaagcgtccatgccggcgaaagtgccgttttgcacttcgctcagctcgcaagtttcgttgtaggcagtgatcatgctcgaagtttgcgtgggcacttcgtcgtattttgcgttggttccagagaaatacacatacccaatgggcgaagtggaatcctcttccggatagaaccagaaatccgtttcctgatcggacttattggtatcctgccggcggtagaagccatcgggcaggctgatttccgccagcttgtagtacttgggcttgctggaggaacccagatccgtaatcagccaattggtgttcagcacggccacgtcgttctcactgggctcagcggcgcgctcgccggtttcagaatcgacggcgtaagacagcatctgctgcgcgccctcggtcacaacgtcttctccgcgcatgggcaaggaaccgtcgtcgtagaagatggcaaacaagatggccgccagtaccagcacgccgatgccaatgaggatcaggcgcttttccttttgcgtgagcggacggtgcttgttcatcttcttgcgcgcgttgtaccccatcggcggggcggaggctttgcgttttgctttctttgccattgtcgaatcacccttccatgaaaatgcatcttgctatatgataacataaattgcggcggtttgctcgggtttgcgtaaaaattcacaatttgatcacaattttctccgctggaaacgagcgcttgacaaacgcgcttatttgcggtaccattgctagcatacgaagggggacaaaatatggccgaaaagaagtacgcgcccgcgttttatccgccgcccaaggggcgcatgcgctgggcggagcgggattatgtggacaaggcgcccattttctgctccaccgatttgcgcgatggcaaccaggcgctggcagcgcccatgagcatggccgataagctcgggtttttccaaatgctggtagacatcggttttaaggaaatcgaggtggggtatccggcggccaacgacacggaatttgaattcgttcgctgcctgatcgagaacaacctgattcccgatgatgtgaccatccaggtgctaaccatgtcgcgcgagcaggtaatccggcgcacgtttgaggcgctggaaggcgcaaagcgcgcaatcgtacacttgtatatcgccaccagccccgtatttcgcgaaaccgtgctgcgcaaatcgcgcgaggaattgctcgatctcgcgctggcaggggcgatatccatccgcgaacgggcaggcgggcgggaaggcctgcgctttgaattttcgcccgagcatttcaccgccacggaaacggacttcgcgctggaagtgtgcaaccgcgtgctggccgaatggcagcccaccgccgcgcgtccggcgatcatcaacctgccgtccacagtggagctttcgctgccgcatgtgtacgcgcggcaggtggaatatatgcatgacaacctggattttcgggaaaatgtggttctgagcgtgcatacgcacaacgaccgcggcagcgccgtggcggacgcggagatgggcctgctggcgggcgcgcagcgcgtggaaggcacgctgttcggcaatggcgagcgcacgggcaacacggatctggtcacgctggcgatgaacctgtattcgcaaggcgtggatccgggactccatttttcgcgcatgccggaaattgtgcgccagtttgaggaggccacgggcatgcgcgtgtacgagcgccagccctattcgggacaattggtgttcgcggcgttttccggcacgcatcaggacgccatcgccaaaggcatgcgccagcgcgaacaggcgcagtccatccgttggcaggtgccctatctgcccgtggatcccaaagacgtgggccgcgaatacgaggccgacgtaatccgcgtgaattcgcaatcgggctctggcgggatcggctatctgctcgagcagaaatatggcctcgcgtttccgcgggaaatgcgcctggatttcatgcgcgccatcaaggccgccagcgaccgcgagcaccgcgagctttccctggcggatgtgcacgccgtgttccagaaggaatttctggacgtgttcacgcccatcgacgtggtggaagcgcatttcgcccaaaaggacggcatcaccgcttacatcgatgtgcaagtgaacggcgggccgcgcaggaaggccacggccacgggcaacggccgcctcgacgcggtttccaattgcctcaaggcgctgttcggctatcagtattccattgtgaaataccaggagcacgcgttggggcacggctcggattcgcgcgccatcgcgtatgtgggtatcattgaatacggcagcgggcgcatgtcctggggcgcgggcacgcacgacgacatcatggccgcctccgtgaacgcccttgtgagcgcgctcaaccgcctgtatcccaatcccgcggaggaacaggagattcgctgaagaaatttttgcttttgcgcaaaaaagggctgtacatttccgcggcgctgtggtataatacggcttagcccaagaatgcactggcccttgatttacctgtatccctccggtggtgtccctgccgatggaagctcggaaacaaatggcggtcgtctcgcagggcataatgatctaggaggtttttccccatgtttgaagacaaagtgttggtttgccgtgagtgcggcgcggaattcgttttcagcgcgtctgagcagcagttctatgccgataagggcttccagaacgaacccggccgctgcccggcctgccgtgccgcccgtcgcgccaacaatggccaggcccgcggtgagcgccagatgtacgacgtgatttgcgacgagtgccatcgtcccacgcaggttcccttccagccccgcggtgatcgcccggtgtactgctccgagtgcttcagcaagatgcgccacagccagtattgattgaaccctcaaagccccggttgtcctttctggcaaccggggcttttttccatccggccgaaaacgtgttgtaaggggtgtgaagttcatgacggaaatcgtgaaagcctttcgggaacgcgttcccgccgcgcggctgattggcaagcgctattccatggccgaagaaggcgcggcctctcactggggcgaatggtttgaaaacggctggtttttgccgctggaaatgctgggcgcgctaaaggagagcgagggcgcgttttatggctttatggtcgcgcgtggggaagaagaccgggaatattggattggcatgctcttcccggcgggaacgcaggcgccggaaggctatgaaagcctggacttgccggagggggaagcgggcgtttgctatttgcgggcatacgaacaggatcccacgctctataccatgcacgcggcgtgcgtgcgcgcgctgcgccaggcgggcatggacgcgcctgaaggcgccgggtcggcggagcagcccgttttgtgctttgagcgctataactgcccccgctttaccacgcccgacggcgaaggccgcgtcattttggattatggcgtgtatcttcgcgcaaagggagaatggacgcgaaccgcggaaggcgtatgggtgcgctatggcgaccgggcggtgcacatcaaaaccgacgcggccctggtggagtacctgggcgaggcgggcaatggcgcgcgggcgctggcggaagaaatcctgcgcgaatacgaaaagcgggccggcaagcccctggacatcggcgtggactcgctggccatagaaattttgatccatacgttcctggatacgtttgccgggcgcgcgctgcatctggcggaaaaactgccgggcccgctggccgagccgctttccgcgctgctggagggattggaggaccgcacggaaatcatcgattgcggcgagcgcgaagtggatggcaaccgctgggtgttcgaccggctcgcgccctttcacggcctgttttacgaaattttgggcgataaggcgtgagacgtcaaatttccccgcacacactttcctgggcgaaacggccgcgcgcttcccagtcgcccagcatccacatcagcttggccacggcggcttcggtggtcatatcgcggccagaaaacacgtgctcggataggatgttgcggcccacttcgtagacggaaaaatccgcgcgttcatacaggcattgcgtggtgacgaggcagatcacgccgtgcgcctccagctcgcgcagcttttccaccagattgcggcgaatgtagtggatgccgcccaggccaaacgcctcgatgaccacgccgcggtagcccgcctgcaggatataatcgaacacgtccggcgaagtgccgggcacgagcttgagcaaaaacacgcgctcgtccacgccgtccagcaggcggtacgcgccgctgcgcgcctgtggcgcgatccagtgcagcccatcggcatcgaaaacgccggataggggcgcgttcacggtgtcgaaggcgtcgaaactcgtggtacgcagcttcacggcgcgcgcgccgtggatcagcttgcggttgaaggcgatgtatacgccgcttacgccgctggtggccgccagaaacgcttccgccaggttggcgggcgcgtcggaaagcgggtgggcgatcggcagttgcgatccggtaaagatcacgggcttcacctggccggagagcatgtagctcagcgcggccgccgaataggccatggtgtccgtcccgtgggtgatcaccacgccatcggcatagcgcagcgcccggtcggccgcgcgcgcgagcacgcaccattcttcgggctggatgttgctggaatccaaagagaacacgttctccaccacgatttccgccatatcgcgcacgccgctggcacgctccagtagcgcttgcgcgtccatcgcgggggccaggccgcgcgcggtgggttggctggcaatggtgccgcccgtggtcaatagcgcgattttcatgatgtttcccgcctttctttttgcgtgccggatgtatcatagcacgttttcccgcaattggcaatggctgcgccgcacttttctggcccaaatccgccgtgccgattgacaagcgccccggcagacgttacaatgatggcagcaaactatgaggaggagatggatatgcaggaatataagaggcagatcgtcgaggcggcgaacgcgatccgcgcgcgggtggattccattccagatacggcgctggtgctcggctcgggttccggcggctttgcggcgcagatggaaagcgcggtgcgcattccctatagcgaagtgccgcacatgcgcgtttccacggtgaagggccacgatggcgcgtttctctttggcgcggtacggggcaggccggtgatggtgatgagcggcaggctgcacatgtatgagggctatgaacccaaagaaatcaccttccccatccgcgtgatgcaggaattgggggtgcgcaccttgctgctcaccaacgcggcgggcggcgtgaacacgggctatcacgagggctgctttatgatgctttgcgaccacatcaattttacgggccgcaatccgctcattggcccgaacgacgattcgctcggcacgcgctttcccgatatgagctgcgtatacgatcctgctttgcgcgacgcggcgcgcgccattgcgctggaaaagggcattccgctgtttgaaggcgtgtatatgcagttttacgggccgagctttgaaacgcccgcggagatccgcatggcccgcgccatgggcgcggacgcggtgggcatgtccaccgtgccggaggccatcgtggcccggcatgcgggcatgcgcgtatttgcgctttccaccatcacgaacatggccgccggcgtgagcaaaacgccgcttacgcatgccgaggtcatcgaaaccggcaagcgcgtggaagcgcagtttaccgagtttttggcgtctctgattgccgcgatatgagcgcggggcggctgtttgccattgtcaactatcttctggcacatccgcgcgccagcgcggccgagctcgccaggcgctttgaggtttccacgcgcaccatctaccgcgatgtggaaacgctcagcgccgcgggcgttcccgtgtatgccgagcgaggccgtggcggcggcgtgcggctgatggaggactatgcgctgggcaaggcgttgttcacggaggaagagcaggatgggcttttgtccgcgctcagccttttgagcgcgacggcggcgttgcccgaaaaggcgctgctggaaaaattgtcggccctgttccggcggcctgcggcggactggatcgatgtggatttttgccgctgggggagcgaggcggcggagcgcgccgcgtttgagaccattcggcgcgcgatttgggaaaagcgcctgctgcggttcgactatcttggcgcgggcgggaaaacgatgggccgcgtcatccgccccgcgaagctcacgttcaagcactatgcgtggtatttgcagggcttttgcctgctgcgcggcgcgtaccgcacgtttaagatcgcccgcatgcgcggcgtggaggcgctggaggagcgatttgtggaagaattgaatccgccgcccatcgccgaaatgtcggacgatggaaaccggctctgggtaacgttgcgtttggcgcccgagctggaaatgcgcctgctcgatgaattttatggctgcgaaatcgagcgggaaccggatggcgcgtttcgcgtgcgcgcccatctggcgggcggcgattggctggtgcattatttgctgtccttcggggcgcagctttctgtgctcgatccaccggaactgcgcacggcgctggcgcaggccgccgcgcaagtgctcatcgccaaccggtgagggaaaaatttttgcggttttcggaaaacttgccatgccttgtcgggttttgcggctataatgggcaaaaaacgaggaggtaaggcttggatggaaacccagaaaatttgccaatcttgcggcatgcccatgaaggaagaggactttggcaccaatgccggtggcggcgcgaaccaggaatattgtaagtattgcttccagaacgggcgcttttcctgcgagggaaccatggaagagatgatcgaatcctgcgttccctttatggcgggcggcgaaagcggcttcaccgccgagcaggcgcgcgagcttttgcaaaaaacgttgccccagttgaagcgctggaagcgggatgcatgaaccgcagcccggctgttgggagaaaagcatttgctttgccagcggccgggcatttttttgccaaatttggcggcagcatccattttgcgcaatgcgccgccgcaatccgcgcactggaaattttccccaattttataaagcgagcgggtcgggcgtaattatacggttaaaatatgcgataatgttacaaatattacaagtttacgcaggaaaacggcggggttgtgtcgtataatctctatacgtatgggcagcaaagcccgcaaacggaggatgcattgtatgatacacaaaaggacgctgtatcgcgtcgccgccatcctgttggccgttgttttttgttttccggcgtttgaatgttcggcgctggcggcgcaggacggcatgatccgcgtaaagcttacgcggctgggcacgcggcaatccatttcttttcgcaccaattgtgcctatgccattggcggcagcacgggccggcgcattcccagcggcgcgaattgcacggttacgctctcgggcggtgggctgacgctcacggtcaacggcgcgcaggccgcggcgggcgtttcgctggaattgcggcgcggttcgtccggcggcgccaatggcgcaacgtttacctcgccgagctattcgggcgtgtatccgggggatttgctttttagcgtttcttccggctccatacaaacggtgttgcgcgcctatatcgaggattatgtcgtgggcgtggtggcctgcgagatgggcaattcttttcccacggaagcgctaaaggcgcaggccatcgccgcgcgtacctacgcgctgatggtgaaaaaatcttcaggctcctatgatttggtggacaataccagcgcgcaggcgtttcgcggctataatacgggttccaatgtggtggccgcggtgaacgccacgcgcggcatggtcgcgtattataacggcagcatggcgcggctgtactatgcggccagcaacggcgggcagacggagctggctggaaatgtgtggaccagcaacctgccttatctggtgcagaaagacgatccttacgactatgagaataccgccagcgtgaagaagagttatacctttcggcgggatttttccgccaattcgctgcccgatagcgtggaggacgctatgcgcagcgcggtggcggcggaattcacaaagaatgggttgtcaaccgctgccagcggtgttataatagaatcgattgatggcatagcgctgcattccccgaactatcccgcgcccagccgaacctatacgaaggcgcggttcaccgtcaccgcgcgggcgggttcttcgggggcgcggagcgtgtcctttgatttggccacgtatgacttgttggaaggcgcgctggggcttggcatcaattcttcggacaacgagacgtacgaagtcacggaaacttcggcgggattcacgctcacggcgcgccgcttcgggcatggcgtgggtatgagccagcgcggcgcgcagcagatggcctcgaaatatggcatgtcgtaccgcgacattttgacgttttattttccgggcattgaggtgcgcacgctggaattcaccgataccacagggaacttctccggcggcacggcgggcggggaggaaaatccagaatccacgcagcctccggtggaatccacggggatctatgcggtggtgcgcctgtccgattcttccagcaggctcaatttgcgcgcacagccaagcgcgtccagcagcgttgtgggcaagctggcgcatggcacgcgcgtggaagtgttggagacccggggggattgggcgcgcattctctatgcgggtgcgactggctatgtgatgaagagctatttgcaactggaagagagcgttcccgtgcccacgcccacggcgggcgtttcgccgggccagtgggctacgctgacgctcagttccacctccggccgcatgcacgtgcggcaggggccgagtacctccacccccagcttggacattctttcgcacggcgcgcgcgtggaagtgttgggcgaaacgggggaatggtcgaacattcgggcaaacggcgtggtgggctatgtgaagacgcagtacctggtatttgacgcggcgacggcaacgcccacgcccgtggcgacgcccacgcctgcgcccacggcgggcgtttcgccgggccagtgggctacgctgacgctcagttccacctccggccgcatgcacgtgcggcaggggccgagtacctccacccccagcttggacattctttcgcacggcgcgcgcgtggaagtgttgggcgaaacgggggaatggtcgaacattcgggcaaacggcgtagtgggctatgtgaagacgcagtatctggtgtttgatgcggcgacggcaacgcccgtggcgacgcccacgcctgcgcccacggcgggcgtttcaccgggccagtgggccacgctgaatttgggttcgtcttctggccgcatgcacgtgcggcagggtccgagcacgtccactcccagcttggatatcattgcgcatggcgcgcgcgtggaagtgctgggtgaagtgggcgagtggtcgaacatccgggtgaacggcgtggtgggctatgtgaagacgcaatacctggtgttcggcgcgcagcccgcggaagacgaagaggaggatttgccgctcttcggcggctcggaggacggggaaagcggcggcgcctatgccacggtgaagctcagttcttccagtagccagctcaatgtgcgcgcctctgcatccactgcttcacgggttgtcgcgcggctttcgcacggttttcgcgtggaagttctgggagtgtcgggcgattgggtcaaaatccgggcgctaggcgtggagggctatgttgccagagcgtatttggcgctggaaggggaagaagaggagccgggcgaagaggagcttccgtggtttggcgaaagccagccggaaaccacgcccgcacccacgcagggcgcggcttctcagccagtgctgttctacgcggtggtcgtgctcagcgagccggagagcacgctttccatccgtgagtacgcgtctacttcggcccaacgcattgggcgcgccgcgaacggaatggtgctggaagtgctggagtattctgacggctgggcaaaggtgcgctggcagggtcaagtgggctttgcctcccgggcgtatctgcaaaggccggcttatacggcggttgcgcaggaagatgtggcagtgtatgcgcagccttcgtttggggcggccgcgattggacgggtggacgcgggcacgcgcgtggcggtcgatgagacgcgcgacggttgggcacgcgtgttctacaaaggcgaatggggctacgccctgatggcagggtttaagccggattgaatatgggaggaactatgtcgcgggtttgtaaatgcgtcgtagccattgcgctgtcgctagcaatggccttgccaggcgcggctggcgcggaaggcggtatggcttatggcgaccggggagaaagcgtgcgcgccatgcaaaaccggttgacagagctaggctttttcgcgggcgatgtcgatggtatttatggcgatgaaacgcagaccgcggtgaaaaacttccaaacggccaatggtttggcaaacacgggcacggcggacgagataaccattgcgcgcatgcgctccgaagaagcggttgcgaaggacgcctatctcgaagcattggttgcccaggccaggcaaaaagaaagccggatggtggcgcaaccgggcgacgaaggggaagcggttttgcaagtgcaaaaccggttggttgagctggggtatgcgtcgggcgaagcgtcggggcgttttggcaacgccacggcggaaagcgtgagcgctttccaagctgccaatggcttgccggtcaccggcgcggtaaatgtggccacttatgacgcgctcttcgcggaatccgccatcgcttatcgtgcggcgaacacggcggcgagcgcggacacaagtttgtatctcgccaagggcgacgaagggcacaacgtggagattctgcaagggtatttgcgcgagtatggctattacgcgctggaggaagacggcgtgttcgacgatggcgtggaagcggctgtgctgcaattccagcgccaaaacgcgctggaggaaaccgggcgggtagacgcaacgatgcgcgatatgctttccagcggtgacgtcgcctatgagagcgcttacgcggcgcagctttccatcgttccggtgcgctttggcgattctggcgcggcggttcgcctcttgcagacgcggctcaaggcgcttggctatctatccggtagcgtggatggggaatttggcacgaacacgcaaactgcggtttccctgtttcaaaaggcgcatgggctggaagtgacgggcgcggcggatgcgtatacgcgcgcttgcatgaacgcagaagacgcgattccctatttgcaggcgcgctccgcgggcgatttggttgcacccattcaatatggcgattcgggcgaagagatcgcgcaattgcagcgcgtgctggcggaactgggctattatgccgatgcgatcgacggcattttcggcgccaacatgttggcggcggtgaaagcgtttcagctttgcaatggcctggacatgacgggaaccgtggatgaagccacgcgcgcgcagatccttagctcggacgcggtgagccgggaggcgtatctggccgggcgggatgacgcggatgaagcggcggcgctgcttggcgcgctgagcagccgtgaggcgtgcgtggaattcgtgtgccgcatggcgttggagaagttgggcacgccctacgcgccttcttccagcggcccggattcctttgatagctcggggttcctctattatgtgtatgggctggttggctttgctctgccgcgctccacacaggggcaggggtacatgacttcctcacgcgtggcgcgggaagcgctttcgcgcggcgatttcgtgtgcttcgatacggaggaagacgatgatttgagcgaccatgtggggatttacctgggcagcgggcaattcatccacgcttcggatgccgcgggcgaggttgtgatttcttccatggaggaaggatattatagcgaggtgttctcctggggcatccggcccttgcaataaggagtgacggcgtggaagggttgttgccaggcgaacgcatcgatgatttgatgcgcaacggcctcaaattgatacagcaagaggatggcttccgcttcggcaccgattcggtgttgctggcggattttgccatatacgggcgcatggagcgcgtggcggatctgggtacagggagcggcattttgcccattttgatggcagacgcctgcccgggcgctcggttcgacgcgatcgaattggacgccgcggcggcaaaccgcgcccggcgttccgtggaaatgaacgggctggcagggcgcattcgcgtgcattgcatggatatgcgcgttgcggcgcaaaatttgggatatggcgcgtttggcgcgtgcgtctgcaatccgccctatggcaaaaagggcggcgcgttggcgagcgcgcggcaggatatccgcctggcgcggcatgaaggcgaggtgtccatcgaggatgtttgcgcttgcgccgcgcagttgctcaaaaatggcgggcggctgtcggtggtgtttcccgcgccgcgcgcgaacgaactgttgcgcgcaatggaaggcgcgcgcctggcgcccaagcgcatgcgtctggtggagtcctttgcgggcaaaccgcccaaactcgttttggcggatgcggtgaaaggcggcggctcgcaaatgcactggttgcccacgttggtgctgtatgaggcggacggtagtccgaccttggagtaccgaaaaatctatagaatgtaacaagcgccgctctttcgggcaggcggattttgtggtatactatcgtatggtatggggtgagagcatgaaagtagaggccattcgagtgtggggcgattccatactaaaggggatcgtgttcgattcggcgcgcaagcgctacacgatcattaaggacaacgcgctttcgctgctttcggaaaaagtggtaacgcccatccagaatttttcccggatgggggcgactgcgccggaagcgttgaaagccttgaaggcaaaattggcggatgcttcgctggaaaaccagattgtggtttttgaagtgggcggcaacgactgcgatttcgattggaaagccgtggcggacacgccggaggcggagcatcaacccaaaacgccggtggcggtgtttgcggatgttttgcacgagtttgtttcggtggtttcgcgcgcgggcggcacgccggttctttgcacgcttccgccgattgactgcgcgcgctatttcgcctggatcacgcgcgatggattgagcaaggagcacattttgcgctttttgggtgtgcaggagcgcatttaccgctggcaagaatactattccacggtggcgctgcgcgtggcggcgcaaacgaatagcctttgtttgccgctgcgggaagcttttttggagcgggtgcgcggcgaggacgtactgtgcgaggatggcattcatcccaacgcgctggggcaccggatcattgcggaaaccgccatgcgcggaatggtgaaatgtgggtttgcgccttgcacttaacagaagtttttgctataatttagagcaatcctcagaatttgtgccaaagctggcgggacggcgtgccgaggagctttctttggcttgcgcttttgggccttgttctgtgagatacgcaacacggaggtgacgatcgtgccggaaattgtgatcgcgctggatgcgatgggcggcgacaatgcgccgggcgcggcggtggagggtgcaattgcggcgctggaggaatggaaggacgcgcgcattctgctcttcgggcagaagggaattgcgcaaccgcgcgaacggctggaattggtggagaccactgaggtgatcaccaacgatgaggcacccatgctcgccgtgcgcaaaaagccgggttcttccatggtttcggccattctttcggtcaaagaagggcgggcccaggccatggtttccgccgggtcgacgggcgcgctgctcgccagcggcatggtgcggctgggccgcattaaaggtgtggagcggcccgcgttggccacggtgattcccagccgcaagcggccctttttgctcattgatagcggcgcaaatgtggattgtttgcccaagtatctggtgcaattcggcatgatgggttcagtctatatgcatcgcattctgggcgtggacgagccgcgcgtgggcctggtgaacatcggcgcggaagcggaaaagggcaaccagctcaccaaggaaacgtttaagctgatgcaggcgcaggcgcaattccgctttgaaggcaatgtggaagcgcgcgatattccttccggcgacattgatgtggtggtggcggacggctttgccggcaacctgatcctcaaatatacggaggggctggcgcaggcgctggtgggcatgttgaaggacgagatccagtcttcgcgcaagtccatgctgggcgcggccatgatgaaggacgcgttccagagctttaaggcccgcatggattatgaggagcagggcggcgcgccgctgctgggcgtgaatggggcggtcgtgaaagcgcatggctcgagcaccgcgcgcgcgtttaaaaacgccattggccaggcttaccgcatggtaaagaccggcatggtggcggaaattgagaagggcattgcggaaattgcccaggcagagaaaaaggaggaaaacgcatgatttacgataaggttgtggaaatgatcgccgaccagctctccatttcgaaggacaagatcacccgtcaatctcgcttgtttgaggatctcaatgcggatagtgcgaacgtgatgatgctgattttggatcttgagcaggaatttggcgtgagcgtggaggatgatgtgctttccaacatgcgcacggtggatgatgtggtttcctatctggaggagcatgtagggcagtgaacgaattgcaggatcggctcggctaccggtttcacgaaggtcgcttgttgcaggccgcgctcacgcatccatcgttcgcggcggagcatcgggcggagcactatcagcggctggagtttttgggcgatgcggtgctcgagttgatagcaagccggtttttatacgatttgcatcccgaggcagaggaaggcgaactgacgcgcatgcgcgcggagcgcgtgcgcgaagaatcgctggcgctcgtggcgcggcgcatggatttgggcgcatatattcgcctttcggcgggggaagcgcgctgccatggggcggagaaaccttccatcctttcggatgtgttggaggccgtgatcggcgccatgtatctggatggcggactggcggcggcgggaagctttgtgcggcgcgaagtgctttcgcaggaaccgcccgccgcggcgcgcgacgcgaagagtcaattgcaggaagcgttgcaaaaatctggtcgcctgccggaatacgagctggtttcggtggaaggcccgccgcacgcgccggtgttcacctatcgcgtgcgcattgatggcgccgttgtgggcgagggtcagggcgcgagtaagcaggccgcgcaacaggccgcagcgcagagcgcgctgaaaaacggccatggggcagggggcgcgtaaacgcctaccatggattttcccaataaggatggacgcagatttgcgactaaagaaactggaaatttacggctttaaatcttttgcggaccgcgtcgagatgcgcttcgaccagggcgtgacgggcattgtcggcccgaacggctgcgggaagagcaatatatccgacgcggttcgctgggttttgggcgagcagagcgccaagcagttgcgcggcgcaaaaatggaagatgtgatttttaacggcaccgaaaagcgccgtcgcttgtcgtactgtgaagtgatcctaacctttgataacagcgatcattcattgcccatcgaatacgaggaagtggccattgcccggcgcgtgtaccgcacgggcgagagcgaatatacgatcaatcgcgccgcttgccgcttgaaagacgtgatcgacctgttccgggacactggcgtgggtcgggacgggtattcattggtggggcaaggccgtgtggatgaaatcctttcttccaagagcgaagaccgccgccagatttttgaagaagcggcgggtattgtgaaataccgtgcccggcgcaacgaggccgagcgccgcatggagaacacgcgcatgaacctttcgcgcgtggaggacattttgggcgaaatgaacgcgcggattgagccgctgcgcgagcagtccgaaacggcgcgggaatacctgaaattgcgcgatgaattgaaagggctggatctgaacgttttcttggtgaaaaccgagcggctgaacgcgcgcatcgaagaactccgggcgcaagcgcaggagctcagcacgctttccacacaggcggcgcaggcacaggcggatttggcgcgcgaacgcggggatgtggaacaggcgctgagcgaattggaacagcgcgccgctgccgagcgcgaagaagtgcagcggctgattcgcgaagtggaagcgcgcgaaggcgcggtgctggtgatgcgggagcgcatggcaaattccaggcgcgaacgcgagcggctggaaggcgaggtttccgcggcaggcgaaggcaaggaaggcatgcaaaagcgcatagaagcgttggacgcgcgcgcgcaggagcaggaggcggccattgtgcaagcggcgcaggcgttggcggagtgcgaaagcacgctgaaggcgcgtgagacggagcttgccgcgctggaggccaaggcagaggaagccaaggcgcgcgtgatccatgagatgagccgcttgagcgacgtgaagagcgaacaggcgcgcttgagcgccgtgcatgaagcgcttgcgcgccagttggagcaactcggtcagggcgatggggcggatgaagaggcgctcgcggccctgcaagaagcgttgtccgaggcgcaagccactctcgcgcacgagcgggaagaagagcaaacgttaaaaacgggctgcgcggcgtgcgaggagcgcgtgcgcgcgctcaatgcgcgcgcggaaacgctatcgcgcgaagtacaggttttgatgggccgccggcaggagacgggcgcgcggctcaagctgctcaaggaaatgcagcgcgattatgagggctatcagaattccgtcaagcaggtgctgctgcaggcgcgcagaacgccgggttcgggcgtgcatggcgtggtggcggatttgattcgcgtaccggaaaagctggagcgcgccatggatatggccctgggcggcgcgctgcaaaatgtggtggtggatcgggatgaggacgccaagcgcatgatcgattacctgcgccagaaccgctatggccgggcgacgttcttgccgatttcttccattcgttcgcgcacgttgtccagcgccgagcgtcgggtgctttccatgcccggttgcctgggcgtggcgagcgaactcattggctatgaaaatgtctatcgcggcgtgattgagagcctgctgggccgcaccatcgtggcggaaaatttggatgcgggcattcaaatccagcgcgccagcggttatgcctgccgcctggtcacgctggatggcgatgtgatgcactccggcggctctatgacgggcggcagcgtgacggcgaaggccacgagcctgctttcgcgcacgcgcgaggtggatggcctgcaacgcgcgctttcggaaattacagacgcgcttgccgcgcgacaggaggagatggcgcgggcagaggctgagcgcggggaaatcaagcgcgagcgggcggaactgttcgagcggctgcaccagcaggaaatcgccgttacgcgcgcggaagcgcatgcggcgcaagcgcaggacgaattggacgcctgtgagcagcgcgccgggcgggtgcgaaaggagcgggaagtgctcgcggaacagttggcggagaccgcgcgcgcgctgaaggactgcgaatccctgcaggcggaggcttcagacagcacaacggtcacccaggcggaaatcagccagatgcagcgcgatatctttgccaggcggaatgaggttactcaattgcacggccaggtgagcgacgcgcgcgtggcgcattcaggcgcgcagcgcgattgcgcggctaccattgacgaacgcgaccgcttgatcgcgcagagcggcaacctggaaaaggcccgggaagacgcgctggccgcgctaaacgcgctgaccgagcgcgaagcggtggacgccgccgccctggaagaggacattgccgcgctggacgaacagaaaaacgcgctgaacgaggcgcgcgcgcgtttcgacgcgagcgatttggatcgccggggcatgcaggaacggctgagcgcgctggccgaccgcacggaggctttgcgcgtggaaaacgacgaattgatgggccgtgtgcacaaaaacgagatgcaactttcccgcgcggaagacgagctaagccagctatcctcgcgcatttgggaggaatacgagctgacgtatgcgctggcggaggaattccgcacgccggatttcaagctgggcgaaagcgaaaagcgggtggccgccatccgtgcgcgcatcaagcagatgggttcggtaaacgtggcggcggtggacgagtaccgccagaccatggagcgctacgagcagatgagcgcacagcgcgatgatttggtgaaggcgcagctggatttgcagggcatcattgatgagctgctcagcaaaatggagacgcagttcaaaacgcagtttgaggtgctcaacggctatttccagaagacgttcgtggcgctctttggcggcggacgggcggaattgcgcttgaccgaccccgcggacgcgctcaattgcggcatcgatattgtggcgcagccgccgggcaaaaagctgcaaatgctttcgctgctctccggcggcgagcgggcgctgaccgcgatcgcgatccttttcgcgatgctcacgctcaagcccacaccgttctgcatcctggatgagattgaagcggcgctggacgacgcgaacatcgacaatttcgcgcaatatttgaagaactattcgcaaaagacgcaatttgtcgtcgtcacgcaccgcaagggcaccatggagcgttgcgacgcgctctatggcgtggcaatggaggaaaagggcgtttccaagatgatttccgtccaactgggcgaaaagacggcataattgccagaaccaaaatgggaggcggtaagattgggcctgtttgaccgcatcaaaaggggcctttcgcgcacgcgggaaaacgtgggcgcgcgcatggatgaactggtggagctgcacgaggatttgaccgaggagttctacgaggatttgaccgatatcctgatcatggccgatgtgggcgtaaagaccgcccaactcgtcgtcgaccgtttgcgcgagcgctgcgaggcggaaaagattcccaatacgcagaaggcgcgccaggcgctgaaggatattctggtcgaccttatgggcagcgagccgatgaagctcacttcgcccatggtgctattggtgattggcgtgaatggcgtaggcaaaaccacgtccattggcaagctggccgcgcgcctgcgtacggtggggcgcagcgtgatcatctgcgccggggatacgtttcgcgcggcggcggcggatcagctcaccgtgtgggcggagcgcgcggatgtgccgattgtgaagcaggcggaaggggcggatcccgccgccgtggtgttcgatggcgtgcaggccgccaagagccgcttcgccgatgtgttgattgtggacaccgcgggccgcttgcacaacaagacgcacctgatggaagaactcaaaaagatcagccgcgtggtctcccgggaataccccgaggccacggtgaaggccctgctcgtgctcgacgccaccacgggccaaaatgggctgcaacaggcaatggttttccgcgatgtggccaatatcgatggtttgattcttaccaagctcgatggcacggccaagggcggcatcgccattgccatccgccaggaattggggctgccggtgcgctacattggcgtgggcgaacagatcgacgatctgcagccctttaacgcgcgcgaattcatcgatgcaattttctaggaggaataccgtatgaaaaacaagcagattatcgtggtcggcctaggtcgctttggcaacgctttggcggaaacgctggtggaaaatggctgcgaagtgatggccatagacaccaatgaagaacggctggacgaaatcgcgccgcgcattacgcacaccgtttgcgccgacgcgaccgatgctgaagcgctggacgcgctgggcgtgcgcaattttgacgtggccgttgtgaccatcggcaccgacatcaaggccagcacggtcgccaccatgctgctcaaggaaaagggcgtgggccgcgtgatcgccaaggcgcacgatgaactgcatgcgcgcctgctgctcaaggtgggtgcggacaaaattgttttccccgagcgggatatggggcgcaggatggcgcataatctgatatcgggcaatattttggagttcattcgcctatcgcccgattacacgctcagcgaaatccagccgcccgcgaactgggtgggcaaatcgttgctcgaactgaacttgcgcacgcggtataagatcaatgtgattgccatccgcgcaaatggtaagatcaatcctgtgccgcacgcggaggacgtgatccgcgaaggggacgcgctgttcgtgctgggccccaccgccggcattcaggagctggagcgcaaggcgtaatccataaggaggaagcggcatgatcgacgcgcgtcatccggcgggccagccgtttttttacgagggcaacgacacaggcgtgctgttgatccatgggttcacgggcacgtgtgggcagatgcgcccattgggcgaggcgttgcgcggcgcgggttacacggtgatggcgccgctgctgcccgggcatggcacgtctttggaggatatgagccgtaccagcggcggagattggctgcactgcgtgcgcgatgcctatgtttcgctggagaagatggtggaacgcgtcgtggtctgcggtttgtccatgggcgggacgctggccaccatcctggccgaagaatacaatcccgtgggactggcgacgctttcgggcgcgattcgcgtgcgggaaaaatttgcctgggcggcgggcgcgctgtggcgcttgaagccctatctgcgctggacaaacctggagcacgatggcgattacgacaattcggtggacgcttgctacgcaggcttgcccgtgcgcaaggtggccgacctcaaccgcctgcgcgcgctggcgcggcgcaacctggcgctgatcgattgtccggcgctggtggtgcagcccacgaacgacgaaacggtcgatcccgtgagcgcgcgcatcctaatgcagggcatccgctcgccgcaaaagaagcttgtgatgctgaaaaattcgccgcacgtgtgtacgctcgggcccgagcgggaaagggttttccgcgaagtgatcgattttgtgcgctcggtggccaaggaatcctaagatagaaaaatcccaaaaatcaaccggccagccgctcgaatgtggctggccggaggcgtcaacgggcggcaaacattccgtattctttgggaatgttgagcacgccgttttccatgttactcgatagaacggaaaggatcgtttccctgggaatgctgtgcaaacctggtatatcgggcaaggagaaaatgtagtctacaatatcttcgatatgggttacggccagggagtcttcatagagcaattgccgcacttccgcaaagacttcgcgcaggatcacggctccattttggagcgtgaagttgcgatttggcgtatgcttcgcgccccaggggcgcagcaaagcgcatagatagggcacaatgccgttttcgccataggtggcgcagtagaaagtcccccttgctttcagcactcgcctgacttctgccagtcctttttttaaatctggcacatgataaagcatcatgtttgcgatcacgatgtcaaaagaattgtccgcaaagggaatgtcttggatatccacgattttgtaagcaatggtatcatagcctttcagtgcttttctggcggtttccagcatgccgggggatacatccgagaggacaaggctggcgcaattggcgatcagatcatcccttccctgccatatggcgcccgtaccgcagccaagctcgagaacgttcatgcctttttcgatttgatattgggatgcaatccaattgccaaaccccaggggattggtggaatactgatcgtgaatggaaatccgcgtattcagattggtggatgtagcgtattgtgcctgcactgtttctgcgcggttgagttcgctcatgaaaatgtctcctttccctcggaaggattggctctgtgcgcccggcgcttcgctctgcgtattggcgcttcagccgctttgcggcctttagcgcggcatttttttgcaaaggggaatgccccatacggagcattcccaagccgtttttattttttgggcacgcgcttatcgatggtgcggcggttgggcttataggcatagtgccaatgaccggaaccgcgcgcgaacgagaaactatacatggggctgccgttttcccaaatttccacgccgtccgcgtcgggcaggaggatgtcggcagtggtattgaagggaatatcgatgtcgatttcgatcgcatcgccttccagcttccagccacaggcgagcagaccatattgcgtgtggatggaagcgcgcgcgtaggcgagcatgctattgggcatgggggcgacgcgggaacgcttaaagcctggctcgctttccacgggattcaggcccgccacatagcgatacatccactcggcgatggaaccgtaagcgtagtggttgaaggaattcatgctcacttcgcccatggaaccgtcttcgcggatggagttccagcgttcccagacggtggtcgcgccgcgctccacggcatacagccagctggggaagccggtattcagcagcaactgataggcgtactcgttcagcccgttttccgagagaatggggcaaaggtgcggcgtgcccaggaagcctgtggtaaggtggaaattgtcgattttcaagcgctcttccagcgcgtggacggtgcgcgggcgatgggcgggatcgagcatatccatcttcagggcaatgaccggcccggtttgcgtgtccgcggtaaggcggccattgggagagacgtattcgcggcggaaagcctcgcgcacgcggcgggcaagactggcatagaagcgagcgtcttcctccttgcccaacaccttcgcggctttggagacgatttcggcggaataggcgtaatacgcggtggccagcaggccggtgggcgtagcgccgaacagactatccgggttgcgggtatcctgtgccagccagtcgcccaggtggaagccgccgtataggtcgctgccgtccttatcctgcgcgcgcatgtaatccacccaagccttcatgctatcgtattgcttttccagcacgacggtatcgccgtaatagagatacaacatccagggcacgacggtggccacatcgccccagccggtggtcggcgcgtggcattggcccacgcgcttgaggaaattgggcgttacgttgggcacatagcccacttcgctctgctcgcaggccacgtcgtggaggtatttgcggtagaaggcgtccgacagcatgttgatgcagccggtggcggcaaacacctgcgcgtcacccgtccagcccatgcgttcatcgcgctgcgggcaatcggtgggcacatccacaaaattggatctttgcccccagatgacgttttcaaacaggcggttcacgcgcgcgtccgagcattcgaattcgcccgtgcgctcgagatccgaatgcaccacgcactgcgtgaactgttcgggcgaaagcgcgcccggccagcccgtgacgcggatatagcggaagccaaagaaggtaaacagcggcgcatagctctgctcgccctcgcgcgtggtgtaaaccatttcggccagggcggtgcgcatattttcgcggtagaaattgccgtccttatccagcatttcgccatattgcacgcggatttccacgcccgcaggcgcgttcagggaaaggcgcacccaacccgcgcaattctggccaaagtccaccacgtcctcgcccttgggcgtgcgcagcacctgcacggcggggcgctcttccaccacacgcacgggcacgctgcggcgcggctgcaacagagcagcgtccacgcccgcgtgcgcggtgctgagccaatgagaatcgtcaaagcccggcgcattccagccggggagttccaggcgcgcatcatacacttcgccatcgtagatttccgcgcgcagcagcgggctgcggcccgctttccacgtttcgtcggtgacgatcgtttgctgcgtgccatccgcgtagtccaccaccaattccgcgatcagcgccagctcgttgccatacaggcaggtacagcggggcatgttcggccagcttacgcggcccttgtaataaccgttgcccagcagcgcgcccacggcgttttcacccgggcggagcagggaagtgatgtcgtaggtttggtattgcagatagtggttatagggattgaaattgggcgtgagctcttcatcgcccactttttcgccattgagatacaggtgatacaggcccacgccgcaggcataggcgcgtgcgcgacggatgggtttgttttccaactgaaaggcgcggcgcagggcggggaagccttcgttttccggcgagcgaatccactgcgcgcgccagggttcatccattttcgctgtttcaaaatacgcgggttcggcccagggggattcttccccggcgccgttccagattttcacgcgccagaaatagcgcgtacggggcgcgagggcgagcgtgagcggtacattcacgctttcgtcgctttccacgcgctcgtccagcaggggagcggcaaacgattcgtccagcgctatttgcaggcgatacgcgctttgccgttcgctgcggccagcgctggcaacttcccagctgagacggggagaatcgaaagcgaagccgatggggttgaccatcgcatcgcagcggagtttcacaatttgcatcgtggagaaacctcccataaaaagtcatacgcaattttccatagggtttccttatcatagcacgcgcggcgggtgaaaacaagggccaaaaccgggattttttttgcaaaaatctgcgcgccgccggttgtgtgcagcgcgcaaattttgcgtagtttggggaattatgcttttacggcgccggaagtgatgccctcgatgtacagccgcgagctgaacaggaacatgacgagcagcggaatggtggccatcacaaagcccgctatcatcgcgccgtagttcgccgtgctgccctgcgtggaggaactgtacgtttgcacggccacggagatcacctggatgctgttggagtcgatcaccagcagcggccaaatgaagtcgccatacaggctgatcatgttcatcaccgtgatggtggccaggatcggcttggccagcggcacggcgatcttatagaacgcctggaattcattcgcgccatcgatgcgcgcggattcaaacagcgaggcaggttggccggtgatgaatgtgcggcacaggtacatgcccatgatttgcccgccggacgcccaggggaaccacagggcccaccaggtgttcttcaggccaaggcgctggatcagcttgaaggaaggcgtgagcgtgagcacgccggggatcatcatcagcgccagcatgaagacgaacaggaagtttttcagcgggaaattcatgcgggcgaacacgtagccggatagcgcggacaacaccacgatcatcagcgtacccacggccacggtgatgatagagttcagcatgttgcgaaagagcgtgttccaagccgcgttgtagttcgaccattccggcggaatcggaagcgcccacaggttggaatagaactgcgcctgattcttcagcgaaaggaagagcatcaggaaaatcgggatgaacgccagcagcgtgatgatgatggtgacgatggtgatgatcgtctggaacgaagaggttttcaacgcccgccgcttggccatgcgttgcttttcgagattttgcgaagaagatgccgtcatagtttgcgcctcctttccttagcctagggcttcttcggtgcggatcttcaggttcagcaggctgcccgcgaggatgacgatgaacatcaaaacacccatcgcgcacgcgtagccgtattgaccaaagcgcgtggccgcatagtacagctccaagcctggcacataggtagcggtaccggggccgccagcggtcagcagcatcacgccgccgtaatcctgcacagagctgatgaacgtggtgatgatcagcatcttgagctgcggggaaatcagcggcaggtggatgtggaagaaattccacgcggggttcgaaccatcgaccttggccgcttcgaagagatcctcggggatgttgatcaggccgccgtagaacaccaggaaggcgaagctattcacccaggggaagcccatgaagatgatcgcccacagcgcggtggcctcgtcgcccagccatacgcgctgccagctttccagccccacggttttgagcaacgcgttcaaggcgccgatgttcgggtcgtagatatttttccacatcagcgtgctcacaacgcccggcaccaccatgggcaacaccagtagcaggcggaaccaatagcgccggcggctgctctcgcccgtgcgcgtgcgcatggcgaacaccagctccgcgagtagcagcggcacggtgagcagcttgatgaagctcgccgccatcatgatcaagaggttcttcacgcccagcaggaaatagccttcggtgaagatgcggcggaagttatcgaagcccacaaattgcacttcgcgcatggtgcgcgtggcttggctccaatcggtaaaagcgtaatagaacgcctggaacacgttataataattgaagatcaggatcagcacaatggagggaagcagcatcaggtaagccgccttgtgccggtaaatggcgcggaagaacgccgcctccagcgcgcggccgcgcgcgaaggtgagcaccccaaattccagcgtcagcaccgcaaagacgatgatgccaatcagcgcaatggtttgcagggtatccatctggctgatgttgttgagccggtccgtggagaattcatacaggtctgccgagagcgtaacgatatagctgcgctcagcgccgaaatagatctgcgaagtatcgtattgctgtttgagggaatagaggatttcgcccgcgctgttgagcaggtgcgcgtcgccctcgcgggtgcccacgccaatccatttgccatcggcggaaacgcccaggcaacggccttcgccctccacttccacttcaaaaatcagattgagatccggatcgtatttttgcaataagccatactcgtccagcgtgagaacatcacccgttaccgggtccacgctcaaatcccgcacttcgccatccgcacgctcctgcgcgatggtttcgcctgcccagtcgatcttcgtgatgcggccgcgggaatcgccgtaatagatgtattgcaggtccgggctaaattgcgctgcgctcgccgtgttgcgcagggagagggagaacagctcttcgcccgtttctagattgaggacggccagcgtgtgcttggtggcgctcacgccggaagaaaccaaaatttgcttgctcgcctggtcgtaatccaggtcatccactttgccgtttaccggatattgcatcagcagttcgccagtgagggaattgaatacataaacattccggtcctgcgaaccgacgaccagccaatcgttgtccgtgtcgtattccatggcgcccaccgcgccggaaatgggctgcgtccaaacatggttcccctctgcgtccacgccgatgatcgtgttggcataggtgcccaggaaggtcatatcgttttcatcgtccgccatgatgcggctgttctgcagcgtggcgccaaagcccactttggtgaagatttccgtgccgctcgcggcataaaaatacgtacaaatggaagcgatcagcgcgaggcaaaatacaatcgccaggaccaggcatggtacattgatattttttctcggcttccttgcattttccgccatcgtgctcaactcctagctttattaaaagcgctgcggagcaagttgcccctgctccgcagcgcggttgcgcgcaggccgttcacacagcgcgcccggccatcaggccgctatccaattgctgatagagcgagcggcgattagttgccggtcggctcgttctgcgggttctccaggtcggcgtcagagatttcgctggccgccatcacgtccggcaggtagcgcagctggttctcgttgtgcttctcggcccactcctcgatggtgatgttgccattgaggaagtccatggtgtaggtgtaccaggcgcgcagggcttcctggttgtcgccaatgccgcgagccagcgcctggccccagcccttctgcacgttgccgatgtaggtgatgttcgagaacatgtcggcgagttcgccttccagttcaacgccgttcaccagcgggatgccgtccggacggccgccgttttcaatcagagcatccgtgtagatggcaaagccttcgggggaactgtagtacatcaggaagtccacgaccatgtcatcgtgctcgacgtccttcttcacagcgcccaggaagccggtggccacttcgatcgtgcgggcgggagcctcgaagctgtcgccttccatgctcggcatggagaaggtgcccagaccgaattcctgcacgccttcgatggtggtttcgtcatccaactcaacggattcgcccgctgccacagcgtccatggtgttcagataatcgccaaagaaccaggaaccatccagccagatcgcggccttgccctgatagaacagggtcttggcgccgttgccatccgtgccgaagaaggcgtcgccgcccgcgtactgcgggaagagcttgcccatgttggtccacacatcctgctgaccctggctgccggcgacgatttcgccttccttaaaggccttgtagaaacgcacgccgttgttggtcactttgctggtgtcgtcgttccaaggatcggtgggatcgtacacgaaagcgccgtcgatttcctcatcgtagcagtagtcgccgggctgcgcgcgtacgatttcaatctgggaacgggtggtctggtccacgtagatctgcgccagccaacccatctggccggaccagaaggagttgaagtcgcccgccactgccagcggctgatagccggcggccgcgatcttttcgcacaccgcgacgaactcatcccacgtcgtgggcggttccacgccaacttcctcaaagatgtcggcattgtagaaccacagcacctgcgtgccgctcacgcacagagccgtccagctgccgttcacctggtcgatctgctgcatgtcgaaggcgatgccagcctgccactcgtcatccgtgtaggggttgatgtcataggcatagtcatagaaattgatgactttgtcattcgcatcagaaccggccaggttgatgaaaacgaggtcggcttccggaacttccgtgtcccaggactggaacatggcctttacccagttctcatagccttccgacggtttgaggtcgacgaccacgtctacgccggggtggagcgcttcgtaagccgcgccaacggcttcccaggcttcctgcacgccagtgctggcatacagcgagatggtgatcgtgccgctaaaatcgtcctccgcaaacgcgaagccgggcacgagcagcgccagagccaataccagagcgaaaacctttttcatgatatccctcctgcatatttctccttatattttacaggcaaaccctgcctgttaggagccctacatttctttcaacaatccaattatacaggaagcgcaagaaaaaatcaagtatgcagcagaagttttttgctttttataggagttgcatagtaaaatcgggaggcttaaagttacgcgcgtcacggctctaaatggataaatatacgtaatgtgtataatatgcaaaataaaaagcagtgcggggcaacgccgcactgctttttgcttctatatataagatttcttattggttacgcaggaaaccgcattcgtgcatagccaagcatattgtctcccaagatgcgaacttcaattccagaaatgcccgaaatgttaaaaaatgcgcacaaaatggctgcgccgcaatccagcacgtccgcgcggtctggattcatgcccggcagagccttgcgctgcggcaatggcatgccagaaaggcggtctcgcatggcttccacaaaagcgcgcgagaggaactgtccttccagcgcgtttcggtcgcgcacgcccaattctagcgctttcaggcagtgcatggtgccgctgatgcccgcgaacaccggcgcgctggccgcgtcggtgcgcacccgattccaggcaggccgcaggatttcttccgcgcgcgcggtgagcgcttgacccgtcgcgccgcccatcgcatcgtgcaggcgcaccgcgcccacgctcgcgcaggcgcaagagagcacgcgcccgtcttctcccaccaccagctcggttgagccgccgccgatgtcgatcacgcccatgcggcccgggcgctttaccgccatataggccaattgcgcctcttcctcgccgctgagcacctcggtttccacgccgaattctgccgccgcgcggatcactgcatcgcggtttttggcgtcccgcagggcgctggtgccaaaggcaaaaacgcgctggcagcccgccgcgcgggcgcgttgggcaaagcggcgcatggcatccagcgtgcgggcgcaggcttcgggcgcgagcacgccgtcccgcatgcccgcgatcagccgggtggtgcaaatgtctcggtcgatcgcgcggaaatcgccggcttcccgctccgcgagcatcatgcgcacggaattggagccgacgtccatcacggcaatcattggccgctgggcacataccggatttcgtccggcagcagcatgcccagttgttcgcgcgctgcctgctcaatatattcgtcggtttgcatatattcggtggttttggtcagctcgtcgatttcctcggtgagccgcagccgctcgctttccaggttgtccagcatgctttcctgcgagcgcaggcgcatgtactgtacggtgagcgcgatggtgaagcctagaatcagcaccacgcaggttaagacccagaagcgaggctgcaaaaattttttcttttgtcgcttggccatagcttcctcccttacagactttggttcttttttgcgtgaaaatcccgtagcgcacgggaaagcttatgcgcgccggcgcgcataaggcgcgatacggacgcggaatacaggatgcacccgcacagcatgcccagcagcgaataggcgcgcaactccccataggcggcgaagtacacgcagccgatggcgatggcgcccgcgccgatgccaaaggccacgtccgccgccagattcagccagggaccagcctccagcagccagcgcaccccgcgcagcgcgtcgtacagcaggccgatggcggcgcccgccgccaacgccgccaggaatacgtagccttggcccacggtgtagaacagcatgt

SEQ ID NO: 2949 - DNA, 29855 bp, Unknown
  16S sequences of unknown bacteria
tctaccgcccgtgccgtcgttcgaacgtcgatgcccatctctttcagcagacggcggacggcgggttccaccttgacgacgtcatacaggctggcatgactgtgtcccggaaaatcgatatttctgtgacgcgaatatttatcggtgagctcgaagagctccgaagcccccagagcgatattttcctccgccgcagtaaatcttccgttgttgcgcatgatgccgcccacgtttcccaggcccagcatgagatccgtcttttccacgatagtaacgtctgcgccgcatttttttgcggctacggcggcggcgattccggaccagccgccgccgattacgatcacctttttttccataataaaaaatcctcccgttcatcctatgagacgagaggattttctgctacttttcggggttattttccagaagaatcttttcaaaatatctgagttcttcgagccgttccatcttttccggacggatttcactgccgatgcgcatcacctgaggggaagaggaatcgtagcgcggccagcgctccgccggtttgccggttttgataaaactgcaccacgcatcattcataaaagatgcgatctcttctcccttttcatcgtccccgcctacatatttcagatctttgcggaagacaaaattcaattcagcgatatgacggcagccgaatccttccctgcgaagacgttccgtcagataatcaaaatgatagccgtataccgctctgccgctttcggagagacggtccgcgtaaggcagcatgctcgctttaaatgccgacaggccgatgatttcagcacactgcacaaaaggcgggtgctcctgatccacaggatatctttccatgagttctccggccagctccggatagactttgcgaagataattctcatagtcttttggcgtcagatttttatcagcaaaaatcgtgccttcgtcggtgttgaatccgaagagcagatccacatcgttgatatattgagaacgcggatccaccgcgtaatcttcgtcgaagagaaagcccttcagcacgggatccgtacgcgttccacgataggaaccgtcctcacggaaaaaccacgctttcaataaatcctgcgccggaagtctgcggagcacttccacgccttccgccgaatcggatgctcccagatcttttgcgacacgccgggaattttccagataaatctccggatttccagcgccgtaacgggctaccgaattgagtcctacaatgctgccgctttcgagaatgcacctctgaaacagtccctgcgcttctctcagtcccatgagcgccgaagtgatgaaagctccggcggattcaccgcccacggtgatattttccggatcccctccaaacgcagagatattttcttttacccatttcagcgcctgcagcgcgtcctgaataccgaaacagccggtgactgaggactcgtttctgaattcctcaagagccatgaagccgaaaatactcatccggtaatttatatttacatacacaatcccctgattgacaaaattttctccccgatacagcggcatattgcttccgcccgtctcaaaggcgcctccgtgaagaaagacatagacgggaagtgccgccgtatcatccggcacgagatcctgcgagttatttgagactttttttatcgccggcgtattgacgttcaggtaaaggcagtcttccgatgagatttccagaatattaggctgaagcacgtggctggcggcaaacagctgcagagccggcgcgccgaatttcgtgcagtcccgtatcccctcccagggctccggttcctgaggcggacgaaaacgcagccggccgaccggaggcttcgcatagggaatcccccggaaagcgagatattcttcttttttctttccccggatctctccgtaatttgtaacagctcttatcataataccgatactccttctctgttattaaaaaacactgattttgttctgagattctgaaacatatagatattgtaacatcatttctctttgatggaatcactcaatttcagggatacggataaagtgccgttcatcttcatattgtatacatctatatttttacttttttaataattcttcagaactcaatttacacagaaagagttatgataaaaaaagaaaggggaaagcttcgttcggcacatcggaagcagtacaggaagatgaaatcgattctttctaaaaaatattctatttttgtcgcgtgcatcgcagtcatcgccgctgcggcgctgttcggcagcgctctgacgctctctgtcagcggaaagggcacgatacctgaccaaaattctctcccggaaaaatcagcaccggacgctgtccgatcttcagaaaatggggaaaccggagatcgagccgcaacagtacagacctctcctccggaaaaagaagaaccgttctccgacagcgatccttcttccagcgaaacgtcttcttcggatgggcagaaaagcatatcggaaacgcaggagaccgagaaaacggtccgcgctcagacgcctcctgcggctgcggcggccgacgcttctgccggcgataatcttctgcattcttcagaggcacaagacacacagaatacggaacagatacgttacgcttatctcacctttgacgacggtcccagcaaaaacacagacgcgatactgaaaattctggcagaaaacgacatcaaagcgactttttttgtcacagcgcgaaataccgatgaaatcagtatgcagcgttatcgcagaatcgcagaggccggccacaccttggctatgcacagcggaactcatgactataaagaaatctacgcctccagagacgcgtttttgaaagactattcgcgggtcagcgatcttctctatgaagtcaccggaacgcgttcggtaatctatcgctttccgggaggaagcagcaatacactatcctgccgtaaagtgacgatgaccgaattgatcggcgaactgcacaaaagaggcgtggaatactttgactggaatgtcaactccaccgatgcttccggcagaaatcccgatccgtcggtcctcgtaaagagcgtagctgccggactgaaatatcggcacaatatcattctgatgcatgacgcttccggtcatgagacgacagtggaagctctgcccgatatcatacaggcatgccgcgaccgccatctgacttttgcggcgattacaccgcagacgcctgcggtccatcatcatcgaaaagactaaatccgccgagactgagacctgaatccgtacaaaaacgagagagcgcggcgccggtcaattcaactgaccggcgccgcgctctctcatttgtatcttttatttttaatatcctgttcttcctttttctcttcctcttttggcggcaatatgctgtctttgcctccgaaaagaacatcggaaacatcatcatccgtcttcgcgtctatggaaagaagcctgctgaaaatataatcgcgcatctttttgaaatcctttctcttttgatttgccttatcttatggaactgcctttaacaagacgcaggacttccaattttgatacaccgatttaccagttttttcagatttttctttctctcccctcacgttcatatatcctggaatatttttattccgcttcccactttgcgatcgggattcctaaaactttaaactctccgcagacaaacaagtctccggcggacaaatagtacgtctgcgaaaatccccctcctttcttttaccgcatctttttgatccgtccgaacagcggaaatcagtattccgtaaacactctcaggaatcagaaaagggatcacatgattcaaatctcgctgaaaaaggaaatcaacaacagaatcataaattgttttaagtacttcagcactcctcctctgcattttgatcagaaagattctccatttcacaattgatttccgtacgccgggagccaccggcatgataagggcatcgcaggcggatacactgcccgttttgagaagaaaacgtgcaggagatccgttccggcttttccaaagatatgcccagatgttcctgtataaaatcaatcgagacagataccgcagtaaaagaatcccgcttacagcacctcggtccgcccaaactgccgattgcatccagacaccgggaggtcagctgatttccgagtccccatgtcttcgatgacataggactggatgaggtaacaatactgaaaaaaatcccggcgctcaccgcagcgccgcaggttccccaaagaccgcaaataccgccgggaatctgacttcctctctttttcatctcttccagtgccgcagggaaatcgatctggccgcctccgttatgccaagcggtcagcagagccgcgcctaccataacgtgatgttccggtccatgcatatagatgtatggacattccattattttctgaaggatttccaaaggattttttgactccgaaccaccgcatatatgcatcacctcttccagtcccttcttctcgtgacaggcatcgcagatataatggccgtccctgcactttgtattgcttaaaaatgtctttccgcaaaaactgcacaccatttcctgctgctcctgcagatattccaatgcctgtccacagatcagacattcccgcgcatctgacatatatgatctcctttccgcttctgctcggctgcccggcaaacggcaggacgtccgccgcagaacacattgcacacggctggacgcggtccgtttaccgaaaatcagacagcgtccgtttctttgaaaaacggttggccgcctgaaaataaaatcattttacattatagcgcatcgcagcgcgcgggagaataaaatcctccgaaatcccatgggtttcggcagataaaaaacaggaaagatcaaaacagttttcctgttcccggcggatccggatgcagcagaggactcactgcacgcagcaggcggcttcagtaatcaaacagttccgacggatccacggattcagaacatttgcagatgcggatacgccgtccgtcgctggtctcaaattcacaggcaccgcagactccttctccgcagcagatattaaaatcgttcgacgtgacaaagcgggatgacttgtgaaattcctccagattcttatacatccccgatgaaaagttccggctgcccagcagcagaatatacttcggcttctcctgccgaatgacgcggcggattttttctacttcttccgcgctgtcgaaatcgcggaaagaaacgctgcctcccgccatctgatgcgccatggcgctcacagttctgccatcttttccggaagacggcagagcggccggccgcaggaaatgctgcaccagttttcgctcgaaaggtgcatcgcgcaccgtcagcagtacttttgccgaaggacgcagaagattgcaggcaaatattccgggacacagacccgcgccgctgcagagaatcataaccgttccgtccattttgcggaattctctcccgataaaaccgcttcggtaaggaccgcgcaccagaattttatcttccgcagacgccagagatttcgtcttggcggaaaggacacggattcctaccgttatcgtggaatcgttgagattgacgtccagaatcgacaccggaacgtcataaagagaatcgaattcgggatttctcaggaaaatataagtagctggccgcatacagcggatggcaaatcccttctgtacgcgcatcaccagaataaaaaaatcatcggccgtataatatttcgacacgatggaacactctttttcctttctgcggttgctggccttctttccgttgaagataaactcgtttaaaacacagacccccttccagtcgcagtcgcagacatctttgccccgaagacggctgcaggtcaggcaatctcctgtgacggccaagtcacaggggcagttttccgaacccgcatctacacatttatatgtatttgtatccatgatacctctcctcacttttttactgtattcgttctttctgtttccgatactgctatattattcgtctccggggaaaaaagtgtagcgtttgggttcactatacacaaaaaaccgggcgctattgcgcccggctgacatcttcgagataatacagatctttagaatagacatattctccttccgagtaaatgtccatttttccggcgagttcccatcttttgaccggcgcttttaccgcatccgggatgtcatagacgatactgagccccgccgtttcgccctccgtacggacgcaggtgatatcctccgcggcgccgattttcacggcggaagcatctccttccatgaccgctacggtagtcagaggtacctcgcctctggcgatccgcactgtttcaaaatgatcaaaaccgtaatccatcagtttatacgcgtcgttaaaccagtcgtgatcgttgagaactacggcgatgagttccgtaccctcccgtttcgcagaagctacaagacaccggccggcggctatggtatatccgatttttacgccggtagcatcctcatattgaaaaacagtcttatttttattatagaaatatttataggagtctgtcccctcccgttccgcctgataagttttcgatcctacgatttcacgaaaaatatcgcttttgaaagcttctctcgtaatcatagccagatcataagcggaggaatagtggttttcatcctgaagtccggaaggattgacaaaatgagaattctgcagtccgagagctgacgctctctcgttcatcatcacagcgaattcctccaccgaccctcctgccgcttccgccaccgccaccgcggcgtcgttgccggaacgcagcatcataccgtagagcagatctttcattctgattttctcatcggtcttgaggtaaatcgaagatccttcctgacgcaccgcattctccgataccgtagtatactcttccggatccatggtttccagcgcgatcagcgccgtcatgatcttcgtcgtgctggcgggatacatgtgtgcgtccttccgcttatcgtagagaactttgccgctggcagcgtcgatgagaaccgctgtctccgccgagacgacgggttccgccgtgaaactgccttcggacttctctgaagcagcgctgacgctgatcgcttcggcggcatcggaagccacgcttaccgccgcttcctcactctgccggccgctgaacgacgtccgggcccacaggcttccgaagattaaaataatgaaaagacacacagaaagggctgcgatgacagcccttcgtcctttccgttgttctccattgattatcatatgtcttcctcccgggtcatctgtaactacacggaatatcattccgaagatatcgcttctttcaaattttacagttttcttcccgggattatgactgcggattacggatctccgtcttttctcaacccgcaatccggttctcttatgaatcctcttttcttcatttgataccggccgccgtccgcagacgcctgtattttttacaatattgccgctgcccgctactctaccttcatcatgcggtaacctacgccgatatgcgtctgtatatattgaggcgaatcgggttcgctttcgattttctttctcagcgtcgccataaatacgcgcagtgaggccacgtcattgtcccagctgctcccccagattttctgggtgataaaagtgtgagtcagcacttttcccgcatttttgcacatcagacataaaagcttaaattcgatgggcgtcaggtgaagttcctttccgctgagataagcacagcccgcggcataatccaccttcagatggccgttgacaaataccggttccgaaggaacttcattctgcatgaatgccagccggcgctgcgttacccgcagccgcgccagcaattcctctacggaaaagggttttgtgagataatcgtccgctccggcatccagcgcttcgattttatccgtatcttcacttctcgcgctgataacgatgatcgggagattcgaccaggttctcacccggcggatcacttctacgccatccatatcaggcagtccgagatccaggagcatgatatccggattatgagacgacgcttccaggatagcggactctccgttgggagcggtaagaaaacgatagtcgtgcgccttcaaggtcgtagtgatcagattgcggacaggcgcatcgtcttccacaaccagtatctgtaatttattcatgcagtgtaacctcctctgccggcagcgtaaaggtgaaaatcgttcccgtcggacgattgtctttcaccgtgatttcgcctccgtgcgccgtaacgatggatttgcacagagacagcccgagtccgagacttctgcggctgtctgcaatccgattcgctccggtgtaaaacatatcgaatacatacggcttcgcttcgtccgaaattccgggaccgtcatccgcgacgctgacaaagatattctttccctttcttccggaagcgataacgattttggacccttccggcgtatacttcacggcattatccacgatattgatgatgacctgaacgatcagacgggcgtccattcgcgcaagcagaaactcaccgcagctctccacgcggatctcatggctcgaacttttgcggtttacatgtttcagcgcctcttcgatcacctcgtccaaaagctctgccgaaagacgaaggttcatctggccgtcttcgatccgcgtcaccgcgagaagattttccacaagatttatgagccacatagaatcgtcataaatatcagaatacagccgctgtctcgtctcttcatcaaaatccacgctgttcgacatcagattactggcatttcccgaaatcgacgtcagaggcgtgcggagatcgtgagagatcgaacgcagaaggtttgcccggagctgttcgttttttgccagtacggctgcagcttctttttctctggcatttttttcattttccagcgccagagcacactctcccaagattgagagaagcagactgttttcaaaagcgtccaggggactttcctgcgcatatatgccgagaacgccgaaaacctcgtctccgctgcgtaccgccagatagcggcacatagcgttggaaagcgtaccggtaccggcgccggcgtgtttgttattcttcatcacccaggcggccacagccctttcatgcgccgtccggtaccgttcggcgccggaatcctggtgaaccgtaaaaatgagaggctccggcagttcggcgccgtctccggaaaaaccgttttccggcatatgataaaagactacatcccggttcagcagctttttcagctgccgcgccgcggcgccgacaacctcatctctgtcccgggcgccgctgaacagctggttggtatcgaagagtatcttcattctgtatgccatctgcgccgactgctccgcgcttcgtttcagccgattggccagcgtcccgctgataaacgcggcgagaaacatgacgatgaaagttaccggatagccttttccatgagccagcagcgtaaaccgcggctctgtaaacagcagattgaatacgatcacactcgccgcagaggaagcgagactgtagattctgtttgaggtgatcacagaggtgatgagtacaccgagaatatatatcgtgatgacattcgcttcgctgaatctcaaataccagaaaaccagtcccagacatgtggaaagcaaaagcacgcccagacttttcgcgacatcattaaccgaaaagaccgccttttttgcgttcattctcctctgccgataaacagaggccgaagaattgtccggaatgatatgaatatccagatccggcgcataagcgatgagtttatccgtcagcgtgggtttgctgaacagatgtctgcgggctgctgtgctcctcccgataacaattttggaaatgccggataatctggcaaattcagcgatctgataaggaacgtcgtcgccgaaaaccgtttcgattttagctcccagctgctccgcaagctttgtattttctctgagacgttttttattgtcctctgtcatcgccgcataatcgggagtctccacaaacagagccgtaaaggaactgcgaaaggccttcgccatccgcgcagccgtccttataatcgtcttgttggatggagcggaagaaagacagacgagaatgtgctcttctgtatgatattctccctgatttttgatcctggcgttttccgacagaagattgacccgatccgcacaccggcgcagagcgatctcacgcagagcggtgagattttccaccgtaaaaaagctgcctatcgctctggatgcctgttctctgcggtacacttttccgcttttcagacggtcgatgagatcctgcggttcgatatctaccagttccacctgatctgcgctgtcgaacacggagtcgggaatccgctctctcacaaggactccggtgacagacgccaccgtgtcgttcagactctcgatatgctgtacgttaactgtcgtatagacatcgatccccgctttcagaagttcctgaacatcctgatatctcttggcgtgccggcattcctccgcattggtatgcgccagctcatccacgagaaggagctgcggtttcctcgcgagcgcagcgtccagatcaaactctctcagttcgataccgtccttacgtctgacatgcagaaacggaagctgttccagcccgtcgaggagcgccgacgtctccggccgcgcgtggggttccacatatccggccaccacctccgtcccccgttgtctggccgcctgtgcggcctgcagcatagcataagtctttccgacacccgccgcatatccgaaaaaaattttcagacgtccttttttctttgcgtcttcttcctgctgaatagctttcagcaaatgatccggattccggcgtatcgattccataggttcacctccgctgttcctgatccgggcagtcgctcttcctgcaatataattctctgtgggaagaaagaaaaccgtcgagtcttctcatgataaagtaaccgactaccgccattgcggtgataccgcagacgaataagatatctctcattttaacacatcccccgaaaatttgcgctcccgaagggatgagccgtcaaagccgaaaacacttttgtatcgctttattgcttcccaaaatcagcagcgactcatcctccgaaaaacgcgtgtccggcgtaatcgtcagattgattgttccctgtttttttactgccatgatgttgatattgtattttttccgtatgtccagactgcctacggtctttccctgccattccgcaggcacggtaatctcgacgacggcgtgttcctcatccagctcgatataatccaggatatgatccgagctgtatctcatcgcggtccacagcgccatctgtttctccggatacacgatttcatcggctccgtttcgcagcagaaatttcgcgtgaacatccctcgccgctctggagaccaccatttttgctcccagttctttcaagagagacgtagtctccagcgaactctgaaagtcgtcgccgatagcgacgatacacacgtcgaaattccctacgcccaatgacgcgagaaaatcttcgtttgtaccgtctccgatctgcgcgctggtcacataaggaagaacctcatttacccgttcttcctttaaatcgacggccagcacctgatgatgaagttcatctaacttcatcgcgatatattttccaaacctgcctaacccgattaataaaacagacttcatctcttatctcctttgcatcgtcatcccactgtaatcttttcttccggaagtctcgacgaatttttcgcccgggaaaccgccgcgaaaatcagtgtcagacctcccactctgccgaaaaacatgagtatcatgagtatcgtcttcgacaccgctcccagcgccggcgtaatccccagagacaaacccacggtgccgatagcggaagctgtttcaaatagacaggtgagcagcggaatattttccactttactgataatcattcctcctccgagaaaaaggacgatatacatcagaaaaacagctgccgcctgccggatcacatcgtaagaaatccttctgccgaaacagtgagcgtactctcttctgctgaaaacggcggctgacgacaatacgagaacagcgatagtcgtcgtcttcattccaccggcagtcgagcccggagaaccgccgatcagcatgagaattatcatgacgacttttcccgtgtcgctcagttccgtgaggtccgtggtattaaatcctgcggtcctcggcgtcaccgcctgaaacagcgaggcgaaaaaccgttcctttccccccatttcaccgtactcgcaaaaccagaaatagaaaaacggaagaatgaccagtaccgctgtagtcgccagtatcatcttgctctgcgctcgatactttcgtaatctcagcttatgttcctttatatcatcccaagtcagaaatccaaggcctccgatgagaatcagtgccgctatcgtcagattcaccgtcacctgcacggaataggacgtcagagaagagaaaggctgccgaaatcccatcagatcgaaacccgcattacagaaagcggaaatcgaatgaaagaaagactgccacagtcccagctcgattccctgatctctgcagaaaacaggcaggagaatcagcgcgccgatcagttcgataatcagcgtcgtcttaaagacaaaaccggtcaggcgaacgatgcctcccacttggggcgccgcgatagccgtctgcatagtacttctctgcatgagtccgattttctttcctgagacccgagaaatcatcaccgctatggtcacaattcccataccgccgatctgtatcagagttagaattaccgcctggccgaaaaacgaccaatacgaaaaagtatcgtgcactaccaatccggtgacgcacgcagccgatacagaagtaaacagcgcatcactgaaagacgctgactggccggatgccgacgcccaaggaagcatgagcaacaggcagcctgcaaaaatcacggataaaaatccgaagctgatcagctgaaaagatgaaatatgtctgtttttaaatatgaatcccataaatccccacctgcaaatctttatacgcatttattccgtcttaacttacagaatctttatatacgattatcatgcaagccgtataaaatacgcataaatatttttccaccggtgtaaagactgtataaagacagcgccgggtgatttgcagacagccgcggcatggtggggttatgccgcggccagagattttaggaagtctgtttttttaatctgttttttaaagtcttttatttcagaatgccttccagcatcagattgactttcagtacatttacggtcttttctcccatgacgccaaggaaacggccgtccgtacatttttcgatgatatctctgatttcatcttcgctcatattgttcgcctttgccaggcggggaacctgatattccgctgccgccggtgaaatatccggatcgagaccggagccggaacaagtcaccagatctaccgggatagagtcttcctctgcgtccggattggattcgcggatcatttcgacacgctcctgaacgagagcctcatattcatcgctggcagggctcagattggacggagcggcatacatcagccgattgccgtcttcgtctgtgtaagtggacacatccacattcatgatacgtccccacatatgatcttcatcgttaaactgctgcgccatgagttcgcttccgtatttctttccatcgacctcgatgatactgccgtttgcctgatcgtggaaaaacacctgagccagccccgtcacgacgagcgtatagacgattccgcagaggatggaaaagatcacgaagaacacggctgctttcggcagaaccgattttaatgttttcattttatttcgcctccttatgctaatcccagtaagacgaggatcacgtcgatgatcttgataaagataaacggagcgatcagtcctccgagaccgtagatcagcagattatgagaaagcagctttcctgcaggcacctcacgatatttgacgcctttcagagccagaggaatcagcgcgatgataatcagtgcattgtagatgatcgctgagagaatcgcactctgcggcgaatgcagattcatgatattcagcgcttccagtccgggataaaggccgaggaagagcgccggaatgatagcgaaatacttcgccacatcgttggcgatagagaatgtcgtcagacttcctctcgtcatcagaagctgcttaccgatacgtacgatatcgatcagcttcgtcggcgacgagtcgagatccaccatgttgccggcttccttagccgcctgcgtgccgctgttcatagccaccgctacgtcagcctgcgcgagagccggagcgtcgtttgtaccgtcgcctgtcatcgcaaccagatgccctttgctctgaaaatcgcggatcatctggagcttgccctccggcgtcgcttccgccagaaaatcgtccacgcctgcctctgcggcgatggctgctgccgtaacaggattgtcgcctgtaatcataatcgttttgattcccatttttctcagatcggcaaacttctcctgcactccctgtttgatgatatccttcagatagataacacccagaattttatggtttttagctacaaccagcggagttccgccttttgaagcgatctcattcacgacggaagcgcattcttcggagtatactccgcccgctttcgtaacgtactcctgcatcgcatcagcagcgcctttgcggatctcatttccgtcaaaatccacgccgctcatccgcgtaaccgcagtgaaaggaatgaaactcatccctttatcctgtacacttctgccgcggattccgaacttttccttcgcgagaataaccacgcttctgccttccggcgtctcatccgccagagaagagagctgcgccgcatccgccagttcctgaatatccgcgccgtccacagggataaacgcgtccgcctgacggttaccgagggtaatcgtacccgtcttatccagcataaggatatctacgtcccccgccgcttctatggcgcggccgctcatcgccagtacattcgcctgattcagacggctcatgcccgcgataccgatcgccgacagcagggctccgatagtggtaggcgccagacaaaccagcagcgctaccagtgaagtaatcgatgtaggattttcgattcccgcctgttttgccgagaaaacggaataacagtacagagatacagtgacgagaataaaaatcatagacagcgctatcagaaaaatctgaagagcgatttcgttcggcgtcttctttctcgcagcgccttctaccatggcgatcatcttgtcgaggaaactttcgccggcttcgctggtgacttttacgacaatccagtcagaaagcaccgtagtacctccggtcactgcgctgcggtctccgcctgcctcccggataaccggagcggattcgcccgtaatagcgctttcatccacagacgccgcaccgtctacgatttcaccgtcagcgggaatctgttctcccgctctgacgacgaccagatctccttttgtcaaagatgcggacggtaccacagtaaagttgtctttcttatcgacggacgaaattttgtgggcttccacatctttctttgccgcgcggagggagtcagcctgagcttttccccgtccttccgcgatagcctccgcaaagttcgcgaacagtacggtaaaccagaggataatcgcaatcgccagcgtaaagccggaagattcgtccttgatgccgaacagagagcatacccataaaagggatgtcagaacggccgatataaataccagcagcattaccggattctgtacctggatcttaggattcaatttgagaaaagaatcctttaccgctctccggatcatcttgccgtcggtaaaagaatttttcgtttgtgtagacatttgattcgttacctccttatgccactacctggctgaagaattctgcaataggtcccagcgaaagagcagggaagaaactcagaactcccaccagaagaacgacaacgatcagcaggaatacgaacattgcatttgtcgtagaaagcgtgcccgccgtcgtggcgattctctttttcttaacaagacttccggcgatcgccagagttccgataatcggaaggaatcttacgaacagcatgacaaggccgatcgatacattgaggaagacggtattcgcattaaaacctgcaaatgcggaaccgttgtttcctccggcggacgcatatgagtagaggacttcggaaagtccgtgagcgccgctgttattcagactgtccgctacctcaggtacgattgcggcgagtccgctgccgacgagaatggcaatcggcgtcgccagacataccagcacggcccacttcatctcatacggctcgattttcttgccgataaattccggcgtccggcctaccatcagaccagcgatgaataccgcgagtatcgcgaaagcgagcataccgtacaagccgcagcccgttccgccgaacacgacctctcccagcatcatcagcagcatcggaatcataccgcccagcggcgtataactgtcgtgcatggagtttacagaaccgttggaagccgccgtcgtaaaggctgcccatgtggaagatgtggcgataccgaatcgcgtttccttaccttccatatttccgcccgcctgatcgactgcggtgatattgaccgcgccgtcctgcgctaactgcggcgtagccatctgttcattgacagccacgatccccagcgccacaacgagacacaggaacatcgccatgaaaatcgccacgccctgtttcttattcttcacactctttccgaaggtaaaacacagagccgcaggaatcaagagcagcgaaatcatttccagcaaattcgtaaacggatttggattttccagcgggtgagcggagtttacgcccataaagccgccgccgttcgtaccggactgcttaatcgcaacctggctggcagccggtcccattgggacgaattgttcggttacgatttccgcaccttctaccgtctggccgtccaccgtcactgtattgttttccgtatcgatgacagcgtcttcgataatctcgccttcttctgtcaccgcgatcggctcaagaagagttaccttttcactaccgtgaagattctgaattacaccgccgccggccagacaaagtgcgattaccaggttcagaggaatcagaatgtgaataacgattctggtcatatccacccagaaactgcccagtccgtcagctttgactttcataaagccccggatcagcgcgaataacacagcgatacccgtcgcagccgatacgaagttctgtaccgtcagacccaatgcctgagttagataactcagcgtcgcttctccggtatacgcctgccagtttgtattcgttacgaagctggctgctgtattaaacgacaaatcccatttgacacccggaaggccctccggattccacggaagaaagccctgcagcatctgcaggagaaatagaaagatcagtccaatgccggagaaaaggagaacgctgaccagatattttttccagttcatctgctcttctctatcgatatgcattaccttgtaaaccgcgttttcacacggagtcaggatcctcgaaagaaaagtcttttctccgtccattacttttttgatataagcgcccagtggaatcgccagtataaccagcactgccagatagagcgcatattgaagaacggtattcatttattgtttgtctcctttcataagaatgtacacatagtaaaacattaacacagcggcacagccgcccatcacagccgcaagtatttgcatatttcataaacctccttacctcgaatatgatagtcatatgaaaattaaaatcggataaggaaagcctcctcctgtatttaattcatataaagacgtataaagatattctttacaaaaaaaggatattttacaaacacaccggtttataaaatatcctcatttatcgctgtttttctacctattttttatattccgttactttttctctgtccgggcctgttttctccgtacctgtgcagcactttacacgtctcccggcgatgagttctcttttcttcgctgcggacaatcgcttgatcgcagcctcgcgtttcatcgcttcttctctggaggaaaaaacctccagatgtaccagatgcaccggtcctcttccccgggtatacttcgcccccctgcctgcattgtgcgccgcgaggcgcttgccgatatcgttcgtccatcccgtgtagagactgttgtccctgcactggagtatatagacataatttctgcaggcgtctttttcgttgaaaaccgaatcggcattttcttcgatttttttgagcaaaatatctgtcatggctcccgttcttcctcccgatccaaaaattttttctatcccatctttttctatcatacctcaaacacttgactttttcctgcgatttttattctaaattctctcatttcctaatatgctgtaacagattacgcaagggggaaattttttatggacacatataacgcatatgatatttataacgatatccggaccagaacaggcggcgacatctatctgggcgtcgtcggtccggtgaggacgggaaaatccacgtttatccggaaattcgccaatctcatgatcctgccgtatgtggaagatttccataccgcggaaagaatccgcgatgagcttccgcagagcggcacaggccgcacgattatgaccacggaaccgaaattcgtgcctgcgcaggccgctgaaatccggctgggcagcaatacttcctgccgcgtccgtctcatcgactgtgtcgggtatatggtagacggagccgcaggttcccacgatcccgaaaacagctcggaaatgcgcatgatctctacgccgtggagcgaggaaccggtaccgtttaacgtggcggcggaaaccggaacgagaaaagtgatcacagaacactctaccatcggcattgtcgtaactaccgacggcagtatcagcagcattccgagacatcagtatgaggaatcagaagcacgggtcgtcgcagaactgaaaaagacgaaaaagcctttcgtcatcctgctcaacagcacagatccttattccgaagagacactgacgctggcgcagaatatggaagaaaaatacggagctcctgttctgccggctgactgtctcaatatgacagaagaagatatcgcagagattatcacagatgtgctctatcaatttccggtatcgagaatcagtctcaaacttccgggctttatcgacggtctggatatttcgcacaatatcaaacagaaacttatcacaggcgtccgggaatggagcgaaagcatcgaatcgctgagagacgtcatccaatcctgcgaaaaactgactgacggcgaagtgatcagcgatgcctctattctcagcaccgatcccggaacgggcagcatcaccgtagaactttcctgtgtcagcggtcttttctacaaggtcatcggcgaaatcatggaatgcgacgtacgaaacgaccgtcatttcttcgaactaatccgcgacttctcacatgcgaaaaaggcctatgagaaactgcagagcgctctggaagatgtggagaaaacaggatacggaatcgtgcgccctcagctttcggaaatgcagctgaaaaatccggagatgttccggcagggcaaccgctacggagtaaagatcaaagccacggctccttcccttcatatgatccgcacggatatcaccaccgaagtctcaccgatcgtgggttctgaaaaccagagccgggatctcatcagctacctcagcggacaattccgggaagatcccctcaatatctgggagacgaatatcttcggcaagacactgtacgaaatggtcaacgatcagatcgacagcaaactcagcagtgttccggaggaacttcagcagaaaatccggcgctccctgcagaaaatcagcgacgaaggaaaagaatactttatctgtattatcatctgatccggttttgccgtttccggcagataggccctgtgttcccgctgtcagacgcttccgttctttccattcagatattttaacctatcctgtccttttcggtcccggatgaagattttccgtcctgatttctgcgtggaaattaccgaaaacagtgaaaaagcgctcggatccggtggatcggcgctttttcgctcagctcatttttcttttttcagcggaaagcaggtttcgatctgcgactcaccgatgacgggaatccccgcttttttcagaagagccgcaaagatcccgtctccttcggtgagagttttcgagaaagttccgtcgtaaacctgtccgctgccgcaggaaggactgcgctcttttaaaattgccagcccgcattcaaaaaactctgtcagctgcatcatcctccgggcgcctcgctgaaattcttcggtgacgtctcttcccgatttcaataaaacccggtctttgctgatttccgccggatctctcgggaccggcagtccgccgtaagattccgggcagacgggaatcagatgatgttcttccgcaattcgtttcagagaaggatcatagttgtgatctccgtcataacggcagctgacgcccagaagacatgcgcttacaagtatgttcattttcaatttcctctcctgctctgaaaaggtccggcagtctgccggaccttttcatctttattctatatcctccgatgtatcgctaatcctcccgctttctttccctgcccatcaggaggtctacggcggctgcggccggcacttccccccgtatcacgcgataaatctgttctgtaataggcatttccacaccgtgagatttcgccagttcataagcggcttctgtggtaaacatcccttccaccaccattccgacctttttcgtcgcttcctccggcttcagaccttcgccgatcataatgccgcagcggcggtttctgctgtgcatgctggtgcaggtgacgatgagatccccgactccggagagtcccataaaagtactccgttccgcacccatttccacgccgagtctcgcgatttccgtgagccctctcgtcatcagcgccgctttggcgttgtctccgtaccccattccgtcggaaatgcctgcgccgagtgcgatgatatttttcagcgctcctccgatttctgtgccggtcacatcgccggatgtgtaaatccgaagaccgtctgtcataaagagatcctggacaaagacagccgttttttcctcttcggcagctgccgtcagcattgtgggcagagcttttgccagttcctctgcgtgggagggcccggacagcaccgcataccgcacgtccggacgaatctgcgccgcaatctgagaaatcagcatgtgtgttccccgctccacgcctttggcacagttaatcacaggcacatcgcctttgacatatcggtttgtagcttcaaaacagcttcgaaaagcctgagccggcaccacgtagaccgccgcgcacgcctctgaaatcgcttcccgggcgtctgccgtgcaggaaatcccgtcagggagcactgcatcgggaagatatttccgattttcgcggcttttttccatctctgccatgacttcggggtttcgtccccaaaggctgacttcatgaccgctgcgtgccagcgacatggcgagagctgttccccagcttcccgccccgagaactgcaactttcttatccctcatttttctttcaccgatcctttatttcctgaacagaactgaagaccgcgacagtctttacagctctgccttcatgcatcacgattttttccgctgagaaaactcagcggcggctcttctctgtgaatcagcctgacgatattctttctgtgccgccagatgatcagcaccgccatgcataccgcccagatatattcccatcccatcgctccgggagccgctgagacaaatatatatgtaaatacaggaaaagataccgcagcgaatatcgatccgcaggacatccgtttcgtcagaagtacgccgagcaccgcgaagagcagcgcgagaagccccaccttccagtcgatggccagcgccgcgccgaatccggtagcgaccccttttccgccctgaaatctaaaacagaccggccacatatgccccaaaagagccgctgtcgcgcagagaatagccgccagatcggaaaccgcaagaccggcggcaaatgtcggcagaaatcctttgagaacgtctacgagaagtgtggcggcagccgccttttttcccagcgttctcagcacattggtcgttcccggatttccgctgccctcttttcggatatccacgccgtacagtctgccgatgagagtggcaggcgaaatattgccgataaaatagctgatgacaggaagaatcaccagacagagaatttccacgcttctactcaagttcattctctcctttttctctgaatacaaacttaaccgacgttccggtaaatttgaaattgtctctcagctgattttccaagtaacgggaataagaaaaatgcatcagctctcttttgtttaccttaaaagagaagagcggcggtttcacccctacctgagtgacataatatattttcagcttttttcctttgtcagacggcggctgcttcatcagcgtcgcatcggcgatgaccgcattgagctgccctgtcgggattcgcatcgcccgctgctccgctacttctccggccagtttcaatacgttcatcatacgctgtcccgtcttaacagaaataaagagaagcggagcatacggcatgaaagagaactcctggcggatctctttttcaaaacgattcatagtatgggtgtcttttttgatgagatcccatttatttaccacgacgatgatgccctttccggcttcgtgagccagaccggcgatctttttatcctgttctgtgatcccttcttccgcatcgatcatgacgatgcatacgtcgcttcgctcgatagcggtgatggcgcgtatgacgctgaagcgctcgatatcttctgtcaccttttttcttctgcggattcccgccgtatcgatcagcgtatatttctgaccttcatgctcaaacggcgtatcgatggaatctctcgtggttccggcgatatcgctgacgatgacccgctcttcaccgatcatagcattgacgagagacgactttccaacattcggtttgccgatgacggcgattttaatatcttcgtcttcctcttcctctcctgtgcttttcggaaactctccgatcaccagatccagcagatctcccagattcagcatattggccgcggaaatcggcaccggctcacccagtcccaattcgtaaaaatcgtagaatccatccggtacattcggcgtatcgatcttattggccacaagaatcacattccgccctgtcttccgcaacatctcacctacttcgcggtctgcagccgtaagaccggcccttccgtctacgataaaaatgatcacatctgccgtatcgatagcgatctgcgcctgctctctcatccgagaaaggatgatatcgtcggaatccggttcgataccgccggtatcgataaggacgaaaggtactccgctccattcggcttccgcataaatccggtctctcgtcacgcccggcgtatcctccacgatggatacccggctgccgacgattttgttgaaaagcgtcgatttgcccacattcggacgacctacgacggcaacaatcggtttactcataaaaactgatctccttaaaatatatttttcacggaacagagcgctgacagccttttctgtatcttccccgctctctctgaaaaccttctcatatcttcgtctgcagtctgccgatctatttttcgaacagagctccggcgaacatttccggatcaaatacctgcagatcttccatgccttcgccgacgccgataaattttacgggaacatcgaattcatcagcgagagtgatgacaatcccgccttttgccgtaccgtccagcttcgtcagcacgataccggtgagatttgccgcagtaccgaattccttcgcctgagatacggcattttttcctgtagcggcgtccagtaccaggagcgtctctctggccgcttccggaaactccctgtcgataatcttgttcattttttccagctccagcatcagattctttttattctgaagacggccggccgtatcgcagatcaggacgtcgatatttttcgcctgcgctgatttgatagcatcatagatgacggcggacggatccgctccttcctgatgacgaacgacaggaacgcctgcccgctcgccccagatctccagctgttcgatggccgctgcccggaaggtatcggctgctgccagcatgactctcttaccgtcctgtttcagcatatgggcgatcttcgcgatagaagtcgtctttcccgaaccgttgacgccgatcatgagaagcaccagcggcgtcgaagaagacaacgcatagcccgcatcttttgcgatcagctcactgataattttcttgatctgttccatgaccttttccggcgtatccagcttttccgccttgatatctctccggagacggtcgataatctttcctgtcgtctccatgccgatatcggaaagaatcaaagtctcctccagctcctccatcatatcttcatcgatttccggccgctgaaagataacatcttcaatctttcctaccatattatcctttgtcttcgtcagtccctccttgagacgtccgaaaaaagatttcttctctccaaatgccataacgctctatcctcctgctttttatctgtctgtcaaattatctataggacattgtccccgatctgttttgcgtctgagagcttcaacgagagaactttcgaaattcccttctccggcatcgtgacaccgtaaagtgcgtctgcgtgttccatcgtaaccttttggtgagtcaccagaacaaactgaactccccggaaattttccagataagcggaaaacctttcgatattcgcctcgtccagagccgcctccacctcgtcgagaatacagaacggcgccggcttcgctttcagaacggcaaacatcagggcgatcgctgtcatcgtcttttctcctcccgacagaagattcatattttgcagctttttgcccggcggctgggcgataatatcgatctccgcctcaagcatatcgtcgcctctgacagacaactgtgccgttccgccgccgaaaagttcagaaaacacagtcttaaagtgagtctgtatcagctgaaaggtattctgaaaatcacttctgatttttttatcggtttcacggatgatccggccgagggaatccgccgcttcggtcagatcgctacgctgagcgtccataaattcatatctctcgcggaccgcctcatattccgccgctgcgcctgtatttacttcccccagctcccggagccggcgccggagactcttcgagcgccgttccgcctgcttcccggattctgaagacagaggacaatgtttcaccgcctccggataagaaatttgaaattcttcccaaagcctgtccttgagacgcgcgttctgctcctcgtttccgttcagacgcagattcatctctctgcgtaccgactccagttcataaagagtccgttctttcttctgacggatctcattctgttccgccgtatgacggacattctgcgcttttctatttttgatctcctccagccggctgccgccggactcatcggaagactccatggaaaaaagcatacgctccgcctcatcccattccttctgtctctgagcgatttctccggctatcgattcttttgaagactctttctcctggacctcgcctgtaagacgcaggatttctttcgcacttcgctgcgccgctgcatccgctgcggcaaattctcctctcagagactcggctttcagcttcatctccgttattccatttccgagagattccagagatttccgcaggatttcattctctgtcagctgcctttcaaccgcatctcttagcgctttgatttcttcattgcaacgcgcttcctccgcttccatctcttcgatccgcctttcggcttcttcgatttctcttcggaggcgctgcatttcctgctgtgtccgctgcctgcgggtacgccgctcatttctgaaatcatcccgggctttctgttcatctttttcgcgcatcagctgcagtttcagccgcgcttcttccctttcctgttctttcagcagtttttcaattttggaaatttcgtcccgcagagattccgtcagatgctcctgatgcgttttttctgcactgtgaagacggatttcttcttcgatttctgcaagccgttttttccggtccagaattcctccggtattttttcgataagaaccgccggtaatcgcccccgccggactgacaatctctccttccagcgtgacacagcggcatcctctgtatctggctgcgatacgggacgcactgtccagcgtatccacgatgactacgccggacagcagatattccaccgccctgacatagggaggaagagtcgtgacgcattgagatgccgcagcgagaaagcctttttcccgaaacaattcctcctcgtatctgcggggagaaacccgcagactgctgacgggaagaaacgtcagacgtccggcctttttctgcttgagcaggcggacagcctgatcggcgctggcgtcgtctctgcagatgatattttgcatacgcgcgcccaaagctgtctctacagcgatttcatagccggagggtacttcgatgagttcgcctaccgtaccgaagataccgtcgatcttcgcctctttcatgagaaaacgaaccgcaccgccgtaaccttcatatgtattttccatatgcagcagcgcatttctctccgcctcttttcggctgagttccataaccgtcttctgaagctcctgcgaaaggctaaaaagacggccggcgcactgttccgcatctcctttcagttctttaatccgcgcttctgtatcctgaagcatcccttcggtatgcagaatatgacgttcttcttcattttgagattcttcgccgtcttcgtctccgctcactccgacgctctgtttcaaccgttcataacgatcctgcagagaatctctgagatttctcatgccggaaatttccgctgatatggaagaaatcccgatccccagatcgtaaagccggttccttccatcctcggcgcggttttcactttccttcagatttctggaatcctgcagaaaaagttcatttttctgatgcagcatctgctgaactgcggtcagctcccgctgaagtgcatccgctttttccgcggatgcctgccggctttcctgttcttcctccaggcggaaattcaaagctttctgctcttcgccgagcgcctgtattcgctcctgcagtgtcaggattcgttctcccacatatttttttgtatttctcagctcgctgagacgtccggcaaattccatcatccggtcgcgttccgccagatcttcccgatcaagaacggaagcctgcgccgcaagatctgcgatccgtgcggaaacagcctctttttcccgccgtacttccgcaatctgacgctctgtatcgtcgatctgattcttcagcgactcgcttgcctctccgatcgccgcgatactcctgacgatgattccggtctccgtctccgcgtattctctgctcagctgaagatattcttccgcgcgttccgcttccgccttcagcggaccgatcctcgtctccagatcggcgatgatgtcgtttacccgatccagattgcggtcagcggtcagcagctttttttccgcttccgcctttttgcttctatactttacaatgcccgcagcctcttcgaaaatttcccggcggctgtccgcccgaccgctgacgatttccgcgatttttccctgtccgataaaagaatatccgtccacaccgataccggtatccatgaccagttcccgaatgtcccgcagacggcactgggagcggttgatatagtactcgctttcaccggaacgatacattctcctggtgatctccacttcggaaaaatccactggaagactggcgtcactgttgtcgatcagcagcgagacttccgccatcccccgggattttctcgaagccgttccggcaaagatcacttcgtccatttttccgccgcgcagcgtcttcggactctgttcgcccagcacccagcgcagagcgtcgaaaatattgctctttccgctgccgttaggccccactacgcaggtaattcctctgtcaaattctatcgttatcggatctgcaaacgacttaaagccatgaatactgatctttctgaaatacaatttaacctctcatcttttccaaagcctgttttgcagcgttctgctgcgcctgttttttgctgtttcccgaacctctgccgatgatcacgccgttatttctcaaggatacaaaaaaagtcttatcgtgatccggaccggactcccggtccagccggtatgagatgtgtgccgctcccttggactgcagaaactcctgtatcgcagttttatagtcgttttccagttttccgctgagagcgtcgtcgatcacatcgctgaaaagacccagaatcaccttttttgcgttctcccagccgccatcgatatagacggcgccgatggaagcttccagcgcatccgctgtgagagaacgttttttccggctgcctgcggacagctgttccccgtgtcccaagcgcatataatccgccagcttcagttcttccgccttgcgcagaagagactgctcgcagacgatagatgcccgcagccggctcaaatctccttcttctctgtcggtcagccggaggtacaattcgtctgcgatgaccgcgtcaaatatcgcatctccgagaaactcgagtctttcgttgttttctctgtaatccagcctgtgttcataacagtaggaactgtgggtcagcgcgttgcgtatcaccgattcgtctcgaaacgcataccccagcgcccggtaaaggtctgacagatctttttcgttattactcacttatcgttatttcctccagctcgatgacggaatcacgaatgattcccactacgttgttttccacataaggaatgccctttatgatggcatttttgacggcgttcgctccggaagaaccgtgaatcttgatcaccggcccccgcacgcctaagatcggcgctccgccgtactcggaatagtcaaaggcctttttcagttctttcagctgacccgacagcatcaccgcgccgatcttggagacagccgacgctgtaagcatgtctttcagaatatccatcatcttagcgctcagtccctctgtgagttttaaaagcgtattgcccacaaatccgtcgcataccagaacatcacaggcgccgtacggaatatctctggcttccacatttccgataaaattgagattgctcttcttcagcagctgataggtctctttcagcatggtggtcccttttttctcttcggagccgatattgaccagtccaacggtgggagattccacccccaggaccttattcatatagatgctgcccatcgtggcgaattcca

SEQ ID NO: 2950 - DNA, 32759 bp, Unknown
  16S sequences of unknown bacteria
attcctgtctattccccgtgcaaaaaatccatccccgaggaaaaagtgaagaccctttttatttggataaattgataaaaagaaagaataatggattgattaaggtaattactggtattcgtcgatgtggaaaatcctatttactgaataatctgttttatcatcatttattagaaagcggagttgatgctgaccacatcattcgctttgcttttgattcagccgatgatctttatctgattggcgaaagcctgattcagattgaaaaggaaaagcgtggagttgaccccgaaaagtttatggcttatatccgttccaaagttgtagatgaagaaatgtattatctgttgcttgatgaaattcagatgttggattgttttgaagctgttttgaatggctatcttcgcaaagataatatggatgtatttgtgaccggaagtaatgcaaaacttttgtctaaagatatagccaccgagttcgccggtcgtggtgacgaggttcatatgtatcccctgagttttgctgagtttatgaccgtttacagcggtgataagtacatgggattatctgaatatatgctatatggcggtattcctctggttgttcttcgtgagggagcaaacgataaggctgttgcattgcagaatctgttcaatgagatttatattcgagatactaccaaacgtaaccgagtgaggaatatcggagaattggaagatcttctgaatattctttcctctgccattggttcgctgaccaacccagaaaaattgaagaatactttcaagacggtaaagaaatccagaatcacttccgctaccattaagaaatatctggattattttgagaatcctttcctgattgaatcagcacaaagatatgacattaaaggaaaagcatatattgaaacacctaagaaatattatttttccgatcttggtcttcgcaatgctagaatcaatttccgtcagtttgagcagactcattctatggagaatgtaatttataatgaacttcgtatgcgtggttacagtgtggacgtgggcgtaataccaattgcagaaaggaatcaggaaggtaaggctatccgtaaacagcttgaagttgattttgtatgcaatcttggttcatccagatactatatccagtcggcatactcgctgccagatgaaacgaaacgcactcaggaaatcagaccgttcaggaaaattgatgattccttcaaaaagattgttatcacaaaagatattgtgcagccctattatgatgactatggtatcttgactgtaaacatttatgactttctccttgatccgcaaatttttgaaaaataaacaatgttataaaggaggttatgcggtcttggaagaatgtatgccggtggaggcgaactttcaattcaaggttatcacaggctcgaaccactagattttaagggaaaaggtgcgttccaccattcccttgtacaataggggttgagtatgtttttcgttgaacaaccgagccacgtggagacggttgttctgttgactaaagtacataattgacagtgtgaaaagggcttgaaatataagactttttcagcgacttgtgataaatctggggaaggagaggactcatgagagacagatcaaaagaaatcgctatgctggaggatacgcttaagatcttaaaacagggctggtatgaaaaaaatggcaaaaggatacagctgaaactttccgcaaaagaaatgcaggagatacaggtgtacctgccggaagcggtgaagaaaaattgttctgatcctgagttcagcaggccgtttgtgattggacgttgcggacatggctgtgaaaatatagattcttttgcacttgccagaaaacgccttggcgatacgtatctttttaccagggatgatcacggcattctggttttgaatcttgccaatcctgtgcatccgggaggcggcgttcgtaacggtgcaagagcgcaggaggaagacctttgcaggaaaagttcacttcttctttctctggagagcaaagaagctcggaaatattatgattataacaagagcctcaatacctacctgggttcagatgtgatgatcgcgccttatgtagaaattataaaagatgcgaatggtgacctgctggacgatacagtagtcgtttctgtccttacctgcgccgcaccgatgatatcacatggcaaggagggaatgagcgagtctgagtatgaggatatggtatataaccgtatcatgggaatgctgaaatgcgtcgcatatctcgggtacaggcatcttgttcttggagcctggggctgtggtgctttcggtaatgatgcgcatgtaatctcagatcttttctataaagcactgaaggaaatgaattacaataaattaagagagaaggacctgttccgcaggattgattttgcggtgcttgaccggacgcaggatcagtataattttaaagagttttatagaaattttgccttcgataatttttaccgggatgaggatcagcaggaaatggatggagccatgaagaggatcagggagaaggaaatcaatctggacaaaatccttggctcattagcaggcggtgctgtaggggatgctcttggctatgcggtcgagttctggggagaagagcagatcttcggtaaatacggtgagagaggaatcacagagtatgagctggacagtttcactgggaaggctctgatttccgatgatactcagatgactctgtttacggcgaatgggctccttgtgggagatacacgaggagcaatgagagggatccagggctggccaagacactatgttgcacaggcatatcaggactggctttatacgcaggagtgtcccttcgataagcagaaaatacaggatcgcagagggaattattcctgcaggtcatggcttgcggatgtgccggagctttatagcagcagagcaccgggaaatacctgtctgtctgcactttccgctcagaagaacggtaaagactttgtgaacgattatgtgaaagagccacagaatcaaagcaagggctgcggcggtatcatgagagtggctccggtcgcgctgaattataagcatatggagatgggtacactggacatggaaggcgcccagatcgcagctatcacccatgggcattcccttggttatatgccagcggctattgtgacgcacattatcaactgtatcgttttcggcgaagaaaagaaaactcttaagaatatcgtaattgaagccagagacaaggtggcagagatattccggggagacaggcatctgaaggagcttaccgatattattgatttggcaatcgaattgtccggaaacgaggcggatgatcttgataatatccacatgttaggcgagggctgggttgcagaggaaactctcggcattgctctctactgtgcgcttcgtcatcaggatgacttctcggcaggtgtgatttcggcggttaatcataagggcgacagtgattccactggagcggttaccggtaatattctcggtgcgcttttgggatatgatgccatagaggagaagtggaagacgaacctggaactgatagatgtcattattgagatggcagacgatctttgccatggatgtcagatgagtgaattcggtcattatgaggacccggactggataagaaaatacatctgtatgcagtggaaggatgaaagacttgatcctgcaaagacagacaaagtttgaagcagtacgcggagatattacaaagaaccatggcgtgcaggcaatcgtaaatgcagccaatacgagacttctcggaggtggctgtagataacggcatacgcagatgagatagaacattggagggtatccgaaatggtgcagtctccgaatttttattccatgaataagatgcttcgggacggcgggtgctgaccaatttatccggtaaaaacagagcaaagctctcaatgtataaaagagtacaacgcctgatgcacaaagctggtcttatgggtaagcgtccaaaagaaaaatatcatttgatcttgccaaaagctcgaatccggcgcagattaaacgcatgttaaagaaggcgtttaacaaattttccaacctcaagggccttatatttcactcggatcagggtttgcatggaaacattctttggcaggatgaagaacgagatgtattatgggtacgaaaataagtacaaatcatttgaagaattcgaaaaatccggacaatgttggcgtgtcccgacggaagacagaagaatgtatgccggcggaggcgaacttacagaaaatattgattaggcatataaattttgatacacagaacaaatcggcaacttccaatagccgtatgcgttttcccggttcccggattgccggtcataatgatatttttcccttctctgataaaatccagcgtacacagctccggcaggcgttttcgcattccttccgggagaaaattcatttccggatcttctctggaatgaaatagccccgataagaggcgtattaaattcaaagtttcgtcacaaaataatttatgcaaatgcttgcaattgcaagcaaaaaacaaatataataaagaaaaaggaggcgatactatggcaaatacatccgttgtttatgcaaggatagatactaatctcaaggataatgctgagagcattctttctcagcttggcatttcttcatccagtgcaattcagatgctttatagtcagattgtactgaaaaagggtatgccgtttgaattgaaacttccttcttctaagccattagccgttggtgcaatgaccagagaagaacttgatgcagaactccagaagggtgttgattccatcaaagcaggaaaggtatattctgcagatgaagtcgatgcggtacttgcaaaggagtttggcatatgacggataactacaatgtcggttattctgtagatgcacttggtgatttacgtgaaatctattcgtatattgcgaatgaacttcttgttccggagacagccgtagctcagctggggcgcatacgaaaggaagttcgttcattggattttatgccagctcgttatacgttagttgaatgggagccttggcattcgatgaaaatgcatcagcttccggtagacaactttattgtgtattatcttgtcgatgataaagagaggacagttacagtggcacgaatattctacggtggtcgagatatcgaagaaattataaatttaaataaataaacagaagtggagcgtttaattacgtaagcatcggtcacaagttgattggtgctttgtcgtattaccaattcgttttttggatctaaaaaccaagcttcccaccattggtaaataccctgtggtgagaagcttgttgtgtcttgatggaatattaatatactacagcgtcatccgcagtgaagccttccagagaattctctttggtctgaatacagacaaaagaaattccttcatcttctgccgcgaagaactgacgctttgcaacaggtgcgattcttatccaatcacctgcagtgagagcaatttcttctccgtcaataatgacttttcctttaccggaaaggatgccgtaaacttcttcattgttcttatgagagtgcacgaaaggaacgttagctcctgccggaagatcgttgatactgatttccgctccggtgagagaaagtgtatcatgaagttcaactctgccttcatttccgatgtttgtttttgcgtaatttgccatggtgtatacctccgtttttgctttatatttttcttgtagttatataataacttgctgtgcattcaaaggtaagtacgcacctttttgtaactacacattcaaaaatgaatgtgctataattttttcgagcaatcacagtttttgggaggcacaattgcatgaaaacaaaagacgaacttccggcttgcccggtggcaacagcagtggcacttgtaggtggcaaatggaaactcctgattatacgaaatttgagagtacgcccgtggagattcaatgaattgcagcgagatctggaaggcatatcccagaaagtattgactgacagtctaagacagctgatggatgacggtcttgtacatcggcatgattatcaggaaatgccgccaagagttgattacagcctgacggaattaggaaaaaaactgctgccaattatggatgcactggcagactttggaaattactataaatcggttacagcggagtgatatgtctgaaggtgaattactgcggggggttcagttgttgcaaaatttgaaacaactgttgctaatggaaaacactatggttagatggattggtttgacttttatgccctaaaatattataattaagggcataaaagtcaaactgctgtttaaagaaggtgatcggatgaatgttgcagatagaatagtacagcttgcaaaagaaaataatggtgttgttacaacttctattctttctgaaaaaggaatactccgagggaacttgaaaagacttgttgaggagggcaggcttgaaaagactgcgagaggagtatatattctgccggaaacatgggaagatgaatttgtaaatttgcaggcaagattcaaaaaaggtattttttctaatgagacagccttgtttttgtgggatttaaccgatcgaacacctaatagatatgacatgacgttcccacacaattacaatctgacaaacgcaaagaatgaaggagtaaattgctcaagagtgaagtcggaatggtatgatgaaggaaaaactcaagtagaatctccgggtggaaataaaacaatagtgtataatatggaacggactttatgcgatattttgcgtaagcgaggaggcgcagatacgggcattgttgcagaagcatttaaacgatatgcatccagaagggatagaaatcttccgcttctgtcagaatatgcgaagaagtttcgtgttgaggaaaaggtaagaaattacctggaggtgctgatatgaaaaatgcaatgcagcttaaagctgtcatcaaaaacatatcaaaggataagcatatctcagcacagcttgtaatgcagaattatatgctagagcgtttactggaacgaatctctgtttcaaagtatcatcagaacttcatattaaaaggcgggttcctgatagctgcaatggtgggcttagatacccgtgctactatggatatagatgccacaattaaggcgtggccggttaatgaagaaagcatcaaaaagatgtttcttgatatctgtaaaattgatgtacatgatgatgtggtttttgagtttaagaaaattggcgaaatacgagagggcgatgagtacacgggataccgtgtttcgctatcagcaaattatccaccaatggctgttcctttgaaattggacattactacaggcgataaaattacaccaagagagatagagtatcgctttaagttgttgttggaagacagggagatatccgtgcttgcatataatctagaaacagtattggcagaaaagctcgagactattgtttcaagaggagatcagaatacaagaccgagagattactatgatgtttatattctttctaaactgcagtataaaaatattaaaacagagtacctgaaggcagccttgaaagcaacatcaaagaaacgtggttcttcggatattctgaagaattataagaatatcattgatgttgtcagaagtagtgatgcgatgattaagcagtggaagacttatcagaaagattttgaatatgccactgatatcagtttcagtgaggtatgtgatgctgtagtgcagatgatggattcttgtttcgagtgtcacgttgagatgtagcccgctagaaagaccacgcgactgcatcggaatcacgtaggaggcgcattatgaaattctataacatatttttcagcccaaccgggggtacaaagaaagtagcagaaattgttgcgaaagggacaaatccggaatctgaagaaatcgacctaatcaaagaaccggataaattgacgaaggtgaaatttgaaaaagaggatctgtgtttggtttctgtaccgtcttacggcggacgcgttccgtcggtcgtagtggatatgttccgaaatgtaaaagcagacggtacgaaggcaattcttgcggtggtgtttggaaaccgtgcgattgacgacacattgttagaactgcagggtgttctggaagcatcgggctttgcatgtatcgcaggaatggaggctgttgcagagcattccttgatgcaccaattcggaaccgggcgcccggatcggcaggacgaaaaggaattgttggaatttgccgctaaaatcatgcaaaacagcgaaacacaaaggacaccgcaattccccggaaaaaaaccataccgagaatacggtggtgttccgttcaagcctgttgctaacggaaaatgcaattcctgcgatctgtgcgcaaaagaatgcccgacgggggccattcctttggacaatccgaaaatgaccgataaggctaaatgtatttcttgtatgcactgcgttgcaatctgtccgaagaaagcaagaaagtgcagccagttggtcagctttatcgccggacgaaaaatgaagaaagtctgttccggtagaaaggaaaacagattgtacatataaatcgggttttgaataggcgcaatcaatttgatttcagacaagtacgttggcaggtggcaggtggtggtaaggtatatggagtagaggatgttcacatagcttgttgcaatgacggtgtagggctggtggtttttagattggaaatgcttgaagatggagaaagccacaaataagttttcaaaagcttttgttgactatcgcgtaaaatcaaaacgaggaacacagttcagaatctgggcaaccggtatcgggatatcttgattttgcagaacgtcaggcagaacgagaacaagctatgacaatgagggactgggcagagcatctggattgaattctgacaatgagcttttacaaggaaacggaagtatatcacacaaacaggctgttgataaagcaacggacgagtataaaaaatacaaatcacgaacactcagcacagtggaagaagattacctgaattatataaaaatgatggagaagaaaacaggtaaataaaggaatgatttttcaagggaaaacacttgattatacagggaggctatgaatagtatgaatgcaaaagaacaatttattcaatggctttcatctaatccaataagcaaatataaccctaatacaatggttaaagcacttgctgaaggttctgagttttgccgttctcgtagcttgagcaaggagagcttttggaatatgaataatgaaaatgaatttgtaaccgttgcatcaaagctccttggaatgaaaatatataggttgatgcataagaaaacagcaattgttcttgataaagcagtacctttatataagcaatttttgcagcaaaatgaaaagaggtcttatacaaagattcctgatgttgaaatttcaacagaggattcaagcaacaattttgaaacagtcctactgattgataacattacagaattaccgttgaatgaaaattctgtatttgaatatgactttaacaatccgcagtctttaaaatttaccaaaccaataaaggctacatattttgatggaatagcctctaagtcaacgtcttggcaacagctttttatggatttgttaaaggtgttatatgaagattatgcggatacatttaaaagaatagggggcgttgtttacttaggttcaaatgcacctttgataggaagaaaagatgacctgcatttatttaggcgacctggagagtttgcttctggaatgtatgtggaactaaataggtcggcaagtgaaattgtaaaaaaattaaagaaaatccttgatgaatgcaatattgattatgaagatgttgtaatcacatatttgaggaagcaaatgaaacacgaaggacatgctaaatatgaaaagaaccaaggtttgggcagtaaatattctcaaatctatcaaaaactttattatatttccaagatatatgatgaccctgaaggaatgactttagaaaaaatagtgtctatgctgggtaatgatactgatgaggaattggtaatgagtattctaaatggtgtttcttgggcaaccaaattggctgatgatatttattcgtttagtgaaaatggtaattcaattttattgaaacagatacagccaaataagatagaaggaaaggacatagttacagacgaccaattcttcaattttttgtataattatgagaaaatggcagaagcttcgtgccgaagttatgtctcagcaataagaacagccgaggaatatgcaaaaaagcataattatgcctcgcatatgatttatgattgttgttttgaagatgcatcaacgctgattcgagtgctcatgtgtgataatgagtttctggaggttaatgctaagcaacataaccgatttagagcagcatttaaaaaatacttaaaaatgggaggtcaactttctgcaaaagaaagaaaatctttatcagtgaagaaagcatcgctgccggtttctagtaagattgaaaaagcatagtcgaaagtttcttggacggaaaaagtttggaatggaaacaaagcggttggaaacattcagggaaagatacttttccttggagatattaagggcacggacaaactgattccggttctggatgtcaagtttgacgactacggtgtcaagtatggatgggcagggaatcaggccgtattatttgcagatcccaagattctgtctgacaggcagaaatacgatgaatttctagaaaagctatcggagcttccggttccaaatttcttaaagactatgaaggataatgttgtatcaacaggaacggatttggaatctgaaactgtggaagaaatgcaggatatagaagtcttggatgaagacgggaaggcatcaaatccccaagcttcgaaactgttcaaagcggctcaaaaggccatcgaatccggcgcagaggctgtcgaaaaagtaggtactcaagtggcagcccggtccgaagagcttttcagaaataagaaattgatgaagcaacagatgcttttctatggagtaatccatctttataatgatggccttgaagaattcatgaatgcgtgaggtaagcgcctatgcaacaaaaaagtgaaatgcagcaaggctgggatttcgctacccaaataatgggagcggatttggcggcacacatgggaatggaatatgtcagcgctgtagatgcggccattaagcagctggaagaaaatataaacaatcataattacaggaacctgggcatcaaacaacttcaggggtttatgttggaagagtggagcgccggtacttttaatgtggatgccattgcagctgattctacatatagagcggaggtccttcatagtacggagaaagattctgttgacgtgttgatgaaacaaggcggcaaagctgtgggcgcatatagtgccaagtcctatgctgatggaactaaaagcgcgattgaacaggcaaggatgaatccgaaaacaagacaggcaagttatcaaggacaggaacgacttgttcctacagatcaattatctgatgcgaaagctgaagcacaccgtcaggcattaaggaatcagccaatccgtccagaggtttcaaaagcatactccgagacagaagaaaaattgacagataccattacgactaaagatggtaccaaatcacggacagcgacaagaaaagaacttgaagaaattgcaagggaaagcaagaagcaagattttaaagcttccgagcatggagttacagcagagagtgcaatccgaacagagtatctcttgaaacaggcacttaaagctgggtatacggcagcggctgtgacggttgccgttcagctggcgccagaaatatataaggctgttgattatcttatcaaacatggagagcttgatatacagcagattaaaagaatgggaacaaagggaatctctgcaagtgccgaaggctttctgcgaggatcggtggcatcttctttgaagataatgtgtgatgccggcatgctgggcgagatgttcaaacgcataaatccggctgtgcttggaacggttgtggcgcttgttatgcaaacggtgaaaaacagtattcttgtagcagccgggaagatgagtacccaacaaatgggagcggcattcgttgatacggttgttatatccggaggatatctgttagggattcatatcggaggccttatcggacagacacttggctttgaattgccggttgtcggctacttgcttggtagcttgattggaacctctttttgtgtgatttacaatatcggtaagaagaagctgatttccttctgtgtggataccggattcacatgctttggtcttgtggagcagaactatgaacttccggaagatgtgctgaaggagatgggtatagaaactatacctattcagagaacgcaaatggaaatgactgacgtgccacgcacacaggttacgggaacagatatagaaacatcagaatatgagacaatagatattacagttttaagaagaggcgtgattggagtcaataaaatcggctatgtgccggtttgatgtaggtgaatcatgaagtggtatcaggattatgattttatatttgctcaatttgaaaaaggcgatgagcgtgtagatgaaacgacattttatttccgttcggatcctgaagaagttgagcattacataggctatttgtcgcagtacgagaaaccatactgggcgggttactgcgatattgaagacggctgtgagtttaagacagctaaggaattattcgaggccaagatttatgataagcgatccataaaagatcgttgggatgaacttgttcttatcagtatcggaggtatcagcgctgatgattgggaaaagtcttggtttgattgaaaaaagcagaatcgggaggacttaaaacaaatgaaactaagaaatttcaagagggaagatgctccgattatagccggctggattcgattggaggaagaattatacaaatggtctgccgacagttttggtaagtatccacttacgggggatgacataatcgaaaactatacgccgcggattgaaaatgggcgtttttatccgctaacagcaatagctgcgaatggcaatgtcatagggcatctcatcatacgctatccgcgagaaaaggatgaaagttccgttcggttttgtttcgtgatactcaatccggctacaagaggaaatggcctgggaaaagaactgattcggcttgcaatagagtatgcaaaagaacatctccacgccgcaaggattgagctggctgtgtttgaaaataacgagagtgcaagacgctgctatgaagcggcaggatttacggagtatgccgagagcgagtacaaaatgccgataggcacttggaattgtacggaaatggagttgcagtgcatatgattttttgtttttcgggaaccggcaacagccgatatatcgcaaggcgttttgcggaagcgctgcaagaacccatcacagacctgaacgcaaaaatccgaacccgcgacacttcgcccatccaaacgggccgcgacgtaatcctcattgctcccacctatgcgtggcgcattccccgggtggtatccgattggctcataaaaacagaattcgcgtccgccgaacgcatctggttcgtcatggattgcggaagcgagatcggcgacgccgcaaaatacaaccggcgccttgccgagcaaaaaaatctgcagtacatgggaactgcacagattgttatgccggaaaactacatcgccctgttcgccacaccggaggcagaggaagccggggaaatcgtccagaaggcgcagccggatgtggaagcggcgattgcaagcgttcaggcgggacggaaatttccggcacctcgcaataacatggagtaccgcatcatgagcggtatcatcaatccatttttttaccggctgattgtcaaagcggacccgtttcgtgtgagcggggcgtgtgtcggctgcggacaatgcgcgtcaaaatgtcccctgaacaatattgagcttcggagtgggaagccggtgtgggggaagcagtgtacgcattgcatggcgtgcatcagctattgcccggcgaaagcgattgagtacgggaagaggagtgtcgggaaaccgcgctaccgctttgaggaattggaggattgagaatatatggctgacccagaagatgatggccacattgtatgatgtggatgttcgtacaatcaatgagcatattaagaaaatatattccgactcagagcttgaggaagatgcaactatccggaatttccggatagttcaaaccgaaggttcccgtcaggtgactcgtgatacgaagcattataatcttcaaatgattattgcggttggattcaaggtgaataatgagcgagctgtacaatttcgtaagtgggccaatggtattgtcaaggactacaccatcaaaggctgggccatggacgatgaacgtctgaaaaatggtggatctgtgcttacagtagaatatttcgaccgactgcttgaacagattcgtgaaatccgtctttcggagcgtagattttatcagaagataacggatatctatgctacagctctcgattatgacagaacagcaaaaacaacaaagcagttctttgcaaaggtccaaaacaagatgcattatgcggttcatggtcatacagccgcggagttgatttacgagcgagccgatgcagacaagccacatatgggattaactgtatctgcttatctggacttggcagaggaccgtgcagaacgtcatattccgatgacaatggaggattgggcgaaacgactggatctattcttgatggctgacgatagagcgattcttcagaatacaggcaaaatcactgctgagattgccaaggtagaaccggaaacatctgacataatgcaaatctttttatagcccaaaccgcattcctcggacacggataggcgggataggcgttgaaacatcagaatatgaaagattgatattacggtgctgcgcagaggcgtgattggagtcaataaaatcggctatatgccgtcataattcgaaaggcgagaaactatgtatacaaattctgtagaaaatgaacgcgaattcctgatgtcaatccggaaaagcttcgatgtaaatatgggcgacggagagaccactcttatttgtgaatgtccgaaatgtcatataggatcggtcatatgccgatgcacgcatgatattgcgaatggaaagatccaatcatggaagtttgatgtgtattgcgataattgcggtgagatttttgacctggagacaattagatcggatatttttttcaatgagccgcacaaggtaattgatgagttggagacaccgtttggcagtataaaagtttggataaatggaaagaatgttccttttaggtactgcataacaacatatgacgatccggaggaaggtactttaacccctacggtaacgatgcatatcattgatattgacctttcgcagctgaaggtcggggatgagatattctgtggatttgataaagatcttcttgaatacaatgacggcgatgagcgttcattattgtattcttgtgaaaatgagaaacagattatgggactctgtgcgtatgacccctatgagtgggatctggataattgctgcttccaacttaaagaacgcacttcgaaaggcttcggatattgtatagtttctgatccaaatcaatttgacgagaagaagaattatcaatcaaagatcacttcgttagctgtagcttggctaaccaaagacgagtacaatgatgcggatctggtgatgaatctggccttaacctgtgtgatcggataaaaaaagagacaaacaattcttagaaacactgattttcaaagaggacttaaaacaaatggaactaagaaatttcaaaaaagaagatgctccgattatagccggttggattcaaacagaggaagaattatacaaatggtctgccgacagttttaataagtttccacttacgggggatgacataatcgaaaactatatgcctcggattgaaaatgggcgtttttatccactaacagcaatagatgctgatggcgatgtcgtagggcatctcatcatacgctatccgcgagaagaggatgaaagtgccgttcggttttgttttgtgataatcaatccggctacaagaggaaatggactcggaaaagaactgattcggcttgcaatagagtatgcaaaagaacaactcaacgccgcaaggattgagctggctgtgtttgaaaataacgagagcgcaagacgctgctatgaagcggcaggatttacggcgtatgccgagagcgagtacaaaatgccgataggcacttggaattgtacggatatggagttgcatatcggaggaacaagatagcgggacggaaacttccggcaccccgcaataacctgggtaccgcatcatgagcggcatcatcaatcctttttttaccggttgattgttaaagcggaccattttcgtgtgagcgatgcgtgtgtcggctgcggacaatgcgcgtcaagatgttccctgaacaatattgagcttcggagtgggaagccgcgctaccgatttgaagaattggagaattgtgaagatggagaaattgtatggaaaatgaaattgtgctattcgagacaaatgataatgctataaaactagaggtgcctgttgagggggaaacagtatggctgagtgcaaatcaaatggcagagttgtttgatagagatgaaaaaaccataagaaagcatataaataatgttttttctgaagcagaagtcgataaggataacaacacgcaaaaaatgcgtgttgttggtgtaaagcaaaaggtaccattctatacacttgacgttatcatttccgtcggatatcgcgttaaatctaaacgaggcgttgaattcagaagatgggcaaattcagttctaaaacaatatatattgcagggttatgctgtaaatgataatcgtattgcgcaacttggcgaagtgatacgtattatgaaaaggactcagaatgctctggattcacagcaggtgcttaatgtaattcagaaatacagcaacgcattagagttgctcgattcatatgatcaccagaatatggagcgtcctaaaggaagtgtggcaacatatgaactcacatatgaagaatgcaaggaagttatttctcagatgcgatttggagcagaatcagatttgtttggcaaagagaaagacgattcattcaaaggtagtattggaaacatatatcagtccttttctggacaggaattgtatccgacattagaagagaaggctgcacatcttctgtattttgtaactaagaatcacagcttcctagatggcaacaaaagaatagcagctacgatgttcttgtatttccttgataagaatggagtgctcttcattgatgatgacaagttgatagatgaccatacgcttgttgccctaaccattatgattgcagaatctaaaccggaggaaaaagaaatgatgattacggtaattatgaattgtttaagaccgtaagtcattttcaataagtagttgaaaaatctgaagttatctgggatggaggtgaacaccaagtgaaacaatcttttatatcaattgccattttgataatcattttggttgttttgataatcattttggttgcaacagtgtattttgtttcaaaagcaatgagatacaaaacggaaagagaaaagagtgcaataaagaagagttttatcgcatatctgctgacagatagctggctgataagttggttagtatatagaaagaatgatccaaatgatcacctgtaaagcggattacaacttccagtttgtaagatagtacactttttaaaaagatattcgaggatagtgaattacaggaggattcagttattcgaaaatttcgaataactgctcttgatggaaaaacgtataacacaaatcactattccctggaaatgattattgccgttggcttcaaggtcaattctgaacgtgcggtgcagttccgcaaatgggtcgatcagattatgaaagactacatcatcaaagggtgggttatggatgatgaacggctgaaattgcaaagcttcatgcggaaaccgaattcgaaaaataccgtgaaaccagtaatattgacaattggcctgtttagttatattatttaatcgaaattcggcaaaatagcaaaacgccgaaaataaatcaaacaaaatcgaggtggaaaagatggtaagcacagcaatacttcctgaagatcagaagatcttttccatgcaggagcttaaggaaaaaggcttttcacagtataaggtcagtaagctggtcagtgaaggaaaactcataaaactgaataagagttattatgagaatgcagattatcgtggagaggaatcggacttttattatactgaagcctatgcaccgaagggtgtgatatgcctgctcagtgcagcagtatattatcatctgacgacattcatcccggatgcggtggatgttgccattccaaggaaggctaaggtttccaccatgccggactggccgcaaatgagcgttcatcattatacagatgacagacatgaattgggagttataacggttaaggaaggcgggaatgaattccagatttatgatatggagaaaaccgttgttgatatcgtattttacagagaaaaggtcggaattgaagaaacaaaggaaatccttgtaacttatctgcaaagaaaggatcgtaacctgaaccgacttcttaaatatgcagagctgatgaaatgcgataaagcaatgagacaatatctggaggtgctcgtatgattagtgcaacttcagtgaaggatagattgaagaaccaagcgacagcaagcggaagagcatttcaggagttgcttttgtcatatgggttggagagaaccgtgtacagactgtcgatgtcagaatataaggaacgatttacacttaaaggcggcattttcctctatgctctatttgacggtgagtttgccagagtcactagagacatcgattttctggcaaaggatatgtcgaataatgtggaagatatgaagaaggtgtttgaagccatattctccattgaatgtgatgatgcacttcggtttgatttgggcactttagatgtcaaggatattacagagtttaaggaatatcacggtgtgagtgtttcgatcattgcatatttggatagaacgaaggttccggtatcgatagatattggatttggtgacatcatttatcctgatagagtgaagatggattttccggtattgcttgatatggaagtaccggagattttcgcctattcgatctcttcagttatatccgagaagtttgaggctattgtttctttgggagatgctaatagcagatacaaggacttttatgatatcttcatacttgctgaccgatatgattttgatggaatagaactaaaggaagctatcagagaaacttttgagcatcgtggtaccggattcgacgatatatttgcattcacggatgatttcttggtaagtgaaatccatcagagcaggtggaaagcatttcttaaaaagaagaaagcattagtaaatgtggagctggaaaaggttgtgagtttgattaagacgatgttgcttccgattgtagacagtatagtaagcggtacggaatatacatcaaagtgggatcacacattgcgaagttggaaataaacggaagattggttgttatggacatcgattattatgaaagaactatgagcaagctgtatgaagcaaaaacaattctggacggtttggaagatgtaaaatcaggtaacacggtagatggagatactgcgatttctaatataaggagcaaatatggcatctaaatttggatattggctgaccaaaagagcagaatctgatttggatgggattgtctcgtatatcgcagttgaacttgtagatccacaggctacaacagaagatttgggaggtgacttcggatgccgtttcagattatccgaaacgatattacaaaagtaaaagcagatgccatcgtgaacacggcgaatccggatgttgctgttggcagaggcacggattgtgcgatttatcatgccgccggcagagatcggttgctggcggagcgtaagaaaattggtattatgcatccgggccaagcagcccatacacctgcttttaacctggacgcaaaatatataatccacactgtcggaccggcttggatcgatggcaatcacgatgagcgggagattcttcattcgtgttatgagaaatcgttgaatctggcggcagagctttcctgcaggagcatcgcattccctctgattgccacaggaagctacggattccctaaagatgaggcgctgcagattgctttggcggaaatcgacagattccttctgtctcatgagatggaggttattctggtcgtgctgggccggaaggcgttcgagctgtccgagaagctggtgggggatatagaagaatacatcgatgagcacggcatagccgagcttcatgaagcggagtacggaatttggtacggaagtgaacggtgggagcgacaggagcaaaacaaaacctccgcgatgctgggtgcaccgttatttccggacgtttccggaatgagccttgacgaaattctggagtgttccggggacacctttcagcaaaaactgttcaagctgattgaagagagcggcatggacgatgtcaccgtttataagaaagcgaacatcgatcggaaggtgttttcgagaatccgatgtaagaaagattataagccgacgaaaaaaaccgcggtggcttttgcaatcgcgcttcagctggatatgccggcgatgctggatttgctgtccagggcagagattgcattctctcccagcagcaagtttgacttgatcatcacctatttcgtcacgaacaaggtgtacgatatctatgagataaacgctgcactattcaaatatgggcagccgattctgggggcgtgattctggggagtggaatttgtcgcatgacaaacgaccactccttttccgtattctgatatacttgcagcatcaagagttcgaaggagggttcaatatatgtatggagcaattttaggggacatgattggcgcaccctacgagtttgacaggggaaataaaacaaaagatttcgagatgttcaatgaccgggtgtgtttcacggatgattccgtaatgacgattgcggtggcggatgcgctgatgcgtatttcagatgatgccgaggatgatgatgtgaaaacggcagtcattcagtctatgcagaaatggggaaagaagtatccccgggccggttatggacagagatttttcttttggctgggtaagaaaaacccacagccatacggcagttgggggaatggatcggcaatgagggtctcatcggtgggctggttgtataacagtctggaagagacccgaggatatgcaaggctgaccgcagaagttactcataatcatccggaaggcataaagggtgcggaagcggtggcgtcggctatttttatggcgcgaaacggggcttccaaggaggagataaagaaatatatcattcaggaatttgattatgatctttccagaacctgcgacgaaatcagaccgggatatcatcacatcgaatcatgtcaggaaacggtgccggaagcattgacggctttcatggaagggacggattttgaggatatagtccggacggcggtgtctctgggtggtgactgcgataccttaacctgtattgccgcgagcattgcggaagcattctacggcctcccggataatatgagaggtgagtgccggaaacggctgccgaaagatatgctcgggattcttgatcgatttgatgaacgaaggggtgatagaagatgaaaaagtttgcattgagaaacttggttttactgctgtgtttgacgatggcgatatcctttacgggatgcgcctctgaagccaaaaaggcgatggatgagagtgtggatacggcaaacgaattgctggagaaagatgcagagccatttgatgcggaaacggaaacgacgcttgaaaaggcggtgaaaaccagcgaagaggcagaggatgacgatgcgtataagaaagtaaagaaagatatagataacgcaatcaaagcctatcaagacagcgtgaagcagcaaaaacaggtaaccgagccgaaagaaaaattcctggtggagagagcgaagaccgtcaaaagtgttacagcggtggaagctgccacggaaaaaacagatgcgaatacactcatgaataaaaaaggcggctattacgcatatgtggcgatgaaatcatccctgattgacgacagctatgatgagggagagtctccggtagaagccggcacggaaggcggcgcggtaatcgaggcattccacactgtaaaggatgcagaagcgagggatgcgtatctttccggatttgatggagcgggcatgctttcgccgggttcccacagagtggtaggaacactagtaattagaacatccgacgagctttcggcttcgaatcagaaaaaactggagaatcgcattgttgacgcgcttatcaaactggaataaagtgtaagttctgagattcatggagcaggaaaggcatctcttcggaggtgccttatttcttattacgtgccacttacgtgatggattctttgcataacccctacacagagaaccgacatacgttcacccaacgcacaaaagggaatgataaaatttacaaataaatgtatatagttgcattgttatataagtttgggggtccaattacgtcattgcgtttgccggtgctatgcacccgacaaggagatgagattatgattcaactgatagatgtaacgaaagcgtttaagaacaacgtggtcctggacgggatttccatggattttcgggacggggagctgacggtgctgatcggccccagcggatgtggaaagacgaccacgctgaaaatgattaaccggctgattcccgccaccggcggccgtattctcatcgatggagaggatatcgaatccatcgacaaggtgaagctgcgccgaaatatgggatacgtaatccagcagggcggactgtttccccatatgaccatacgtcagaatatcgaaatcatcgagaagctggaagggaaggatgagtatcagatcctgaagaatacagagcggctgatggagatggtggatatggatgcggaaaaattcctggaccgatatcccagcgagctgtccggcgggcagcagcagcgaatcggcgtcatccgtgccctggccaacgacccggattacgtgcttctggatgagcccttttccgctctggatccgctgaccagaagttccttgcaggatgagctgtccgacctccatcggaagatggggaagaccatgattttcgtcacccacgatatggacgaggcgattaagattgcagatcgaatctgcatcatgaaggacggccgcattctgcagtacgatacgccggaagaaattctgcgacgtccggcgaatgattttgtggcgaacttcgtgggcgcgaaccgaatctgggggtcgccgaagttcattcgggtggaagattttatgattcggcatccggtgacctgcgatgcctccctttccgcggagcgatgcatcaccaagctgacgatgcggcacgtggatacgctgctggtgaccggaaaagaaggacagctgctgggcatcgtgaaccggaaatccctgtacgccaaccaccggccggacaagccggcgggggagattatgctgccgccgaaatgcacagctcatccggaagacagcattctggacgtactgaagatgattgaccggacggatgccagcaacgtgccggtggtggacgccctgggcagggttgtgggactcctgaccaacagtaatctggtttcgacgctgagccgccagtatctggaggatatgacggaggaggtgcatggcaatgattaagatgttcgaatacttcggagcccattcgtctcaaatctggaagttaacgttagagcacattgaaatgactgcaattgcggtgtgcatcgccgtcctgatcggcatgccgcttggaatcctgatcggctatgtgcgaaagctggacaagccggtgctgggattggccaacgtggtgcaggcgattccgagcatggccctgctgggcctggcaattccactgctgggaatcggcgtgctgccggccatcgttatggtgattatctactcgctgttgccaatcgtgaagaacacctataccggaatttccggaatcgatcccctgatggtggaggcggccaacggaatcgggctgacgccgagacaggtccttaccaaagtgaagattccgatggcactgccggtgattatggccggtgtgcggatttcggcggtgaccgcagtgggcctcatgaccatggcggcatttatcggagccggcggcttggggtatcttgtttttgcgggaatccgaaccaccaataactaccagatcctggcgggagcgattccggcgtgcattctggcgttgctggtggatttcctgatgggcctggtagagaagctggtgacaccgatcagccttcagaagagtggcggcctctctcggaagcaaatgaagcggaagcgcagaagggaaaagctgacactggggaccgcggtggtcctcatctgtgccatcatcgtgggcggggcggtgaacagccggcttgcgggacgggaaaaagaaattaccgtgggcggcaaggattttaccgagcagctcattctggtaaacctctactccgactatatcgaggcgcataccgatataaactgcgtgcggaaggaaaacctgggaggaagccaggtgtgctaccaggcgctgaagaagggcgatatcgatatgtacgtggattacaccggcaccctgtacggaagcgtgctgaagcatgacggcaccgacgatatggaaggcgtgtacaacacctgcgtcaaggagatgaaaaagaagaatatctccctgacccggcagtgcgggttcaacaacacatataccttggcggtgagtaagcaaattgccaagaagtacaatctggagaccatccgagacttggtgcggaaatcctcccagctccatctggggtgcaccctggaattccagaaccgtcacgactgcatcgatgcactgaaaaaggtgtatccgagcctgaagttcaagaagatatcggcgatggacggttcgccgcgttttgtggcactggacaataaggaagtggatgtaatcgatgcctttgcaacggatggaatgctgatgaaataccatctgaaggtgctgaaggatgaagaccacgtgttcccgccgtactatgcggttccgtgtttcaattccgataccctgaaaaaatatccggaactgcagcgggtggtggacgagctggcgccgaagctcaccgacgaggtgatgatgaagctgaactatcaggtagatgtgcagggaaaggagccgaaggacgtggccagagcgttcctggagcaggagaatttaatctagcacacacccagcggattgtaaaaaaatcgtaaagcatattgaaagcaaaacgaaaatttggtagaatactaaagctaaaagggagtagctagccgaaagtgttcactttttcgtcagtacagttatttgataataactcggaaagtgattaaatagcgagacttttactgttggatgcagtaggagtctctttttttatgcttattgcctactgcaagggaataaggaaagcgaggtagaaaaaatgttattacaggcgggtgttttgatcgtcggatttgtttttctggtaaaaggcgccgattggttcgtggaaggatcggccagcattgcgaagcggctgggaattcctcagctgatcatcggtctgaccattgtggccatgggcaccagcatgccggaagcggcggtgagcattaccgcggcactgaagcagaatgccggcatcaccatcggaaacgtggtaggaagcaacattctgaacgtatttgttattttgggagttacagcgctgattaccaatgtgacggtgcagaaatccaccctgaaatatgagatgccgttcatgatggccatcactgtggttatgctaatctgcggaatgaccggcggaaccgtcaccttcgcagagggcgtcgtgctgtgggcactgtttatcgcatatctggggtacctgttcgtcatggcaaaaaaaggcaccgatgaagaggatggcgatactcccattcacccggtatggaaatgtcttctgctgatggtagtcggcggaattctggttgtaaaaggaagtgattttgccgtcagcggggcgtccgagattgcccggtatttcggaatgagtgagcgtttcatcggattgaccatcgtagcgctgggaacgtcccttccggaactggttacttccgtgaccgcagcgagaaagggaaacgcgggaattgccatcggaaacatcgtgggcagcaatatcttcaatatcctgttcgtcatcggcacaaccgcactgatctgtccggttccgtttgaaagcaagttcgtagtcgataccgcgattgcgattctggccggtgtggttctgtgggccggcaccgtaaaacacaaagaattgagaagaccctgcggcattgcgatgctgttgttctatgcgggatacttcacatatctttgtttggcgtaataaaaaaattctcatcatcggaaacgtccggtggtgagtttttttatgattttataaatttgaaaatgtgaagtgaaagtgttttattattcgtatttgtcaagctaattataaaagtgtcatgtttttaaatttcttgtatccttttttaaacatatagtaatttttcgatgtaaaatggacaataaattaactatataggtgtgagtataaagagatttctgccggtgtgaacaatgtgtgaagaatgtgaaaaatgaaaaaagcacggcgaccgttttttaaacgaatatgaaacccggtataaaaattattaatagcaaagcgttttttaattaataaaagtgtaataattatttaacaaactatctgtttttcgagggtttcatccttttgacgagggtattaattggtgctataatcattaaaaatgttatgcataagtattgttttcaggcatttggttctacagatatcggaaaacgtggaatgcgcatagaataggaggttaacagtctatggaattgcagattcacgatttggtttcatccatccgcaaagagggtgtcgatgcagccaatgaacaggcagagaagattatcgctgaagccaagcaaaaggcggaggagattatttccaatgcaaatgcagaggccaagacaacaaaggaagctgctacaagagaaattgaaacactcagagagggtgccatcgagaatgccgagcaggcaaagagagatgccctgatttcctttaaaaaggaagtattgggtgaagttggcagaatcctggaggcaaaggttcgtgaggacctgaagggagaagctctgggtaagctgattaaagccgttgtcaatggtgaggatatgtctcagtatgcagcagaagtggcagaagtcaccgacgaattgaaggctgcgcttgcggaggaaatccagaatggccttgaggtcaaggttggaaagggagttgcttccggattcaagcttgccgcaaaggacggttccggttacttcgattgcaccgatgaggagattatgcagcttttaatgccttacttcagagagatggatttctaagaaccgggaggtagagtatggcttcgtattactacttaatttcaagcctgccggaactttctgcgaacgaagagatgccaatcacctacgatgaattcatcgcaatgtgtgaggacaacgtaagtgacaagaccttggagcgtttgaagaatctgactctcgattctgcagagggtccgctccttaagaaatggtccgaattctatacgggtctgttcagggagctgaacgcgcagcgaagtgccgctcttggaaagtcctatcaggctgaatatgagaaggatccggagagtacacagattgcacaggctgcaatcaccgccaaaaatccgctggaagcagagaaacttcttctggtgcgccagttcgaagcattggattactacaccggcggtcacttttttgatgacgtgtgcttgttcggatatgcgatcaaattaaaattgttggaacgccagagttgctttgttaaggaaaagggagaggcggaattcaaacgtctcttcgataatgtacaacatagcgtttataacttataacaggagatatgcaaatggaaacagtaacaggttatgtgactggcattaacggcaaccttgcaaacgtaaagtttgaaagtgccgtacgtaaaaacgaagtagcgtacatcctcgttgacggaaagcgtctgaagggtgaggttattcgtgttaataacggaattgccagcatgcagatttacgagatgtccaatggtatcaaggttggcgatcctgtagagtttacaggggagctgatgagcgttgagctgggaccgggactcttgacacaggtattcgatggtcttcagaatccgcttccggaactggcggaaaaatgtggcttcttcctggaaagaggtgtgtacctcgatccgattccggacagagaatgggacttcactccttgcgtaaaggtaggtgattcggtagaagccggaagcattatcggcagcgtaccggaattccagttcaccaaccagattatggtaccgttcacgctgaagggaaccgattggaaggtgaaatccatcgttgaaccgggcatgcatcacgttcgttccacaatctgtgtaattgaaaacagcaagggggaagagatgaacctgagcatggttattacacagccgattaaacaggcaaacaagtgctacaaggaaagacttcgtccggatgaaccgctggtaactcagctccgtgcaattgatacattcctgccggttgcaaagggcggaacattctgtatcccgggaccgttcggtgcaggaaagaccgtacttcagcacagtgaggcgaagaacggtgaagcggatgtcgttatcgtggcagcctgcggagagcgtgccggtgaggttgtagaaattctgaaggaattcccggaactggaagacccgaagaccggtcgttccatgatggagagaacgattatcatttgtaacacgtcctccatgccggtagcagccagagaggcttcttgctacaccgcagtaaccctcgcagagtattacagacagatgggtctggacgtactgctcctggccgactccaccagccgttgggcacaggcaatgagagaaatgtccggacgtctggaagaaatcccgggcgaagaagcattcccggcatatctggagtccaccattgcggcattctatgagagagccggaaaagtaagactgaacgacggacgaattgcttccgttacaatcggcggttcggtatccccggccggcggtaacttcgaagaaccggtaactcaggcgactctgaaggtagtcggtgcattccacggtctgacaagagagcgttccgatgcacgtaaatacccggcaattcacccaatcgattcttggtccaagtataccggtgttgtagatatggatcgagtagagaaggcacgctccattctcagaaagagcgtagaagttaaccagatgatgaaggttgtcggcgaagaaggtacatcctcagaggattacacattctatcagaagggcgaactgttggatgcagtatacctccagcagaactccttcgatgaaatcgacgcagcatgttctccggagagacagcgtatcgagttcgacatgatgtacgacgtaattaataaaacctatgatttgcaggataagaaggaaatcagatctttcttcaatcagcttagacaggaattccttgactggcatggaaccgtcttcggtacaccggaattcgaggcacagaagcagaaggtttcagatttctacctcgctaaagcggttaactaggaggcaataagatgcagaaagtatatacgaaaattgaatctattgtcggtaacgtagttacagtaagagcggaaggtgttaaatacggagacctggctcttgttggtgacagttatgcgacagtaattaagctggataaggacttggtgtccctgcaggtatttgcgggtgctcagggtgtcggaactagcgatgaggttcgtttcctcggaaagccaatgatggtatccttctcggataatcttctgggaagaatctttgacggtgccggcgtgccgagagacaacggtccggctctgacggagaacatgattccaatcggcggaccttcttttaacccgtcgaagcgtattctcccgaacaaaatgattcgtaccggtattccgatgattgacctgttcaatactctggttgagagccagaagctcccaatcttctccatttccggtgaaccatacaaccagcttcttgcaagaatcgctcttcaggcagaggttgatgtcatcatcctgggaggaatgggactgaagtacgatgactacctgactttcagagataccctggagaagggcggcgtaatgggacataccgtaatgttcatccacaccgcatccgacccaatcgtagaatgtactctggtaccggacctggctctggcggttgcagagcagttcgcactggaaggaaagagagttctggtactgctcaccgatatgaccaacttcgccgatgcccagaaggaaatgtcgattacgatggagcaggtaccatccaaccgtggatatccgggagatctttactccagccttgcttctcgttatgaaaaggctgtggacattgaaggtgccggatccattaccatcctcggcgtaaccacaatgccgggcgatgatgtcactcacccggttccggataataccggatatattacagagggtcagtactatctgaagaatggtcacattgagccattcggttcgctttcaagactgaagcagaacgtaaacggaaagacaagagatgaccatcgtgctgtaatggacggaatgattaagctgtatgcacagtacaaggagagcttggaaaagaaatccatgggattccttatgactgaatgggacgataagcttctgaaattcggaaaacttttcgaagagaagctgatggatcttagtgtaaatattcctcttgaagatgcgctcgatcttggctgggaaattcttgcagaatgctttgagccgaatgaaaccggtctcaagacaagtctggttaaggaaagatggccaaagaaagaagcactggactaaaaggagcagacagtggctatcaaacttactaaaaatgaacagaaagtgcagaaggaccttctgaaacagtatcagcgctatttgccaaccctgcagctcaagaaacagcagcttcagcaggtaatcatgacaacgagagctgaattggcacagaaggaagctgaacgtgttcagatgattggtaatctcgacgattgggtagctgtatttgcagaaaatgcgatcttcgacgaggacaagagtattgacacacttgttcagccagagacggtgatctgcagaaacgaaaacatcgccggagttacggttccaaaattcgaggagctgaaattcaaggatgttgagtacgatgtagatgactatcctctgtgggttgatactgcactggtaaaacttcgcgaaatcgcgcgactggatgcactggtttccacccttcggaagcaggaagcacttctggaaaaagaacttcggtccacatcccagagagtaaacctgttcgagaaggttaagattccggaagccaaggaaaacatccgagtaatcggagtatacctgggcgaccagcagacggcggcggttgttcgcggaaagatttcaaagaaaaaattggtggaggcggcacaatgatagagaaaatgaaaatggtctacgtcgtgtcatcgctttcacggaagaaagagatgctcgatggacttgaaaagctcggcgttttgcatatcgctgagaagaagggcgcggttcatgccgtgacagagaagttcaccgaactgtccagattgaccgcatcccttgcggaatatctcccggacaaaaaagaacagaagaaccgaccggcgaagccgttgcttcagggtgaagagttcgagaagttctacggtgaggtgaagggagccgttgaaaggaaggaagctcttgagcaagaactgtcggttctgcacgcagaaatcgagagggtttctccttggggggatattacctcggaagatcttgaactgctgaaggaccgcaaatacgatctttatttttaccgcgtaccggcgagcacctatgcggccctggcggcagatgaagaacgtcaggtgattcacctgaaggacattaagaaggaagtgctgattgcttccatcggaacgcttccaccagagttcggtgcaagtgagttcaaccttccggaaaagggagcgaaagagctcgc

SEQ ID NO: 2951 - DNA, 4543 bp, Unknown
  16S sequences of unknown bacteria
tcgatcggtaccgcagtgcacaggagttgtatgacgcactggcagaactgtccggtgagcagacggatacggcttcttatgcgattcctgactgtccggtggacatggcttatcggaagagagtcgcttctggcaaagcaggacacgccgcagcgtctgcgggagctgcttcgggagactcagattttgacgatctttttgcggcaatgaatggggagcaatcaggtactgggacattttcttccggcagtaaaaatgcgacagatacatcctttggtgcaggctattccggcaagaccgaaggcaacggctgggatgatgcgacgagcgcgacgatcggtaagccgaagtcgaagaaaacatccggagcagccaccggtactgtgagtcggcaggcgcagtcggctatcgacaagacgatgggcaagaccgcggcgtaccagaagcaggagaaacagaaaaagcagaaaaaacagaccgccagggaatttatggaagaagagaaaaaggaaaagaatgacgcagattttttaattgtggtctatggtgtgacatcggtgctggttttgttttgtgcatttatgagcagtatcggtgatgtgacccgcctttcgtctgtagccagaaatacccgtcaggaattcctgtacagaaaaggactttatgaggttggaatgtctgtgtttgtatggcttgggctggcgctggccgttgattttgtaaaaacatggaaggcgtcaaagagtattaggataatcggcccggttttgcagattcatgcgattctgacagcaattataatgctttcagaagatctctatacacggaagatcggaaaagaattcttagacccctatactattggcgatactattggcatagtgatcatgtcggcgatctgcatatacttttttggcggtgtcgcatatttgatctgggaacttttgaaagcagaataagcattttctatgaggtgaacgtatgaaaaagaaattattatgtgtattacttggaatcagtatgatcggaacgatgccggggtttatggcaaatgccgaggagcctgctacggaagcagaaagcatcctgaccggtaactatgaaaagcagcacagagaggtgagaaatccggtgtaccgggaagcggcgacttcttttgcgggcggggatggcagcgaggaatcgccgtatgagatcagttccgcggaagaactgcagtatctgtcagatttgctgtctgatgaggagaaccggagcagcgagtaccggaaccggcattatatcctgaccacagatatcagtctgaatgacacgtctgactatgcaggctggagcgaggcgggaccggaatatgactggagaccgatcggagtcgcagcggcatttggcggcgtgtttgatggaagtggccacacgatcagcgggttgtacataaacgcagacatggaagacgacaatacggcagatgccagaaagaatggcggattgtttgcgcagatattcggcggcactgttaaaaatctgaatctgaccgaggtatatatagaagtttcaggagatgcgctggatacaggcgcgattgccggttctgcatccaaggcggagatcagcgactgtaccgtggacggactggtgattgggtatgaggactacacgggtggtttggtcggaaacgcgagcggtacgatccgcggatgcgaatttgacggaatcgtaagagcagcaaaggatctggacaacgatcaggctggtcaggcttacatcggcggaattgtgggctccttcgcctccgttccgtcggtgggtgatgaagaagagaccgagtcattttacggaatcaccgactgcgtaaaccggggaaatgtggaagttttaaagggaagtgcgtctgcaaatgcagccggagggatcgcaggtacaaattccgctaagatcacaaactgtgtcaacgaaggaacggtagctgcaaacgccggaggacagacggaggaaaaaggaacggcgtctttatcggtcggagggattgtcggagtcttcaatgtgtttggcatcggagaagacggtgtgatcagcgactgcaagaataccggaacggtcacggcggatgtggcaaatgtcggaggaattgcaggagaggcgtatctgggcgatccgagataccaggcgacgatcgagcattgccagaacgaggggatcgtatttgcggcaaatcattattatgcaggaatcgtagcggatgtcggaatcaaggcagacaatacgtttgcgattacggactgtacgaatgagacggattttacagaaggagaaggcgccggaatcgtccatcatcttacaatgcagaaaggaacgatggagatttcggacagcgtgaatcacggcgtgatcacttcgtccgggcagaatgcggcaggaatcctctgctatgtggcgaatatggcagatgactggaaactgcaggtcgaaaactgtgagaatacagcggatattacggcaaaagaccatgtcggaggaattgtgtgctttaccgcttattataagagtcaggaaggaaatgtaaacacctcttttgcaattagaggctgtaagaacagcggcaatctctcaagcgcgaccacgaacggctatatcggaggcattcttggcgtcgacggatttatgagaactccgacggaagtttccgattgcgagaacagcggggatatttcctttacaaaatcatgggtgatgggcgaagaagatctgaagacagtaaatgaaaacggcgaacaggaggatgcaaagctgttcaccctggctgtgatgggcggtggaatcgtcggaagaatcggcgaagccgtgctgctgtccgtggacgcggatcaggctgacccggaggagatcaataaggaagatgcgcttgccgtggtgcaaaattgcaagagcagcggtgcattgaattatgaagagccacagcagggagcgggtgtgaccgaagaagaattccagaaagcaaaagaagcgaactggaaggtcagcatgggtggcattttaggagactgctcctgtagagacgggtacagtgtgcggtttgaaaattgtacttacgatgcggagcgcggtattggaaattccgaactccctgatattgaataaatagtaaagtatgcaaggcggcggcagaaaaacaaattttctgagccgcctgttataatgggcttatgaaaaacagttgccaaattataattgacatcaatacagtactactttaaaatgagtgaggaacatcaccggtgaaccagaaagccgaagcggatatcagcaatctgctttgctactcacttgattcgattaaacataattgacagaaaaggacaattattttagaatgaaatagtgaaacatgactgacaaagtcaggaggtcggacgaaaatagcaagtggaagattcgtctgagccggagtcagtaaaaagaggagatacagggatggaagataaaatgaatgtccgccttccgtggccggggtggacggtcgtgaagtatttgggcgaaggcggctatggaagagtctatgagatcgagcgggagctttccgggatcaaagagcaggcggccttaaaggtcgtgtcccggccggcagatgatgcagagatcgaggcctgctatgaaaacggctacgatcaggcgagcatgaaggcttcttatcaggaagagcttcagagatatgtgaaggaatatcagctgatgaaggagctgcagggacagacgaacatcgtcagctgtgatgattttgcagtcgtaccgcgcaaggacgggatcggcggacagatctttatccggatggagctgctcacaccgctgaagaaggcgacgatgcagagcatgctcagtgaatcggaagtcatccggcttggaaaagatatctgcaaggcgctgatgctctgcgaggcacggcatatcattcaccgcgatatcaagccggagaacatcctggtatcaaaattcggtgattataagctcggcgatttcggcgtagcgcgggtgcaggatcacacgacgaaagcgacgaagatggggacgcacggctatgcggcaccggaggtcgagcacggacacaaatatggaaaagaagcggacatttattcccttggtatcacgctttactggctgctgaacaaccggcggatgccgttcttaaatgcggatgaatcagtcaaggcgatgaaaaatcaggaggcactgcgccgccgctatgaaggcgagaagcttccggctccgaagaatggaagtgcgaagctgaagcaggtcgttctgaaggcgtgtgcataccgcccggaggatcggtatcgcagtgcacaggagctgtatgatgcgctttctgaactgtccggtggacatacggatacggcttcttatcggaagagtgtcgcttctggcaaagcaggacacgccgcagcgtctgcgggagctacttcgggaggttctgattttgacgatctttttgcagcaatgaatggggagcaatcaggtactgggacattttcttccggcagtaaaaatg

SEQ ID NO: 2952 - DNA, 2523 bp, Unknown
  16S sequences of unknown bacteria
gaccgcgccgtctcacgggtgcttgcgcccgggagattcgagcgccggaggcgatcgaacccgcggacacgcagactatgcgaagaactttaccagctacgtagcaactggtgaaagacgcaaacagatgcgtgcttaaggcgtaagccgtgaattgtgtggtgttgccttaaatgttcagaaaataatcaggcaaaagcaaccccgaatggggagaaagggagctttcgcaaaggaaagcacaggaccgaaaatgaaaataccgcagccattcatcccgctccgagccgagacaaatgggctcgagcacaccgtccacgtcatagggcgcgattacacgatcggcgctgacggaatgatcacctcgataaagtcggagggagtcgagcttctcgccgctccgatgcgcgttgtctcggtcgaagacggcgaaccgtcggactgggacatgaattaccccgagaacgagtccgagagcttcattcagcgccgttccgacgaggagatagtcatctgcggcgcgaagcagtcggatcgttttataatcgacacctgctataagatcgactacgatggctgtatcgacatcgacttcaagctgatgacccgcggcaaaacggtcgcgcaggtcttcggaatcgccgagacaaaaccgacgctcttcaagctcgataaactctggcttgagattccgctgcgcgccgacgcgacgacgctcttcacaagctatccgaacagcgcgatgtggcttgccgacggcactgaacgcccatacaccgatatgtcgatgagcggaaagatcccggagcagacggcggcaatgccgtttaaggcgcttctctggctcggcaacgaggagcgcggactcggttggttcgccgagagcgacagaaactggcagccggtctcgaacaccgacgcgatggagcttgtccgcgatggcgacacgctgattctgcgcgtcagactgctcgacagccaccccgtgagctggagtgccgacccgaagaccggactttacgcttacacgccgataaccttcaacttcggactgcacgccacgcctgtcaagccgtttccgaagcagccgtatatccacaacgccttccacctcgactgcggaatcaaggtcaaaggcaattacatcgatgtcctcgccgggcgctatgacgagctcaaggaaaagggcgtcacaacgctgattctccacgagaagtggaacaaatcgcagaactggttcgagctgagcgagtttacgaagcatcagatcacgacgatcaccgacgagtgtcacaagcgcggaataaaggtgctgacctatttcggatatgagctttcgactatgtcgccagagtggagcgagcttgaggatgaagtgaccttcagagacgcgcaggggcggctctcgggcggatggtggcgggttccgttccagagggattatgtcgtatgctataactctgagtattcggatatattcatcgacggtgtcacgaagatcatggacgagtgccacaccgacggagtatatctggacggaacgcaccacgcgcggctctgttactcgaccgagcacggctgcggatggtatgaccacaatggcaagctgcatggaagctactgttggaaggcggtgcggaagctcttcaagcggctgtacgatgtggtcgggtcgcgcggcggagagataaacgtgcacgcgttcggatttgtgaactttacggcgataccctacatacatcagaactggtacggtgagaatctgcaattcgcgctgatgaagggttcgaccgccgacatggatcttgactatttcagagcagagtacatcgggcggaatatcggcgcgccggtcgagttcatcgcgtatgagaaccgtccttactggacattcgagatggcgctcgcgtcgtcgcttctgcacgggatacttccgagaccgaatgatatcggacatccgctcgagttgatgagcagtgtatggaaagtgatcgacggattcccagtcgacaagtcggagtggctgccgtactggaagaacgacgtgaagatcacgcatgataaggtgaaggtcagctattaccgctacaccgatcttgcgggagacgtgcagatactggcgttcgtcgtgaacatttcggcgagcacggttgaggaggtcgtactcggtttcagcgatgaggtatcgacggcagtcgatacgctgaccggcgagaatgtcgggttcaggttcgggcttggcggatacggttgcaggatactctttgttaagtgagctcgtctgagggcattaagaataagctgatcaaatcgtttttttgcgctggtaaggcttgaatttatgggcttttcagcgaaaaaaacaacaataaatcagcgttttctataaaccggagttaccggcggtgggtttgatccgccccacgatagtttttgaaagagggggaacgctccgcgcatccgcgcggtgcgttccttttgtacggtccaccgtgtccggctccgcgccattcccggtcgccg

SEQ ID NO: 2953 - DNA, 28049 bp, Unknown
  16S sequences of unknown bacteria
tacggacagatttttaccggacaaggccgctcctgagccgcccgcagaaaagcgcacccgctataagtgctataatcggcagctttgctccgcaaggaatgaaagttgtcgtcattatagtcatttttctgtctctgtcgctttcaattgtacgggaagccattattcccggaacgccgcagcctgtacctacgagcatcggaataaacgatttgcctgaaagtccaaacttacggaaaattctatccattatgaatgctacacgcgccatatatccgcagccttcgagtatcgcaaggaatataaagagaagcagaatctgcggaacaaatccgagtacagctcctacaccacctacaataccatcgagcacgaggctgctgagccaatctgcgcatcctatagcattcagtgcattttcgaaaaataccggaattcccggaattactatactttctatcccgaagagatgccattcttcaccgaacagtccatcgtttgcccaatctgtgagcacgcctccaagtgtcgttaccgatacatagtacacaattgtcattactattgcaaaaatcggaagtgctgcccatctgtttgtaacaattctgtcgattttatccgatgtagtgagcgcatccttgttctttttcttatatgcgcctcctattacttttcctatgtatacatatctttcatttgtgataatgctctcggcgtcatcatccagcgcagcttcaacctctgctatgatattttcggccttagctgcaagatttttggctgtgcccgtgtcgagcatatccataatcttttcgtctctttcaaagatcttaaccgcataaaatctcttctgattagcagcaatctgtgaaggaagcagttctgatatcttctctatcgcctcttcaatttctgctgcaaagatctttttcggtgctgtatttcctttcgcagctgaaactgccgctgccgccgcttctttaataccgcttccctttaatgcggaaatttcatataccgggcatccgagttctgctgaaagttttcctgtatctatcttgtcgccccttttttcgactacatccatcatatttacagcaatgactaccggaattccgagttctgcaagctgtgttgtaagatagagatttctttcaagatttgtaccgtctactatattgagtattgcatccgggttttcgtttatgagatactttctcgctaccacttcttcaagtgtatatggtgaaagcgagtaaatacccggtaagtctgttatcgttacatctttatttcctttgagttttccttcttttttctccactgttacgcccggccagttacctacatactggtttgatcctgtgagagcgttaaaaagtgtcgtcttgccgctgttcggatttccggcaagagctattttagtcgacattttcttttcctcctaataatcgaaaatttttcataattccgttttgctttaaatattaaaataaattttcccgttcgttagccttagctaactcaaggcctttaaaaatgcagagctttgcctgtttttaaaccggcgtgcctctgctatgccgtcgcacccttgcccactacttcaacctcaatcagttccgcatcggcttttcttatggacagttcatatccccttacggtaagctctatcggatcaccgagcggcgctacttttctcacatttaccaaaacgcccttggtgattcccatatccatgattcttttctttgttgcgccttcgccgtaaagcttcaaaacttttgccgcttgtccgtgcttaacatctctcaaagttgtctttccgcttgtttctaaactcattttgcatctttcctttcttttttatatactacgaaatgcggagagctcctgccattccgttttatatcattatcttatttgccatttccttgcttatggccacgcgcgcatctttaatgctgactatcacattgccgttcatttctgaaaccacgcttaccgcgctgcccgcaacaaaaccaaggttttcaagaaaccttttcgtttcttcttttcctccaatttttttaatatagtttgtttctccttttgcagccattgtcaggggcatcatatccaccatcctttcagtttgcgccttacttttttcgtttatgtacgattttattatatgcaaatatgttagctgatgctaacctcggtttatatgttaccttacgctaacctaattgtcaatacttttttttaatttttttagcaaagctttacaaataaaaaaacggcttcaaatccgaagccgcattagctttaatataaaacaatatctttgttccgcaatcatcagtcctcatcaattttatatccccagtgattggaaataagcttataaagctcgtcctttttattttcacgcataagttcaaccatctttctatgatcatcatttgctatcgccagatgcttgtaaagctgcggcgcatctatataaaaggtagaaagtacatattttttgtttacataatctattacttcacacagcggatggttaggacacagcttttgataataggcgtgaaatttttcctgcatatctgaatagcgctcaaattcttgattagcaataaattcatccatatcgtctaccatgcgctcgagcacagcaaagtcttcttcctttaagagtggcgctgcatatattgccgacaatccgtcaagatgtccgagtaccgtgcaggcatcagccttttcttttttgccaaagcttcttacaaaaaatccctttcttgctatattgacgagcacatcatcagacgcaagctgcaggagcgcttctcgtaccggagtgcggcttataccaagctcttcaacaatttcggattcatctacctttgttccctctttcaaattgccgtatttaatctgttctattatataatggtatgcctgttcggcaagcgtcgcttttatcatgttgtaccatccatttcttaaaggttgtatttattataccaaaaactttatgtacaatagtatatccaaattttttatcttttgcaacttaattttctgaaaataaacataattttcttaaaacctgcacaaaaaaattttttataaacttattgcaagtactgatattttcagatataatagttcccgtgtttcgtaatattcaatatattatatacgaaaatgttttactattatttctaaatttttaggaggaaagaaatgaaagaaaagaaaaagtttcaggccccttccactccagtacttatgttaatattgattataattctttcaatattaacttacatagtaccggcaggaagctttgaccgtatcgaagatccggaaacgggcatagtaaacatcgatgttgaatctttccactttgtggacagggatgcgtctaacccggacggtcctcagtcagagggtccttttcagatgttcgtcgacatttatgacggacttgtaaacgccgcagatcttatattcctcatctttatcggatgctgggtagctatcattctcacggaaacaggcgcgtttacaggctttatcaatgccgcaagaagagcgctcaagacaaagacggcgctgcttattccgggctttatcgccgtttatgccctcgatggtttccagggcgagatggaaggtctttaccctttaatcggagtatttatcggaatgtgtattgcgctcggttatgacgctattgtaggtatcgtaatttccgcggttgccgccgttatcggttttaatgtaggcggtatcagcttttacaatacaggtattgctcaaactgtaagcgggcttccgcttttctcaggtcttggcttccgtctcattgttcttgcaattacagttgttatctggattgcttacacacttgtatattgccgcaagattaaaaaagacccgagcaaaagtgtcgtttacgatctcgatttcagcgatatcgcatcggatatgtcggatgaaggcgctccgtttacatggcagaataaaatttcacttatcctgtttgtggcaatgatcctctgggttgtttatgcatgccagaagcttggctggtatttcagtgaaatttcaggcctttatattattcttgccatagttctctgtatcataaataaaatcaatatggatcaggctatcgggtatctcgtcgattcgttccacggaatggcttcgggctgtcttgttatcggtatggcgcgcggtctcaacatcgtgctcacttcatccggtatgagcgacaccatcgtatactacctgtatctcttagtacgcaatctcccaagctgggcgacagcatccggcttctacttcctgcatctgcttctcggatttattatgccgtcggcaagcggtatggcctcaactacaatgcctatcattgcgccagttgcagacctcgcgggagttacccgtcagacagcctgcctcgcatacagcttaggacacggatacgcacagcttctctggcctactaacagtattgctattatctgcggactttcaaagattcctctcggaagatggtataagttctttatgccgctgttcgttattctttcggttgccatctgtctgatcctcacatttgctactatcacacagtggggtatcgagcttcagtagacataacaaaatcataaattatcttgctgcaagaccataagatatttagatttgtggtataatagtttatatgttaatgaaaggagataacaaaatgagcttgaacagtttaatcgacgcagctgtcgaaaaaaataacgacacactcgtaaaaagcttgcaggaacttatccgtataaacagcgtatactccgatccaaagccggggatgccgttcggtgagggtgctgcaaaagctctcgaaaacgcgcttgcactctgcgcaagtctcggcttccgcacaaagaatatggataattacgtaggttatgccgaaataggagaaggcgaagagatgctgggcatcgtagttcacctcgatgtagtgcctgagggcagcggctggctctatccgcctttcagcgcaactattgcagacaataaaatgtacggaagaggtactatcgacgataagggacctgcggtttcatgtatttatgctgtaaaatccattctcgacgcgggcatcgtgccgaataagcgcatacgcattatatttggcgccgatgaagaaactgcttggcgagatgttgagtattatgcggcagcgggtgaagaaatccctacatgcggtatagcgcctgatgcaaacttccctgttatttttgcggaagaagctcttctcggttttgagctgagaatgaacaggaaagcatccggcatcgaagaaatcagcggcggtacagcaacaaatgcagtgcctgacgcctgtaaagcagtagtcctcgataaaaacggcaataaaattacggttgaaactgttggcgttgccgctcatgccagcttgccgcacctcggcgaaaacgcaatctcgaagcttatggaagagctttatgccaagcacgaaagcggtgaaataaactgccctatcgcagcattctatcacgataaatttggaatgtgttactacggagaaaacctcggatttgatgtaacagacgacagcggcagattcacatgcaatatcggcaccgcagctgttgacggagatgaaattgtcctcggcgtagatatgcgtgttccggttactcttaaccctgacgatgttgtagcaaagatgaaagagcatatcgctccttatggtcttaccctcacaggcgagggctgcactccatcggtatttatggataagaacagcgaaatgataaaaactcttatgagcgtatacagccaaatcacgggtgatactgaatcagaaccgctggcaatcggcggcgcaacattcgcgcgcgcatttccaaatacggtcgcctttggcgcacttcttccgggaagaccaatgacggagcatcagaaaaacgagtttatcgaccttgatgatcttcttctaattacaaaaatttacgctcaggcaatcgcaaaactcgtagagtaacaaaaacatataaagagcaatgctcggcattattccctgcattgctctttttttatctgatttatttttgctcatctaaatacatacgcaaaggtcttactgttgtcgcagaagccgcttaatcctgcctgcatacttgatagtctcggcattttccgtctattagcttatagttgcactgtcatcataacatctggactattactatccttgccgcttttagtaagatccgggtcacgcgatcagttttgccttacagctcatgcatcatatcctttgtcgcatcgtaaagcctgttaaatattttataatatttctgatatttttcatggttttctgcatttggtttatacgaaacgccttctgttatataatttctgatatcagcaaattttgaaatatgtcccgtggcaatggctgccatcagtgcatcgccgtaagccgcgcctatcgttacattggccgtatgaatttcctcacccgtaatatccgcaattatctgcatccaaattggatttttcgtacctccgcccgcagcaaatattctctttggcgccgcgccgttttcacgaaatatcgccagatgatttgcaatgctgtagccaatagattcaagcgccgaatgatagatatgcgcgcgcgtatgctgcatgctgagtccgaatatcatgcctttagctttaggatcgtttatcggcgtacgttcacctgcaatatacggcagcgtaataagtccgtctgagcctacaggaatatcctcaagccctttcatcatcgtttcgtatgcatcaggaccacccgccttttcgagctcgagcgcatcgaagaaaagattgtctctgtaccagcgcgtaagcgtgccagccgcattcgtaccgccttgcacgctgttggtattcggaatgaggaagccgccgctccagatgcggctgtcatgaactaaatgatctgcgataccgatgaaataaagcgtcgaacccatctgtatcattaggtcgcctacttcgagaatacccgtagaaacagcttctgcgcctgaatcgtcagcgcccgtaataaccggtgttccctctaaaagccccgtctgagctgccgccttagccgtcaccgtacctacaatatcagtattgtcatgcagctccgcaagctgctccggacggcaaaaatctcttacatatttttcgtttatcttgcctgtatccggatcgtaaagcggcgtgaagccgccgtaaccgagaaatctgtctattacatatttgcctgtgagcttagccgtcataaaggatgagcctgtaagaaacttatgcgctttttcgtaaacctccggcagattgttctttatccagaggattttaggcggcacatcgttggcgcagagaggtctgccgttaaatttaagtatttcctcttctccgtatttttcattcatatacgcaatttccgcgctcgctctcgcatcgatgccgtaaggtatggctttcatcattggcatacagttttcatctacaggtacaagtcccgcgcccatcgtgcttacgcccacacatttgatatcggcattagaaatgcctgttttctcgagaagcgcatgtgatattttacaaaaatctccccaccatatttcttccgcatccatttcaaaatgattcggctttggattttccatagcatgcttttctgcgtgcatcgccactacttcgcagttttcatccattataagtcctttactctcaaatgttcctatatctacaccgagaaaatatttgttcgccattttcatttcctttcactttttcattttcttgctttagtgctgccacgggcttatctattcacactgtccgtcatactacccgttttctatttccgctttattaaatccttacgcttcttactacatccataaattcttttacgcgtgcagggtcaacgtcattttcaaactttccgtcgtatttaaaactcgtgcccacaaatgcgccgtcgcagtatgtgagtttttccgcaatattctccgccttacaacccgtatttgcgtataccggcacattcggaacagctccctttattatttcgataagagcgctgtccacgccgtggccagcctgtattcccgatacgcacattgcatcaggatgacacttaaactgtaccgcttttgcaatggtagctatatctctccccgaaaggtctccgtcggactccgcatttatcatataaaacatcaaaagctcatcgagctccagcgcttttttgcgccttatcatttccgctacatttctgtttctaataccgatctcactgacatatgctcccgtaaaaacgcttcttacaaattgtgcttcaactgcagctgcaagctctattgtcgcatccgcgtcacttattacatgcacgccaaaaggtacagttatttctgatctgagctgaccaattatgtaggccatagcgcttggcgttaccatatcaacatggtcaagatacggcaggctaaactcatttgagatgagaatgccgtctacacctccatcttgcagcgctttaaggtccgcctttgccgcggaaagtacatcacccattttgccgccgtggggaaaatgcggatcacctggcagagctcgcagatgcaggagtgctataattggtttatcagtaccgaaaacttctttgattgtagtcatttttatcttcctccgtctgttgttttttgcgtttatttatcgtcgtccacacactatccttctataagcttacgaatgctctttatttctcttgccgctgagagctcaggctcgcttgcatacgacacaagctcagaactgagccagccatcatagccgtattttttaagtactgccataagtgcctccatcggaataatgccgctgccgacaggcatatgagtagggctcacgccgtcgctgtcgataaagtgtatataatccattttctcgccgagtttttcaaagtaatctccgaaaacttccttatgcaccatcggcgtcaccgtgtctatcattgtctttacatgtgaactgccgagatcatcgagcagttctacgagatcatcaagaaaaataattgtgttgctctccataagggtcaccgcctccattatgagatctacaccgaccttttccgcatgctcggtgagcgcgcgcattacggtaagcacattctgatagttctgtttgcggtttgtctggtatcccgcgtggccgcacgcaagctgtactcgcggtgcaccgatagcttttgccacatcaatagcttttttgagataatctatcgtttcttccctttcttttttatcgggagtagaaatattgtacggataaccaagcacctcgggtgtatacatcggtacttcaagattgtacttttccttgagctcaagtacatgcgcgcagcgagcctcatccatatcatacggatatgcctgcggtctgccgccccagatttcaacaccatcataaccgaaatatcccgccacctcgaatatcttatcaagatgatagcggcggaatgacagcgataataaagcaactttcataaaaactcctttcctgcccaaattacgggcaaacaaaaaagcgataaacctatacctataattaccataagtttatcacaattctgacaatttcgcaataaaagaaacactcgcgtaaatattcatactttcaaatcaatttataacaagcctcgcattggtcacataatataaagctttctaaaaatacattccgctgagaagctccagccactcggcgtttatttcttcctcttcatcatctgtgaggttttcggcttttgctgttggtctttcgatctcaatattttcagctccggcttcttgagcggctatagccgcattgcctacgctgctgctgttctccgccgcttcgctgttttgcgcccgaaactgttctaacattttaccaaagttattttcaattctatcttcttccatttttctttttccttgaataaaattactgtaaataaatgtttgcaaatttaaatctttgtaatcatcggcttttatgcatcgttctttcgaagcaaaaaataaattgaccgcctatcaaaagataggcggacaccctttttagggaactgaccgccgtctcaaaagcgattagtccttttcttatctaaagaatatcatagcaggccccttattgcaagtaaatattttatctgcgccggcggccgatgagctcatatatgaggagaacatcgagaaagtctccgagaagtccgcctctgcgcgcggcagtcaccttatcgctggccgtatttttatctgccgcgcccttgccgctgcctgcgcctgcactctgcacttcataaattctgagttcaggatatgcttccataatctgcgcgtatactctgtctgacattaccgaaatcgcttttttggaaggcatatcgcttccaaagcttgtcatttcgtcgcatgccgataaaatatatggttccactttgtaataaatttcaggataaagcattagtttgcctccgatttttatgtttatttatattatctatatataatatgcggctccctgtttaaaggagccgctgcaaatacatatttatatttaattttataaccaaaaatcatcgcgcgtaaaagaaagtgtctcggtgcgaatttcaccgtcctcggtatattgcaggtttaccgtaagaattccaagattgccgatgccgtcaaacaatctgttcatatttgtatatacctgccgcaccacataggcatttaagccggaagaaaggatttgtctgcttctcgtatcaatcggtgtcatcgctatttcatctgtcatatcgagcggagattctttcgtaaaatcataatttaccgtaagaccatacggctcttccgcagtttgcagtacaagcgccttatcgctgaacgcaccgctgctcatatctatatactcgtgcagtggcagcgagactataagtttacccaccgccatcgcatttcctatatattctgtcgtataatgcgcaggaaaggctggatttatccccgtgtaccaacgatcgagcatatcgagcagcaccgaatccgttccaaataaatcaatatcttcgctgtccgcaaagcctaagaagtatagttcgccaatctgtgcttcgccgtcagcttcttctgcgtcagtaatgtaatcatttactgcaaacaaggcaattcttttctctttcgttttaccggcaaaatattcttccatatacggcgttatttcataatcaatttcatacgcctttgccttaggatatatgacatcccattttacatcgtcataaaaagctccgagaaaaacattcggctttttggggctgctgcccgcctgctgtttaatttcagcaattgaatttatatggtgttctttaattttccattcgacaggcacatcctcattctcaaagatttcaaatgcctgttcaagcaaagtgctggcgtatttttcatattgcgaatctgtaagctcataatttccttgctgaaattcaggaacgcttttcagcgcagtttcttcaacatcccatatgtatgatgcgcgtacgctttcaagacacgaaatgagctctgatatcgaggtttcagcggcggctactgcaaatgaatttcctgttcttacggcgatgttatattgtttcccgtctctttttgctgtaaaggcatgataccgtataccttcttcagtctgcatatcgtttgtatttgtctcagcttcacgaatttccaagtagccgcggctttccaagtgccgtattatcgcattttgtacttgttcatcgctcatataggaagattcatttaaagtctgcatttcttcaaatgtaaacatttcttccggcacatagatttcagcaaaaagatttccttctctatcaaagaactgttttgcgtcttcgctcattccgtctgcataatctatacggcctccttctgtatccatatcataaagccaggacgacggaacatcagcctgtacatgcataccgataagtacgctttccgtttccggcatgctgcttccgcgtgctcccgtggtgcaagctgcaagtataagcagtgctgccagtgcagaaacaaccgcaaatgtcacccgcggctttttaaactcggcgatacgctttattcttgccgttacctctttttcgctgccgataaaagacgtagttacaggtacaaatccctgctgtcccgcagctgactttataagaacgcgcgcgtattcacggcggccgctcgcagtcaaaccattatcctcggcaagcgcagagaccgcagcaatagctctgtcatcgcagtaaatctcaacatctcttctgaatacgcgaagcgaatagagaatcacaggattaaaccaaaaaactgcggtgtatgcggcagccgccaaactccagagtacgtctttatttttataatggcatagctcgtgcatcagcacatattttagttcattctctgcaaaactttcatttatatatactttaggattaaaaatgccgataagcattgtcatatctgcacctttataaattgatatctccttttttattgcaagcgcatttttacattcttcaaaagtcttaagcactttttcattttcacatacattaagctcctttacgctttttctgcatcttatatagcgtccaatttgtataaaagccgtaaccgcaatgccgcagatccatattgtggttattgcagcatcaacagctccgctcacggacacttttttcccctgcggcatttcaaccgcaattatgcggtctttagacccgcgcccagtgtttatattcccgccgccggtttcagaggtttcgccatttcctctgccaggcaaaactgtgtcggcctgtaccgcttctgtattccctgcgtcggcatttatctttatctcgccatttacatcgtttatattttccttcaattctgctgcatttaggcttgcattttcagaaactgatgctttcggcagataatttctgagcgaaagtccgctttccggcagcttttctgcaaatggaaaaacaataagctgcactgcaagcaccgcccatattaaaagctgccatctcggtgtggtcttttttcttaatatgtactttacaataagtataagtaaagaagctgctgttgctgcaaaattaaggtttagcagtaatcctgtcataatttcacctccgccttaaccgtcaatcttctctatcagcgacatcagtgtttttgtctcttcctccgtcagcttgctgtctttggtaagcgataccataagtgttgatttcttgccgtcaaatactttgtcaataaaatttttcacttcactatttttgcactcattctcagaaagaagcgggtaatacttaaaattggcaccgcttttatcagccgccacagcctctttttccacaagcctcgttaccagcgttctcacagttgtataactccagccctcggcggctcctgttttttcatatatctgcctgagcgttaactttgatgtttgccacaaaattttcataattttccattcggaattgcttatgcttttatttttcataatttatataatcccctctttttgattacatttgtagtcctacagttttagtttacatttgtagtcttaatatgtcaagttctttttttaccgcaaaaaaaactgttttcgcttttgttttataacaagtttgttacatatatgttacaaaacacaaaaatttaaaaaagttttgtgttttttgaacaaaaatcgttgacaacaccggtgtcaatgtgtatattagtatctgtaaaactccttttataaaacatattacatagccagtcgccattctggcataagggtaaaacaactaaactatttaccaaagccttcggaaaacctccggaggttctttactataggaggtcatttatgcgcagacgtaaatttataactatttttgctgtggtgcttatccttgcattttcgctcagcgcctgctcagattttttccctgtcttattttttaccaacgaagccgatgatgattactccatcgatacaggtgacgactacggcgatgtcacaggtactgtcaccgtttcgatagtttatcctgaagaatctggcctcgaaagcgctaacggcgaagcatcaatttatgaaaatgcccatacggcgctcgatgcactcaatattttctgcaaaataaacggcatcgatattaccgttgaaacagtgacttcttcatatgtaacctcaataggcggtgtggctgaaaatgattttggagatgtttccggctgggtatacacggtaaacggcgaagaaatatggaaagcggccgatgaatgcgagcttgcagacggcgacagtatagaatggaattttgtcaatttctcagatacttctttttgatttctttattttttctacacgaaacgaacacaaaacttgagtatactaagtatgtaagataaggggtatattaacttacacactttccttcttttatttgatacacactttcacaaggaagatccgagacgataaacgcctcggatttttcttttctatccataatattaaattcagaactcgtaatttccattttttacaaaagatttttatatttttgccgctacacgttcaaattcgtctgtaatttctttactcggagcttttgttgcaaggcttacaataaatattacaataattcctaccagaaatgcaggcagcagctcgtaaagaccaaatacgcctccgagcggtttaatctcatatttccaaataaagacaaatgcgccgcctgctatcatccctgcaatggctcccggaagtgtcgtcctcttccagaaaagcgaacatatcacaatagggccaaagctggcaccgaaccctgcccaagcaaacgatacgatgccgaaaacggagctgtcaggatttctggctataattacgccaagcaccgcaatgacgacaactgtaagccttgctgcaaacatactcgctttatttgaaagattgagatgcagcgtttcctgaaggatattctgcgatacactcgaggacgccgcaagaagctgagaatcagctgtcgacatcgtactcgccagtattcccgagagaataagacctgccataagcgcagggaaaataccgtaactcgaaagcatatccgctatacgcactataatcgtttccgtggcgcttccagagagctgctctacaaagccctttgcgctgagtgttcttcctactatacctatcataacggctattgccattgcgataactacccagacagacgctacacggcgtgatgtcttgagcttgcgttcatcttcaatggccataaatctaagcaatatatgcggcattccgaaatatccaagcccccaagacaccgtagtgataatttgaaggaaagtataaggcgcgctggcgccgttctcttctatatatgtatttgtaaacgacaaatatcccggaagcgttcttgcattctctataactgcgtcgatgccgcctgccgtaaatgttgaaaatccaagtacaaaaacgatcgctatcgtcataacaatgctttgtataaaatctgtcgtagatgcggcaagaaatccgcccgccgccgtgtagcctacgataactattgccgatactatcattgctgtcatataatttataccgaaaagtgatgaaaacagcttgccgcaagcagcaaaacccgatgcggtatacgggataaaaaatatgattataataagcgccgcaatcatcgtaagtatatgcttttcatcgcggtagcgatttgataaaaactgaggcaatgtaaacgagcctgtttcatgcgtatatctacgaagcctccttgcggtaaacagccagttgagatatgtacctaatgtaagtccaattaccgtccagcccacctcggcagctcccgaaagatatgcaagtcccggaagacccataagcaaatagcttgacatatcgcttgcctccgcgctcatcgccgttacgagcggaccgagctttctgccgcctaaataaaaatcagaagacgattcatttttacgcgcaaaatgaaagccgatagcaagtacaatcccaagataaaccactatcgtaattaaaatgcaaatagcttctttagtcatatattttctccttaataaaatatgaactccgaaatccattttcggcacatctcatattctaccatatatcacgccgtttgcaaagcaagagccggaactcataccgtaaaacacagaaagagcagttatcagtcgcgtgtttcaagaccactgccgcttatcggtatgatatcgccaagatactttggctcaggcttcagcattactttaaaaaagtccttattgcgcgcgataatttcacgcacctctctaaaaaactgtcccgcataaacctctctgtcgcaagctacaccgcgcacttccattcccagcttctttcctatatataaagctctgctctgatgatacttctgtgtaacaacgagcatcctctccacatcaaaaatttcagcagccctgtacatcgaatcgtaagtagaaaatcccgcatggtcgagaaagatatcttcgggcggaacacctgcatcctccatatattttttcatcgcatttacttcatcatatttttgctgtccgtgatctcccgaaaggagcagtttcggcgctatgtcgtttttataaagagcaagcgctgtgtcaagccgttcctgcagcataaaattcggagtaccgtccggcttgagccctgcgcccagcacaagaatacagtcggcctcgaactctgctgcctcttcacttccgatcgttcccataatagtaacatctattccttccgcatttattatcaggtcttccgtactttttataatataaaaatttattgccagcgcaattaccaaaagcagtccgcatcccgccgccagccatttaaatagtcttagaatttttttcatcatttagtcctctcgttttgaaattttctgttacatacttgtccgtaattttttcataatataattcaaaaccttttgcgtaaaattaaggctctgccagcagcggagccttaaaaacatttgcgaagatctaatcgcttatcctgtaataccaaaaattatcgcagattttttccgtatagaagtcatagctgcctgaaaacgcatagccgtttccatcctccataagcgccgcgtcacaagccgcgtcataaaaattgacaggagtatctttggggctgtaataaaatccccattcgcagctggcagatgacactgcctcgctgccacagcgaaatttaattacacctcctgactctctttcaatatcaaggctttcgccttccgctgatacctcgagcgtgccgatgctgtcaatagcacttacaaaatcaacgctgtctgcattttccgcggctttgcgcagggcatcctcttcatccgccacaaaatcgaaaactcttgactttctctttttgcctgcactgtcataccctgcaagtacgccgagcacaagacaaaacgccagcccgctaaatactcctttttgcagagattttaacttcgactttttcccgcgcctttttttctcatttcttctcgcttttgcttttcccatcatttctacttcagcttttctccaagcaaagcccctttcttcttatctttatttttttattcttctctatctgcttttccatttaagcatattattctcaaaaaatgcttcaaccctgccctcttccgcaagatatgcaaggtatgattttaccgtgctccctacaagtacatactgattaaaatccatcaccaaatcataatgtgcaaaaatcatcgccaacagtttttcaaaatgcacaggttcacagcaaaattcacatataagtttgcatatttcatttaccttatcgcgatttaattctgccagcatcttcatagtttcctgcggctctgtatgtgcaggaacaaacagttttccgttaagcctttcaataaagtccagtgtttccaaatatcttcgtatatcataaataaacgatatgtggtatttttccataatatttttacttgaaacacaatcggccataaaccatacatcatccggtgtttttattcctaccatatcgaaaaaatgtccgggaagatttacaaactccatccctgcgggaagcaaagacctaaattcatccgtaaactcctcagatgcgattatcctcggtgcgcctgcatcaatcagcgtctttccgtctctgccttttcttccgccatctcccgcagacgtatcacatcctttggccatcatattgagcgcgctgcttgcctgcgccatcagaaatttgttgcgcagctctttcggcggatacgctccaaacaaaaacgaagattcgagcaaaggatactcagtaaacaccgcttcaatacccttcccaaaaacgggacagccccatctttcggcaagcaccttgtttccgcctatatggtcagcatttgaatgcgtatttataatcattttaagcttccagccctgctctttaagatgtttgtcaattttcctgccggcatccttatcatttccgctgtcgataagataagctccgccgtcatcaacataaaatcccattttagccggacagtttatataatatgtactttttcccacccgaataagttcgtacactttttcctctttctcacagctttgttcgtgttttacactttcagcagctgcattttgtatttctatcttttaatattaacacatttcctattgtttttctattttctcattgaattttcgccaaaacttccattttttaataaattgttaataaagaattcatatatttttactactttgccctgtataatattgattgaaaaataagcggagttttactttttcgctttggcttcatacaaaataatattaaagggagtaaagatataatgaaaaatccgttaaaaaatgtatctaaaaagaagaaaactttaattatcatcggtggtatagttgtcatttgcattattgtcagcttcataaaaccgaaaagcgacgcgtctcagggtgtgctcgtatccgctggtactgtctcacgcggcaacttatctcagacgatctcaataaaaagtactgttgagggctctgattcggctaatgttttttctgccgcaaactacagaataaatagcgttaccgtaaaggagggcgatgtcgtgcaggaaggccagattcttgccagactcgatgctgatgatctcacagacgaatacaacaaagccaaaatctcttacgatgaaacaaagagaaattatgataattcaaaaacgctttacgaagaaggcgcgctttctcagtcagattatctggaagcaaaagctgcatatgatacaagcgctcttactctgagctcgtttaacattacggaaaatgccaacgtcacaagccctattgcaggaacggtaacaagagtaaacgctacagtcggcaagcttgccaacggcggctccggcggcagcagcgagcctcttttcgtaatcgaaaatctcgacaagctgcagatgaaagtaaaagtaagcgaatacgatattggaaaaatcaaagtcggacagagcgcaactattactgcggaagttctcggagatgtttctgtaacgggcgtcgtttctcacatttcaccaaccggcgaagcgcgcgacgcaggcggctccgaaatggttatccctgttgttatcgacatagacaaaggtgaaagcaatctcatcgcgggcgttaccgccaaagccacaattttaattgacgaagtggcagatgtgcttacagttccgattgacgcagtctttgaagatccgtcaacaggagaaacatccgtatttattatctccgaaaatgacactctcactaaggttcctgtaaatatcggtcttgagggtgattttgataccgaaatttccgcggcggatgaaagcggcagcgctctcttaacagaaggtgcccgtatagtgcttgcaccgtcatatgagcttgccgacggaatggccgttaccgtaatgtaacagcgcgggaggttttccaatgagtgaaataataaacgaaaacataaatgccggctctgaaaatactgaaaagtatcccgaagtaataggcgtaaaaaatctgataaaaacttacgctaacggagccattgaagtacaggcgcttaaaggtatcaatctgactataaggcagagtgaatttgtcgctattatgggtacctccggctcaggaaagtccacgcttatgaatatactcggctgtcttgataaaccaacagagggtgagtacagactcacaggcattgatataagggaaaagtcggacgacgagctttcgtacatcagaaatcagcagatcggctttgtctttcagtcatttaaccttataccgcgtacatcagcgcttaaaaatgtagagctgcctatggtctacggcaaagtagcagcggataaacgccgtgcccgtgctcttgaacttctcgaaagtgtgggtctcggagaacgatacgaacatatgccaaatgagctttcaggcggacagcggcagcgcgtagccatagcccgcgcactcgcaaacgaccctcctataattcttgcagacgaacctacgggaaatctcgattcgcgttcatctgttgaaataatggagatatttacacagcttaaccgcgaaaaaggcaataccgttattatcgtaacgcatgagcccgatatagccgaatttacagaccgcgtcgttgtttttaaagacggtcaaatcatagaggataagctcaccgaaaaaggcagatcctccggaaaggaggtatataaatgcttcttatagaaaacatcaagctcgctgtaaacgcgataaaaataaataaaatgagatcctttcttacaatgctcggcataattataggcatcagctccgttattgctatttcttcgataggagcaagtgcacagaaagctgttgaggaacagtttaacggcgtcggcgcgggttacgtataccttatgcctaactggtacactctcgatactatgacaagtgatatgatgttcacgatggatgatatagaagctttagaagaaagatttccaaacgatataaaatacgcagcgccttatgcctacagcagctgtgaaacgcaggtaggaagaacggatgctaccctgtcgatgatgggtgtaaacgctcactacaacgaatttgccacgcaaattcagatcgtttacggccgtatggtaaacgaaagagatgtggaaggctctcttaacagcattgtcattccgatagaagcggcgaagagactgtacggcaaggaaaacgcagtgggcgaaacacttccggctgaagctttcggaagctccaccgactttactatcgtcggcgtatacgacataccgccttcaatatttaatagcctcgatacaagcacgagatacacctgctatgtaccgtattcgtctatgatgcgaagtgatgaatactttgataatcttgaactttatgtagatgaagataaggatgtcgcgcagacagcagaaacaatatgccgctatcttgaacgcataaaaaggcttgatgaggacacttacatttatcagtccgcagaagaccagctcgttgccatcaaccaggtgctcggctacctgtcactcgcgattggcgccatcgccgctatctcgcttctcgtaggcggtatcggtattatgaacataatgctcgtatccgttacggaaagaacgcgcgaaattggcatcagaaaatctctcggcgcgcgcacaaaggatatacttacacagttcctgatagaagcgatgatccttgcagtcatcggcggtattatcggtacagcgctcggcatcggtgttgcggcgctcggcacttccgttgccggtacgcctcttgctctcaacatgcagagtatattgctcgccgttgcgttttccgcaggcgtcggtctctgcttcggtttctttccggcaagaaaggccgcaaggctcgatcctattgaagcacttaggtacgaataaactcccttgtactttcagctttaatacaatagcaaaacggctttttcaaagcaaagtagaatctacgcattttgtcatacttatcagttcaatttacaggaaaagcaacaatggcaaatgttcttcatacatgcaaagaagcccgtctgttttaaaaacagccgggcttttttatactgcgccataatccatagcttctgcaatcgtaatatgcataatgcataattttacaaaagtgcctttttgttgttttcaaaatgcgttttgctgtcataacagcttgctgcagctcaccgaaaatgtatcagcaggccgcatcaaaaaagctgtattcgcaataatacatagaattttactattaaagatccatgcatgcttcaaataattgtacgatttcatccatcggcatcatgccatcatagtattcagcttctgtagccttgattagctgttcttttgaaggcattgtctttgcaacgaggttgtacttcatcggaagtccgatgctttcataaaattcgataatcttctttgaaccctcatccgcagcttcttcctcagaaagatttgcgtccacaccccagatttttaccatgtaattcttaatctcatcaccgtgatatttagcttctgctttgagccagtaagggaatatgattgaaaaagtctcacgatatgaaatgccgagctgtcttcttataattccgatatagtcatatacattgtaaacccactcgcgcgacttgccgagcgaaggcattacattcgtgccgtaaattgaagcgagcgcctggtttgctcttgcctgataatcctccggcttctcaatcgaaaccttgacgctgtctctaattgtatcaagaagcccttcgataagtctttctgagatagggctgtctcccgtgaaatagttaagactgatctgcataaatgcgattacagcaccgtatgcagtattctttgcatcgagagtatacgcgtattccggattgatgattgaaaaatcaggaataacgccgtacattgtaccgtttccgccggtttcctgatcatcaactacagcgccgcggcttgtttctgaaccgccggaaggatatgtaggaatagcgccgatgcgaagtcctttatttgctcttggagtgcctttaatgtattcccagagatcgccgtcgttagcggcgcccgcagcgatgaccttcgccatgtccatacaagttgaaccgccgataccgataacacagtcaacaccttccttcttgcagatatctacagcctttaagatatctgcgtaccaaggcttgacgcagccgccgaaatctacccattcgatgcctgcttccttaagaacacctgtgattttgtcatatacaccggttttcttgattgagccgccgccatatacgagcattgctttattgccggctactttaatttcgtcagcaagatagtttaaagcaccttttccaaaatgaatattgaccggatggtttaaattaaaatcataaaacatattatatcctccatttattattatatcaacgatatctaatcaatgagcaaaaagccagcccataatttcctcatcatgcgcaaatgacataccgccgccatgctgatcgtaacgcttgtagcctctgtcgaggaaatattgctgttctactaaattaagagtaagaatttctgcgatctctttttctgaaagtccttttttgttatacttctcaacgagttcttcatacgtttctttaaatgagtaagacccgtaagcactgtcaagttttgcagtagcaagatatacgggtgtttctgcttttacgagcccagtgatgtcgcctgaccattttgaactcgttgtaaggaatgcgcagtagagttcaggtttaattcccattactattgagcctgtttcaccacctgccgagtacccgtgaaggtatacttttttcggatttatattgtaattttcgaggaaatattccgtaattgctactgtctgctttgctgtgagctcatcgcatgcgttgaactgaagtgaaagcacaagcatttcgccgttatatttctgggcttcaataccaaaatcctgaaactcaagatttgcccctgctccccaaaaaagccagccatcccagccgggaatggttataaacagcgcgtaaggtttacttccatcatagcttttcgggatatatgaactgaaatgaacttctccgagattcttgtcgtgataaagattgtcgctgataaaacccctgtaaagtgtcgagccgaattcaatataacttttctcttccatatatgtctccttattgattaagcatatatcctgcttcttaaaacagctcctgaaaaacaccagtccgcttcaagtcattatgatgcattaaaagaaaagcgttgtttcatttaacttgaataatttctttcgcataaatacaaactctttttataagagctctttgatatcattgtaattctctgctttgacagagtctatttactttttattcagtaagtttaaatttttagtaaaagcatatgtatttcagttgcttttaacagactacaaaccttgttgaaataaagagcgtttctttaaaaaaccggggtatttttcacatatttttcacttttaccctattgacatataaattttatgctactataatagttagcgtgctacatattttgtcgcggcgctgcttgcagtccgttcttaatttttgttaaagggggttacaattttattatggacacaggtcctcattttggtcagcagataaagcatctcagcattgcttttgaacaggcaataaatcatagtctggctgctcaggggcttacgaatgcacagtcagtttttcttggatttatttcttttaatgaaaaaaaaggtgttgccgttcatgcaaaagagctggcaaaacactttaaacttaagaattcaacagtttccggtattcttcaaaggcttgaaaaaagcggcttcatagagtttgttcctgacgaaaacgaccatcgccttaaacgcgtcattcttacgcagaaggcgaaggaagcacacgcatattcatttcagatctttgatgagcttgagaagaaaatgctcaaaggatttaccgaggatgaagcaaatctattttatctgtttttaatgagggcagccgacaatatacgtgtagactatttatctgaaataaagaggggatgataatatatgataaaacgcttattaaaatctgtacgcgaatataaaaaggctagtattctttctccgcttctcgttgcaggagaggttgtttttgaatgtatcataccgcttcttaccgcagggctcataaataacatcagccgcggctgcggtatggatatcatcataaaatacgggcttgcgcttatagtcctcgcaatgttttcgcttttattcggcgttctttcaggacattacagcgccatcgcgtctgcgggcttcgccaaaaatctgcgtcgtgacctctttgaaaaggtacagcagttttcttttgccaacatagataaaatttcaaccgcgtctctcgtttcgagacttacaacagatgtgagcaatgtacagatggcatatatgatgattattcgtgtagcggtacgaagtccgcttatgctcatctttgcttttgccgcgtccataattgtgggtaagaagcttgcgtggatctttgtcggcattatcccggtattgcttttcggtcttataataatgatggcaaaggtaatgcctctttttaagtcggtatttaaaaaatacgacaatcttaatgaatcggtacaggaaaatgtcaaagctatacgcgttgttaagagcttcgtgcgcgaggattatgaaattgaaaaattttcttcagcttcaaaccagctcagacgcgattttacgcgcgccgaatccatacttgcgtttaatacgcctctgatgcagctttgcgtctacacttctatgatacttatttcttattttgcagcaaagctcataatcagcagcggcggcgcatacctcgatatcggcagtctgacgagtatgattacttactctatgcaggtactcatgagcctgatgatgctttcgatgatattcgtaatgattacaatgtcagcggcctcggccaagcgtatcgtcgaagtcctcgaagaggaaagcacgataatcaatcccgaaaatcctgttatgtcagttgctgacggcagcattgactttgaaaatgtaagctttaaatattcggaaaaagccgaaaaatcagcgcttacggatataaaccttcatatagattccggaatgactgtaggcataattggcggcacgggtgtcggtaagacaacgcttattcagctcatatcccgtctctacgatgtgacggaaggtacggtaaaggtcggcggcagggatgtccgcgattacgaccttgaagtactcagaaacgaggttgccgttgtacttcagaaaaacgtgctcttctcaggcactatcagcgaaaacctgagatggggcaaccccgatgcaacagacgaagaacttgtccgcatttgtaagcttgcacaggccgacgaatttattcagagcttcccggataaatacgagacgcatattgaacagggcggcaacaacgtctccggcggtcagaaacaacgtctctgcatagcccgtgcgcttcttaaaaaaccgaaaatactcattctcgatgattctacctcggctgtagacacgaaaaccgatgctctcatcagaaatgctttcaggacagaaataccgggtactactaaaataattattgctcagcgtatatcatctgttgataacgccgatctcattattgtaatggacggcggcaaaattgacggtatgggcacgcacgaagaactccttaaagacaacgatatttaccgcgaaatatattattcgcagaacaatatgggaggtgacaataatgagtaagaaagaaaaaaaaccggcggtaaagctcagcggcagctcgattaaaagacttctgaaatttctctttaaagattatcctgtagcgctctgcgtcataggtatctgtatagttacgacctccataattggaattttaccctcggtatatataaagaccattacgggatatattcaggaaggtcttgcttcgagcttcagcagtgtacagggcaaaattgtaaatactctcatcataatggtcgcgctttatgcagtcgcccttataagctccacggtgcagtcgcaggttttggcacgtgtaacacagggcttccttcacaaaatgcgtacgcgtatgtttgcgggcatgcagaagcttcctatacgctactttgacacgaaaaacgacggcgatatcatgagtcattatacaaatgatatcgacacactgcgtcagctcatttcgcagagtcttccaaatcttatttcttcgggatttgtaattgtgggcgtgcttgctgtaatgctttattacagcattcctttgatgctggttgttttcgtcggcatcttctttatggcgcttgttaccaaaaaagtaggcggcaactccgcaaaatactttattcgtcagcagcaatctctcggtacggtagagggttacatcgaagagatgatgcacggacagaaagtcgtaaaagtattttgccacgaagaaaaagctcaggaagatttcgataaattaaacgaagcgctgtgcagcgatatgacaactgccaacaagtacggcaatattttcatgccgattatcggcaacatcggtaatatgctctatgttcttatcgcctttatcggcggccttatggtgacatcgggcgtctttacccaaaactcaagctcagttgcacatgtaagacttaaatc

SEQ ID NO: 2954 - DNA, 2700 bp, Unknown
  16S sequences of unknown bacteria
gcatacgatattcgccttagtctcgtgggctcggagatgtgtataagagacaggcggtagagcagggcgaaagcctgacgcttacggcgctcttacctgtcatcgataatttggagcgcgccgttgccagcgtgggcggcgcggcagaggacccgatcgtcaagggtgtgcagatgtgtttggatcagttcttccaaaccttcggcaaaaagggcctggaaaagatcgaggcggaaggcaaggcgtttgaccccaacttccatcacgctatcctgcaggaggaaacggacgacgaagagaaaaaggatatcgtcgcccaggtcctgcaaaatgggtacctttacaagggcaaggtcattcgctacgccaccgtaaaggtatacagctaacaagtatgaaaacttttctcgctaggaggtatatgtatcatgtctaaaatcatcggaatcgaccttggcaccaccaacagctgcgtggctgtcatggagggcggcgaacccaccgttatcgcaaacaccgaaggcgcccggaccaccccgtccgttgtggccttctccaaaactggggagcgcttggttggccagatcgcaaagcgccaggccatcaccaacccggaccgcaccatcgcatccatcaagcgcgatatgggcaccgacagaaaggtgaccatcgacggtaagagctataccccgcaggagatcagcgcgatgatcctgcaaaaattgaaagcggacgccgaagcgtaccttggcggcaccgtaacccaggccgtgatcaccgtgccggcctacttctccgacgcacagcgccaggccaccaaggacgcaggcgccatcgccgggctggaagtgctgcgcatcatcaacgagccgacggcagcggcgctggcctatggcctggataaagagggcaccggcaaaattttggtgtatgacctgggcggcggcacgttcgacgtttcgctgatggaaattggcgacggcgtattcgaagtactggccaccaacggcaacaaccgcttgggcggcgacgactttgataagcgcattatggactacatggtctccgaattccagcgcactgacggcatcgacctgtccaaggacaatatggccatgcagcgcttgaaggaagcggcggaaaaggcaaagatcgaattgtccaccacggcggaaaccaacatcaacctgccgtttatcacggcggacgcctccggcccgcgccatatggatatgacgctgacccgcgccaaattcaacgaattgacggcggacctcgtcgagcagaccgtaggccccaccctgcaggccatcaaggacgcaggcctgtctaccaatgacatcggcaaggtcatcctcgtcggcggctccacccgtatcccggctgtgcaggatgccgtcaaacgcatcaccggcaaagacccgttcaagggcatcaacccggacgaatgcgtggccatcggcgcggccatccagggcggcgtactcagcggctctgtcaccgacgtgctgctgctggatgttaccccgctgtccctgggcattgagaccatgggcggcgtattcaccaagctgattgaaaagaataccaccatccccacgaaaaagagccagatcttctccaccgcggcggataaccagacggcggtagacgtacacgtcctccagggcgagcgcgaaatggcacagtataacaagacgctgggaaggttccagctgtccggcattgcgccggcgccgcgcggcgtgccgcagatcgaggttacctttgatatcgacgccaacggcatcgtcaacgtatccgccaaggatctggccaccggcaaagagcagaaggtcaccatcaccgcctccaccaagctcagcgaggacgagatcaaaaaggcgatggacgaggcagcccagtatgccgaggaagataaaaagcgccgcgaagaggtggacgcgcaaaacgatgcggacagcatctgctaccaggtagaaaaatccatgaaggatctggcagataagatctccgatgacgataagaaagcgttggaagcggcggtttccgctgtgcgcgccaagatgggcggcggcgataccgcagcgctcaagcaagagaccgaagcgctgaagaacaaatcctccgaggtattcagcaaggtataccagcaggcgggcccggatgcaaacgcgggcgccggcgcaggccaggccggcccggatatgggcggccagcaggcagcaggcggccaggcacagggcggccaggatgatgtggtcgacgcggactatgaggtcgtggacgacgacaaataaacaaaacaagcaaacgctctctcgctgccgcatattgcggcagcgtttgggtgtagggaggaatggctttggcacgcaattattatgaggttctgggcgtacagcgcaacgcatcagaggcagacattaaaaaagcgtatcgccagctggcaaaaaaatatcacccggatatgaacaagggagacaaggcggccgaggcggaggaaaagtttaaagaggtcaatgaagcgtacagcgtattgagcgatgcggaaaagcgccgccagtacgattctatgggccacgatgccttcacccaggcggccagcggcgcaggccccggcccgggcggctttggcggcttcggcggttttggcggcggctttggcgggtttgacgatatcttcggctcgatctttgg

SEQ ID NO: 2955 - DNA, 25941 bp, Unknown
  16S sequences of unknown bacteria
ttccttgtattcggtcgctgccgcgtgccttctccgggcggctcagcagtgccagggcaacgatcgtcaggactgtcccaaccagtgccagtgcagaggggatttcccggaaaaacagcatccccagcagcagcgccgccaccggctcagagcccgccgccaggatggaattcttcccggcgtccatataccggaagcccagtgtgaagagcacataggacaggacggacgcacacagagaatgcagcagcataaagccgatgtgcttcaccggcgccgccgtgacaaagccgcccagggcagcccaatccgtcagcggcgtcagggccaggcccataatgagcagggcataaaaggtgatggtaaagacgctgtagccccgctgcatggcaattttagacatcacgctgtaaaacgcgtagaataccgccgaaataacgccgatggcgatgccccgcagcggccattggacctgcccaccggtatggatcaagccgctggccagcgtgcagcccagcagcgccagggccatacacaggacctttttgccggtgatgcgctcatggaacaaaaaggccgccaggatcatcacaaaaatcggatacagccccagcaggatcgccgctagggacatcggcaagtaatggatggcctcgttatagcaggcgttcaggcccagcatccccaccagacttgcgatcaggaagatccaaaggtcccgcagcttgattttcagcagcgacggcctcgtgcagaggatccccaccagcaggattagcgccgccaccaggacccgggaggaaaggatcgtcatactgccgatcccattggcgttcagataacgcacaaatgtccccacagagccccaaaatacccccgcgatgatcggcagcaggaaggccaaacagcttgcttttttcataaagcgcgcctccttgtaggttcacccggcaaaatctgccaggcacagattcaaatccaccgccgtatcgattcccggcacatgcccgctctgggagtactgccagagctgcacgttatagaggaaggacggatagctgttatactccgccagccacaggcagtaatcgtccagccgccgcagatcaaagcggtcgtagccaaaatattggttaaaatagcacccagcccggtagcccagggcctcaatggtatcgcaaaaggcgatggcgcagtcggtcagcgcggtgttgtccagtgatgctgtccgctccgcttcgctggactgctcccagtcgaagatcacagggtaggtgatctcatagcctcccagatggttcaggacaaactgcgcctcctcccgggcctccgccgttgtgatagcctgggagtagaaatagacgccgacctgcaggcccgctgccagcgcgccctcgatattggtataatagctcgtatcctcctcaatcgtcccggtgccgtagcctcggtagccgacccggatgatggcaaattcgatccccgcgtccgccacggcctgccagtcgatcgccccctggtgtgaggagacgtcgatccccgtgcgggagacggggcttgccgtgcagcgcacatagccgccgtcctgataaaaatccgaagcgtcataggggtttttcgccacgggatcgtcttcctgccccggcgcgagattggcaatctgctgcccgacggtatgaaacagcgccgtcattctctcccaccagctgccctgcagacccgtcgcccggctgtaggcgtagaccgccgcaaacagcagcccggccaaaaggatcagcaccagcagcgccgtccggaccggatgccgccgggcccggcggcgggatcttgtgcgatatgccacaaaagcacccctttctctatcaaaatcgcccgcgcaaactgcgccggactccgtaaaagcttgcattactgcgggtcgcctgcccgcttgctatgcattataccacagctgacgagattcgtcgaggggcacattttcgcggcgttcggcagaaaaaagttgatttttctccgcatttatgtaaaataggaatatcaaagtttccaaaagcttctgaaaggcggttttcctatgcctgagatccctgaaaaacagcccgcgcagtcgccgcggcaagatacgcgccgcaaaaggtcgccggtcagcactttgtttcttctgctcggcatcctgctggtcgcagttgccgtggtttttgccgtgcggagcctcaccggccgctctgacggtgcagcacccgtccagagcggcgacggcagcgtcaccatcaccgccgtcggcgatatccacatggacagcagcctgctgcgcgacgcccaggcgggcggcgactatgactttgccccggccttctttggcgttgcctcccttttggccgacgctgacgtgaccgtcggtaatctggagtgcacctttgccggtccggagcagacggatctggatggctgggccccggataacctggccgacaccctctcgggcctcgggttcgacctactgcagaccgctaattcctgcagcatcgccggtggcctagacggcttgcagcgcacgatggagaccgtcaccgccgctaaaatgcaatacgccggaacgagtccggacaagaaaagctacaaaaaagattacggcatcgccgaatttgaatccggcgggatgcgcatcgtcttcgttgcctttaccaagggactgggtaacctgcgcctgccggacggcgcggaatacgctgtgaatcttctctatgaggactacgacacgaattatacccaggtcgcgacagcgcaaatcgaatctgttatggcggcagcccacaagcacagcccggatgtgctcattgccctcgtccactggggcgcggaggacgacagccagcacagccagacccaggagcgcattgcagatctcctggtcgccaacggcgcggatgtgatcctaggctctcactcccaccagcccggccccatcgagacccgcaccgcgacggatgaaaacggcgacgaacacacggcactcgtcgcctacgacttgggcgatttctacaccgcatccgacaaaagcgcccgccagggcatcgtcctgcagctggagttcacgaaggacaagcgcggcagcgtccagctgacaaagcaggactacacctccctgtaccgcacaacggacgccgctggggacccccagtatcagatctgggacgcagcgctggccaaaaagctctacgagcagggctacgtcggccgcatctccgaagccgattatgcgcagctggatcagacggtcgccgccattcaggcaagcgtggaacccaaagaggaaaaagaatagaaaaacaccagtgcactccagaaagtcttttctggagtgcactggtctatttttattctgccttctattctgccgcggcgggcgcgctgcgctttgctgtgatctcatccagggccactgcatataccttggtcgctgccatatgggcgcagccgtcggccaacgccgggtccatcccgcaatgggccagcagcagctgcaggccgtgggccgcctccgcgccctggcacaggaccgcctggccgaatccgatgacgctctcataggccgccgtgacgcccccttttacctgaatgtactggaaaaagcgggcgcattcgatgcagaccagcggctgcgcctccagcagcgcggcctttttccccgcgctggcgccgtgaaaatagaggacgatccgccccgcctgctcctcccagccgaaggagagcggcaccacatacggcccatccgccccctgcagccccaggtgcagcacctggcaggcgtctaggatggcgcagatttcctgccaatctgtgacctgcctgtcttttctgcgcatctgttccatgctccgacccactccgtttctatccagtctttatccgagttctttcccaaaggccgcgcaccaaggcgccagcgtgcacccggtacaatccggctttcgggcagtgcagacggctctgccatggagcaccagccggtggcagaagtcggaggactcctccggcggcagaatctcccgcagctgccgctctaccttctccggctccttgctctgggccaggcccaggcggttggaaatgcggatgcagtgggtatcgcacacgacactgccgggcacctggtatagatcgcccagcaaaagattcgccgttttccgcccgacaccgggcagccgcagcagctccggcatcgtccccgggaccttgccgccgtaatcccgcagcagcatctggcaggcgtggacgatatctgccgccttctgccggtagaacccgcaggtgtgcaccagctgctccacctccgcaatctccgcccccgccatcgcctccagtgtcgggtaccgggcgaagagcgccggggtgatctggttgactctcgcatcggtacactgggccgcgagccgcaccgagatcatcagctcgtagtcctttttgtattgcagcgcgcacaccggctccgggtactgcgccttcagcgccgcgatgatggcggcgactttttctttctgcttcatgtagctctcctttatactgcacgctctgcctgtattacagcagcggcgcaatgactttggtcaggacgccaatgagcttcgtcgtcagcttctcctggcgcaggctctgccgcgtgactgggcggcaaagcgccgccgtctcttgaaaatcggcctcaatggcctgaatgcagtctgtccccacgagatacgtcgcgcactcgaagtggtgatacaagctgcggtaatccaaattgatcgtcccgaccacggcctctgtatcgtcgacaacaaagctcttggcatggatgaaccccggcgtaaactccaggattttcacccccgacgccatcaggctggcatagtacgtctttgccagggcgtacgggatcttcttatccgggacgcccgggaggatcagcgtgacctccacgccccgctctgcggcaaatttcagcgccgtctccaattcaccgtcgaggatcagatacggcgtcatgatatgcacatagcgctgcgcccggttcaaaaggtccatatacacccgctcgccgaccttgtcgctgtccagcgggcagtctccataggggatgacgaatcccgtctgcgccgcctggggcactgtgcaggcaaggtgcggcgtaaagtccggtgctttttcatccaggcaccagacctgtaggaacatcagcgtaaagctcctcaccgcgtcgccccggagcataacggccgtgtccttccaatagccaaagcgggggacatggttgatgtattcatcggccaggttgatgccgccattgaaggcgacctgcccgtcgatgaccagaatttttcggtgatcgcggtaattataatgcgtcgagacaaagggctggatggcggaaaagacccggcactggatccccagcgcagccaagcgcttcgggtaatcgtggggcaaattggaaaactcacaggtgccgtcatacagcacccggacatccacgccctgggctgccttgcgggacagaacctccagaattttcccccacatcagcccttcccggatgataaaatactccaggaagataaaccgcttcgcctgctccagctcctgcagcagcgcctggaattttgcctcgccggaggggaaataggtcacctccgtgccctggtaggccgggaagcagccgctgcgctgcaaatagcgcaccagcgccgctgcaccgggccgctcgctctccagtcgctcctcgacgacaggctgctgtaggatctcccgcttcgtctgccgggtcatccggtcaaattttgccgccagggtccggtggccaatatcgctttgtatatatacatagagcagcgagccgaacaccggcagcagcataatgagcaccagccaggtgatcttccccgtcgggtcaatgggcccgttgatgagatacaccaccagcacagcagacagcagcaccgaaatcgtcaaataatggggaaagaaattctcaaaccaccgggcgatgacaatgataaatacgatctgcaccgccagcagcagcaaaacgacgcctacatggctgaagatcgtgatgcccttgcggctgcggtccaggagtgtcaggccgttatcctgtttttcctctgtttccatcgccgcacaccgccctttcgccttgctttccgctcttttcggcattttcttctattttagcatagtccggaaacttgtcaaggaatttacatgcccacgaaaaccacgcgccgggcagtagttgtattttttcgcaaaatacgctacaataagaaaaagaacgctgcgcacaggagggcaggcatatgcttcggatcggttatcatgtttccgccgccggcggctataccgccatggtccgccgggccacggcgttgggggcgaacaccttcgcctttttcacccgcaacccccggggcggcagcgccaaggccattgacccggcggatatcgcccagtttttggatgaatgccgggcccaggacgtcggcccgctggtcgcccatgcaccctataccctcaacccctgcgcagccaagccccaggtgcaggaatttgccctgcaggccttccgcgaggacctggcccggatggcctggacgcccggcaattactataatttccaccccggcagccatgtcggccaggggctggagatcggcatcgccaagatcgccaagctgctgaacgaggttctgaccgaaggccaggagacgacggtattgctggagacgatggccgggaaaggcacggaggtcggcggggaattttctcagctgcgccagatcatcgaccaggtggccctgccccaatgcgtcggtgtctgcttggatacctgccacgtctgggacgccggatatgacctggagcacgacctggacggcgtcctcacagcgtttgacaggcacatcggcctggatcgcctcaaggccgtccacctgaacaacagtctcaatgactgcggcagccacaaggaccggcacgcccggatcacagagggcaagctctccttggaggccatcggccgcatcatccggcatccggccctgcagggcctgccctttatcctggagaccccgaacgacgacgcgggctacgcccaggagatcaccctactgcgtacactttatgaaacagcataatgagagataccccagcacagatggaggcgctgcactatgaaacgaaaaattgaatcccagctgcttgcctggaaggaaaaagagacgggccgaatgccgctgattctcggcggcgcacggcagatcggtaagacgtatatcctgcgggaattcgggcgggcgcattttaaaaacaccgcttatctcaacttggagacgaaccagaagatggtcgagtattttcaggacggcatcgtccccgagcggctgctgcgctatatcagcgccctgaccggggagcgcatcctgcctggccagacgctcatcatcctcgatgagattcaggcctgcgagcgggcgctgacggcgctgaaatatttctgtgagcaaatgccggcgtatcacattgccgcctccggcagcctgctgggcgtggcggtcaaccgacagaattactccttccccgtcggccgggtcgcctcgctgacgctgcatccctttgactttgaagagtacctctgggccaagggggagaacgagctggcagctgaaattcgccagcactttgccgcaatgacgcccataccgcaggaattggacgaaaaggcggcggccctgtaccgggagtacctcctggtgggcggtatgccggccagcatcctgcagtttttgcagaccggcagctatccggaaacggctgccatcgggcgggagatcctggaaaattatacggcggacatggccaagtatgccacagccgccgagacggtccagatccgcagctgctacagtgcgatcccggcgcagcttaccgcgaaacgcgcccccagccccgcccagcaattcggcgggagcatctcctggctgaaatttgcagggatcgttttggagagccgccagctgcgcttgcccctggccccggcagaggcccaagtcattccggcgcaggaccggctctatttcagcgacgtcggcctgctggccgcccgggcgggcatcacccccgccgcgctggccccggaagacggcggcgtcgccgggcagctgctggcgcagaactatctggcccagcagtttgacgcccagggctaccccctgtacttctggcagggccgttttggccaggccgcgccgttcctgctgcagcgggagacggggatggccgccatactgccggagcccggcagtcgctatcaggccgcccggctggcggcgctttgcaaaaaatacccggcgctgcagccctactgcttcggcagccggaatttcacccaggaaaaagggctgacctgcctgcccatgtatgcggccttttgcctgtaacgccacccgtatcaacacggcatctgctgccgcgatcggtttcacgcggctgccagaccggctgccgcccggagggtaacgtatgaaggagcttccaattctgcaaatcgacccgctgctgcggccataccaaggggatcttgccctgcggatggagaactatcgcacacgcctagcggcgctgctgccggacgggcaggaccttgctgcctttgcagacggcgcggcgtattttggtttccaccggcaggcggacggctggtggtaccgggagtgggcaccgggcgcggatgcgatgtatctgaccggcgattttaacggctgggaccgccgcgcctgccccatgacccgccgggcgggcggcgtctttgacgtcttcctgccgggccgcgacgcactgcgccacgggcagcaggtccttgccatcgtacaaaaaaacggacaggacctggaccgcatccccctctatgcccactatgtcgtccaggagccggagaccggggcctggaacgctgtcatctatgcgccgcctgcgccgtaccagtggcacgatgcggccttccgcccgcagaagacgctttatatctacgaatgccacatcggcatggcacaggaaaagccgggcatcggcacctatgacgaattccgtgtgcaggtcctgccccgggtcaagcggctgggctataacaccatccagatcatggccatcatggagcacccgtactacgcctccttcggctatcaggtgacgaatttcttcgccgcctcctcccgcttcggcacgccggaccagctcaaggcgttgatcgacgcagcccataggctgggcatcgccgtgctgctggatgttgtccactcccacgcggcaaaaaacacccgggagggcatcaacgaatttgacgggacgcccgatcaatttttctaccccggcccccgggggacccatgccgcctgggataccaagtgcttccaatacggcaagcacgaggtgctccacttccttctctccaaccttaaatattggctgacggagtaccacttcgacggcttccgctttgacggcgtcacctctatgctctaccatgaccacgggctgggcgccactttcgaccattacgacaaatacttctcccccaataccgacaccgaagccgtgacgtacctgcagctagccaatacgctggtgcgccaggtcaatccagccgccatcaccatcgcggaggacacctccgccatgccggggctctgcctgccggtcgaagacggcggtatcggctttgattatcgcctggccatgggcatcccggacctctggatccgcattctaaaggaacggcgtgacgaggactgggacctctggaatatctggtacgagctgacggggcggcggccaaaggaaccggtcatcgcctatgtcgaatcccacgaccaggcactggtgggagacaagaccgtcatgttccgcctgtgcgacgcagaaatgtactggaatatggccaaggacaaggaaaacctcgtcatcgaccggggcatggccctgcacaagatgatccgtctgctgaccttgagtttaggcggcgagggctacctgacctttatgggcaatgagttcggccacccagagtggatcgacttcccccgggcgggcaacggctggagctaccaatactgccgccgccagtggagcctggcggatgaccccacgctgcgctatggcgcgctcgccgcctttgacgctgccatgatcgccctggcccgccgctgccgcctgttccgcggcaagagccagcagctttatatttccaaccaggaggggctcatcttctaccggcggggcgggaccttcttcgcctttaactttagcccccagacctcttatcctgccttcttcctgcccaccggccgggccgggaccttcaccgtcctactcaatacggaccgcgccgccttcggcggccagggccgcatctccggcacgcagcgctacgaagccgcccccggccccgatggccgcatcggctttcccatctacctccccagccggacggcgatcgtcctacgggaggaaaagggttgaacccagataacataaagcggcaggagcttcggctcctgccgctttaatgttattgcgcagcttccttcgtctgctgccgcagctcgttcagatagtcgatccggcgctgccacagcgcattttcgtggcccgcttggggtgtcagaaccagggtgttttccagataatcgctgaggtattgcgtgaatttctccgctccctgggcgttgagatgggagcggtcataataatccgtcagcgggtccagcccgatggcagccttttgcgtgtcaaaatccacaaatgatacctgtgccttttccagcgtcgccgccaggcggtcctggctctcctgggagagggtgttgcaccggggcgagaggtagagcaccaagcggatccccttttccgcgcagaggtcccggatcttcaggagatatgcctcgttcttttcatactctgccgccgtataggtctcacccttgggctccatctccgggaacggcgtcgtacggggcagataggtgtaacccgccagcaggtccaggtcatagccctcccgggcgcgggtatagtcgtccggctgcagctggctccagcggtagtggtaattatagagcggcagcagatagcgaatccaggtactgggcgctgtcgaagcagccatcgcccgccacttgttccagccgttcggcatatagccgatattgaccgcatcaaactcctggtgcaccgggtaaaacagtgctgtcacctcgacaaacatcgttgcaggactctgggtctccagggcctggcggatgtaataataggtctgcggcatcgtctgggtcggcccagccatggtgtaggaggtcagccccgtctgttgataaatcatcgccgggatgacatcgcaataagcgatggaggaaccgaagaacatcacgtcgattgagttgcggtcctccttttcataggcctgccacaggcagccgtagtcgtagcgctttggcgtcaaaagcggcgtgacggcgttgcacaggccccagagcgcagcggcaagcaacagcagggcgagcagcgttttgcatgtttttttcatccccgcgcctccttagaacttgaagtacataaagtcctgcgggtcaaagccttcgccgtagcagccaaagagcaggatcgcccccagtaacacaaaatagatcgtataacgcagcaccatcggcttttccatcaggaaagcacgcaccggctgcttgcgctgcagcaggctggcagccagcatcaaaaccagaccgccgccgatcaccgccagattgatccaggtatcggcatagggaaacagcgcctgccacgtctccggcagatgccaatttgtcacgacctgcttccaaaggcccagcccccggcgcaggccgcctacctccggcaggaccttgatgaccgtcaccaagcagaaggttcgcagggtctggaacgcgcgccagagccagcaatcctcctggatatgcagcgcctgcttccagcgcagataaactggctccatccacaacgagaaaatgataaacgcgccgttgacgccgccccaggcgatataggcccagctggcgccgtgccacaggccggtcgtcagccagacgattaggagggcgaccgtcgccggaatcgttttgccgacggagccgccaaagcgcttttgccagcgcttaccggcattgcgggcaaagtgggataccgcgacagggtagtagagataggtcttgaaccactcccccaacgtgatatgccaccgccgccagtattcggcaatggatttggaaaaatagggccgctggaaattctccgccagctggatgccccagatctcgcaaaggccgcagacgatatccatgtagccggaaaaatccgcataaatctgcgcgctgtataaaaacgcacctaccagcaccgcgacgccggaatattccgtgtaattggcaaacactgcctgcacatacggcgccagcgtatcggcaatgacgagctttttaaaaaagccccagagcatccgctgcaggcctgaccccaggcgggcggcggagaaagaatgcggcgcatacagctgcggcgccagctgcgagaaattactgattggcccctggataatctgcgggaagaaagagacaaacagcagcatccgcgcaatgttcttctccggcgcgcatttctcccagtagacatccaccaggtatcccatggattggaacgtataaaacgagatgcccagcggcgcaatcagccccaagggcccatggaccggcccgctgcccagcagcgctgccgcccggttgagctgggtcagcacaaagtcgccatacttaaacacagcaagcaggccgaaattcaaaagcagcgccgcgatcataacggccttgcgccgggccttgttcccagccttataggccttcttttcctcccggctcagctgttccttatttgctttcagataagcctgctgctgggcggccaggcggccgatccaacgagcgccgcaataggtcgagagcgcggtaaagagaatataggccccatactgcagcccggcggcgcagtagaaaacggcactggccaaaagcagcagcatccactgcccgtgctttggtaccaaaaaataaagcaccgtcaaagccagtgcaaagagcaaaaagctcccggatgtgatcgacactgaaaagatcctccctagaaaacgccatcccggcgatatcggcggtttttcctctattatatcggtttttgcgacattttcaataaaaaatatcacccgggctgctgcaccgggcgaaaaagcggtataaacggacggacacccgccggtaatgggagaaaccggcaggcgtccgtcagatatatgtgggagaacacatatagtaaagtgatattcaattcactttatggtcatattatagtcatccgctgccggtttggcaagggtgcaagtcgcgcatcggggcatataattcgcttattcaaaaaaatcgttccgccatcgcgaaaatacaaaaattgtcgttttttgttgtaaagaaaccgttaaacgacttttctcccgcttttttccaggaaaaagtattacatttcactctttggatttttccggtcacctttgccgaacgtttttcccgccgatcgcctttggcttgacaaagcagctttggttttctacaatgaaagaaacgtgattgatttgacggaattttttagattttttagaacggagctgcatcatgcaacaagaaatcgtccaattcaccccgccggtatcgccggagccctacggggagctcttcgccctttacgcccacctgaatctggagaaaaagcgccaccaggtgctgctggaacgggcgatggcctgctatcctgcgatccgtgaccgggtcaagacccaggcgctcattgccacaccaactgccgccgaagcaggccagggctttctgcagctggacgacgcccggctggaagcggagatcttctcccagcttccaccggagcatctgcggcaggcatttatctattttctcgccgtgggcgactgcccgcagccggagacggacagcctggtcgacctgctgatctatgacacctggggtacaatcctggtagaaacggcccgggcgcagctggagcgttatctgcagaagaaggacgagtcgctcgccctctcctgctcctatgggccaggctatttcgacataccccgcacgatgattttatcgctgcgagagctggtcgacccgagcaagatcggcatggagatcatggacaacaccctgatgctgccgcaaaaatcctgcgccggcgtctacctgatggcgacagatgacactggcttcccggaaaaccagatcccggcgctgtaaccaaacatgattcgcaccatccgaaaaacagcgtgacggcgctccgtcacgctgtttttgtattttatattatgctgtgcccctatcacgggcagaagctgcgcatggcatccagggtcttcatcaggagctcgtccagctcccagcccagttgggccgcgccgtttgcaatgatatcccgactgcagccagcagcaaattttttgtccttatacttctttttcaggctcttgagctccatatcctggacgctcttgctgggccgcatcagcgccgccgcgccgatcaggcccgtcaactcatcgacagcgtacaagaccttctccatcgtatgctccggcgccacgccagcgcacaagccatagccatggctgaccacggcatgaatcagccgttcgtccgcgccgccttcttccagcagctcgcggcacttgacgcaatgcgcctccggccactgctcaaagtcgatatcgtgcagcaggccgacgatgccccagaaatctgcctcattgccgtagcccagctcctgggcaaaccagcgcatgacgccctcgaccgtctccgcgtgctgcagatggaagggctccttgttatattttgtcagtaattcccatgcttgcgctcttgtcatttactgcctcctatggctgttctattgctcttattcttttatgctgccatcggcgttgaacaccggcagcttctgcagataaatgagatcatcccgcgcctgcgcgtcgccctcggccaaaatggccatccggcctgcgatgatgccgccggcctgggtgaccagctgctccagcgccgccagggactcgccggtggagatgacgtcatccaccagcaaaatgcgcttgccccgcatcagcgccgcatcggctttatcgagatacagatgctgctctcgggccgtgctgatggaatggactgccacgtcaaagacgccggacatatacagcttcggccctttgcgggctaggaaatatttgttctgcccgctctgccgggccatctcgtagatcaaggggatgcccttagcctccgccgagatcaaataatcgtactccggcgctttttccaagagctttttcgccgcatggaccgtcagctccacatcaccgaagatcacaaaggcaccgatataaagatcattcgtcactcggcacagcggcagctctcgctgcagaccggcaacatcaataggatacaccaattgcactcaccctttttctaagtataccgccctaaaaccggcggcggactgtattttttgccgctcttattatagattccccgccgccgcttgtcaatgaattccaagcaaaatgcggcgggcaaatgttttttcgccgccagccttacatttttacaaggagggccgacaagtggcgttttccatgctataatgcaagtataactcaggtcagcataagggagagagcctgtatggaaccaatcagacgccgcagcacgctatggcgggttttgctgtttttcatccttatcaccgcgttttttgatctggtgattatggcgacgatgccaaaatacaaatccgcctccaccccggcggacatcgccaaaacagacctggcccaggactacatctgcctggattccagcgcagcgacggtctaccccggcgcgctgctcaccccggcggatattgtcgccgggcgaaccgacgggcagcccggcacaaattatgaaacctgccgcatcaccctcgccctgcgcccgggcgtgacctacggtatcaccggccagacggcgacctacgcccagcgggtctatatcaacggcgtgctgctctcccagctgggcaatgtcagcgccgacgcggctgcgttcacgccgcggacggatctctacaccgtttatttcacgccgacgcagccggagacagagctcgtcatccagcacgcctggctgaatcatcagcacggcacgctccaaaagctcttccttgccgagcagcaggtcatcacccggactgtccgggcgcagacgctctgcgacgggctgctggtcggcacgctgcttggcatggcgctgtttttcttcggcatgttcttcttccgctctgccaatctggggatgctctggttcgccctgtcgtgcctgtgtgcggcagcgcactatctcatctatgagagcaagcagatcatggtctttttccccacgctcaactggtacctggggcacaaggtcgagctgctgctgaacatctactatttcgtcttcatcctgctctttgcgttttccgccctgcaataccggccgaagcggtggttttccgtcgtgtcctgggccgtgctgggcgcgctgagtgtcttttatatcgccgcgcccgcgccgttttatacgaagtatctcgtgcccgccggaggcgtactgattggctatatgctgctggccgtcgtcactctgctgcgcggcgcgcggcgcgctgggaagctccggcaggcagaccgctggatcgtcgccctctcgccgcttttgacactggcggtctactgcattgaaggggctacatacttctcccatattctctatctccgggcctatgccatgatcctgctggccttttgcaatgccctggcgctgacgatcaactttgcccggactacccagcagctgaacgacgcccagcgccgggagcttgccacggcggaggaaaatgccatgctggaaaaaatgaacagcctgcgcaacgacttcatgcgcaacatcgcccacgagatgaagaccccgctgaccgtcatgagcggctacgcccagctaaccgggcggcagatccagcgcaacgccgtcgacgcggagacgaccgccaatctggagaccatcgcccgggaagccgggcgactctccgacatggtcacccagcttttggatgtcacctatcacggcgacgccggtacccggacctgctttgcgccccagcagctgctggaggacgccgcagccgtctgccgccctgtcctgcagaaaaacggcaaccagcttcggctccagtgcgaaagcagccaaaccctctgtgccaaccatgctgcgctgctgcaggtgctcatcaacctagccatcaactccaacaagcacacgggccacggctgggtcgccttccgggcggcggatgcgccgggctttgtccgcttctccgtcacggacgacggcagcggcatcgcgccggacgacctgccccatatttttgaacggggctacggaacagacggcggcaatggcctggggctgacgatctgccgtgatatcatcgaatccacgggcggtgccatcgccgtgacagaaacgaacgagactgggacaacaatcgccttcaccgtcccggcgcagccggaagaaacagcgaaaggagccgcgacatgaacacgatcttgctcgtcgaggacaacccgcatatcatgaaaatcaatcacgcggcgctgatgatggaaggctatcgcatcctggaagcggccacggcggcggaatgcctggccgcgctggatgcccaggatatcgaccttgtcatcctggatattatgctgcccgacggcaatggtgtcaccctctgccgccagatcaagcagaaatttgagatccccattctcttcctctccgcgctgggggaaaatcaggacgtcattgcagcgttgcgggctgggggcgacgactacctgcccaagccctatgacatcggcgttctgattgcccgggtcgaggcgcggctgcgggcaggccggcgggaaaagcgtttcttccatttcggcgcgctgcggctggatacggcagcccgcatcggctactgcggcgcgcaggagctgacgctgacacagaaggaattctccctactgctgcagcttgcccagagcggcgggcagatcatcgcgaaggaagacctttacgagcgcgtctggggccgcgccttggcaggcgacagtacagcgctttacactgccgtctcccggttgaacacaaaactgacagaaagcggcgcgcaggtaacgatccgcttcctgcgcggcaagggctacaccctggaggccgtctgatcttaacaaaaacaggagcgtgcgctttcaaaagcacacgctcctgtttttatactgcttttcccctgccccggcgcagacgaaaatagacgccgccgtcgccagcagcccggcaaatacgaccaaaagatagccccgcacgccgcccgcagtgacgatgggacctgcaaaaaacgcaagatcacgtccagcccagcgtagctggctgccgtcaggaccaatgtcacacctaagaccaggaccatcccatgccccacggcgctttgcagcttctcctgctcccgcttgccgaaatagatggaaaacagcgccccagggcccggcctgcgatgagggtatcggccaggttatagatctgctgcagaaggttccccagcagcatcggcagcgcaaagcgaacaagccccggtccgatgggccccttggtcagatcacggtacatcgctgcctgcgcctcccacgccccgcagggccagctgataaaaggccaccgcgctggccgccgcgacattcaaagaatccacaccgcccgtcatcgggatcttcacggtatgatcgcacccggcgatggtccgggccgccagaccgtcgccctctgtccccaggacgatggcaagcttggggagcccggcaagctgcggtgcaaagaccggcaggctctcgtctgtcagcgccatggcagcggtctgaaagcccaggccccgcagcagcgcctggccccccgtgggccaggcaacgtcaccctgcaaaatcgtccacgggacctggaataccgtccccatactcacccggatagcccggcggtacaggggatcgctgcacccagcgctgagcagcaccgcatcgatccccaaggccgcggcgctgcggaagattgcgccgacattcgtcgggttcacgacctcctccagtacagcgatccgccgagcgcctgcgcagagtgccgccgggtccggcagcggcggccggaccatggcgcacagcatcccacgggtcagataaaagcccgtcagctgcgccaggacctcccggggcgcgaggtaagccgggatatccccacagcgcgccagcatcgcctgccccgccgcatcgccctcctccagcaggcaggaaacagggcggtaccccgcgtccagtgcccggccgatgacaagcggactctcggcaataaacagcccctttgccgggtcatcccggtttagcagctgcctctctgagcaccgggcatagacatccaactccggcgcggtaagatccgtgattttgatgcagttgaccatacacacactcccgtttccagaaaaaaggctgccgcgcctatgccgcagcagccgggatttgcagtcttacaaattctccccgtccagcaggtcctggagggtaattttctcaagataattgtcaatgatctcatcgagccgctgccacatcggcagcgtcatgcactggtcggcccgctcgcagccgctctcgccgcattccaagcaggccaccggggcaagggaaccctctgccagcttcaagatcgcgccgacggtatacgccgacggcgggtagcgcagacggtagccgccgtccttcccccgctggctctccaacaagcctgcccggttgagcccggcgacaatggcctccatatacttcacagacatgccctgccggcaggagacattgctcagcgagcaatactgccccggctcttgctgcgcaaggtccagcatgattcgcagcgcatagcgccccttggtcgataccatcatcgtctttcccctccctatcggtgctattttagcagatttttcccgcttttgcaaccggaatcggccaaataccgctgggcgcgatccagcagcttttggtacaggttcaggtcctccggcgaaaaatgcgccgaggtcaaaaagtccggtgtctgccaggccaccgcccggttttccgccgggcactgccgcaacggcgcggtgtcatctgcctgcagcagatacgccagggagagatgcagatgccgcggcacctgccgtccccgcttttcatggggcgcgacggggaaaatatctaggctgatcggtccgtcgcacaccggtgcagcctggacgcccgtctcctcccaggtttcccgcagggccacctgcaaaaggtccgggcagccgtcggcgtggccgccgggccaggcccagcagtccatctggttatgatagagcaataagatccggctggcgtcccggttgatgacaaatgcggaggccgtcatatgcgccagatcgtcccgccccaggattgtgcccgggcactggcgcagctgccgcagcatcgcctgctgtacggcatgctccccttcgtcctgcgggcaataggtggcgatggtttctaaaagctttttcatacgcggcccacccccgtgatcgtcccgccgccgatgacaacaggaccgtcgtaaaggacggccgcctgcccgggcgtcggcgcccgctggggctcgtcaaattccagccggaggccgccctcctccgggtaagctgtgcagggcgctgttttgggtgtatagcgcagctttgccgccagacgcatcggctgccgcagcgccgccagggcgataagattgatctccccgacaaaaaccgtccgggaaaacagcgcctcctgcggccccaggatcacatcggcccccgccttgcgcaccacatagatccgctcgcctgcagcgatctccagcccgcgacgctggccgagggtgtaggcctccatgcccttgtggggcccaaggtcacggccatccagcgtccggaaatgcccgggctgcggctgcaggccatgagcgcgcagataggccatgtaatcgccgtcgggcacgaagcagatatcctggctgtcgtgcttggcggcgacgtggagcccggcctccgcagccagtgcccgcacttcctgctttgtcatgctccccaaagggaagcacgtccgcgccagctgggtctgggagaggctgtagagcatataggtctggtccttggcgccatcctgggcgcacagaagcagataccggccactccccgcgtcaaagcgcacctgggcataatggccagtggcgatgccgtcatagcccagctccagcgccgcatccagaaatcggccgaatttcatcgtccggttgcagaagatgcaggggttcggtgtcccgccctgctgatagacccgggtgaagggctcgatgacattttgcaggaattcctcctgccagcaaaacaggtgaaatatcagccccagttgcgctgcggcgtcggccgccatctgggcctcttcctcgccgcccgggcgcagcagcatcgttccaccgccgacggtaatcccctgccgctgcagtaagatacatgccgccgccgaatccacaccgccggacatcgccgccaggatctttttcatcacggatcgccccctttttctatcatcttatccgaaacaggacgaaaaagcaagccgtgtccgcttgcaaaaactgcccggacatgataccatatttgggcgaaagaggtgcaacattatgatcgcttttcaatccccccagttgaccgaccgcggcgtgcttgcgccgattttttatggttccggcaatctgggctgcgaatttacgtttaacaacatctatctctggggccgccaggagtacgccattgtggaaaattgcctggttctcttctcccattgggacggccagagcacctatgtctaccccgttggcaacggcgaccacaaggctgccatccggcttctgatggacgatgcccgggagcgaggcattcccttccgcctgtcgggcatctccgagcaggccatagcggagctggagagcggattccccggcgtcttccgtttccagccccggcgcagcagcttcgactacgtctatgagatcgacaagctggccgacctcaagggcaagcatctgcagcaaaagcgcaaccacatccatcgcttctgcgacgcccacccggactggcgagccgagcccatcgggccggagaatctggaagaatgccgtcagctggtcacccggtggtacgagctgcacgggcaggacgatatggagcaggattttctgctggaaaagcgggccatccgccgggcctttgacgcctattttgcgctacggatgcggggtcttgccatccgcacggagggtaggctcgttgcgatgacgatgggttcgctcatcaatgattccatcttcgacgtcagctttgaaaaggcctatgccgatctgcagggcgcttaccccattgtcaaccgggaatttgcccggatgctgcgggaagagtaccccaatctgcaatacctcaaccgggaggaggatatgggtctgcccggcttgcgcaaggccaaggagtcataccacccggccttcctggtcaaaaaatttcgggcctatctggaagaggaggtctgctaatatgctgcgcacatccaccgcggcggacattcccgcgctgcaggccctctggcagcactgctttggtgatccgcccacctacaccaggctgtattttgcccatctctggcagccggagcaggtctttatcgcggccgaggggccggaggtccaggcgatggcgatctggttccccctgcaggttagtggcagaccggcggcgtatttctacgccgtctgcaccgacccggcctaccggagccgcggcatctcccggcgactgctggcctacgcggaggcatccctccggaccagaggcgtggcacagtttctcctggtgcccggcgatgcggggctcttccggttttacgccgcccagggctatacctgctgcggaaccattgggcaggcgcagctgggccagcccgcacccggtgacgtcgcgcccctcaaaccagaagattatctagtccggcgcgcccggtgtctgacgctgcctcacgcggcgtattcccttccgctgctggagcatcaggcgcggctgtgcgctctgtcaggcggtgggctctttgccctgggcgagaccggctgcgccgtctgtgaacgcacaccggagggcacgctgctcgtcaaagagctgctgggctgcgacccggtctccggcggcaatgcgctgctctaccattttcacctggctcggggcgccgtccgcttccccgatcctcacggcacgccgttttgcatgggaaaagcgctggcacaaagcccactctatctgggccttgcctttgactgaccaggcgcaagccccctgcgtctggtgcggcggcggagcattttcctaacatctactctttacatgccgccgcattttttgtataataaagccgcaatagaatctatgctgcacagtatccctcgggatttcaaggaaaacgggtgcaactcccgtacgccgccaacgctgtaatagacgagcctgcttctttatgtcactgggggcttccctgggaaggcgaagcaggcgatgacgcttgagtcagaacaccagctgcgcagccaacgcgtatacgctaaggcaggacatgatgcgaaagtgtccggcccagggcgtatttttttattcttttttatggagggcacatatgaaaaagatgttccgactcaccgaaaaccacaccacctgccggacggagatctccgctgggctgacgaccttcttcgccatggcctatatcatcttcctcaacccggtctttctctcctcgactgggatggacgccagcggcatcttggtcgcgacctgcctgtccgccgccctgggctgctttttgtgcgcatttttcagcaataagccctttgccatggcctccggcatgggtatgaacgcattcttcgcctataccctctgcggccgctgcggctacacctggcagcaatccctggcgctgacggctatctccgggttcatcttcctgctgctcgtcctctcgccgctgcgggagaagatcattgcagccatccctgcaaacctcaaatatgccatcagcgccgggatcggcctgtttttgacggtcatcgggctgctggataccggcatcatcaccatgacgcagggctatcccgccctgggagacctgcacgacgccagcgtgcagatcgcgctggcgggcctggccatcacggcagtcctgctcgtctgcaaggtcaagggcagcttgattctgggcatggccgcgacggtgctgctcagcctgctgtgcggccagacggcgctgccgcagcaggtgatcggtgcgcccagcgccattggtcgcgtcttttgtaagctggattttaccggcctgctgcagggtgacggtctttccggcattgccgcgctggcggcactgctgctttccatgacgatggtcgatctgtttgacaccctgggctttttgatcggcaccggggcccgggccgggcttctggaagaggacggtagcctgccgggcacgggccgcgtcctgatcgctgatgcttccgccaccgtcctcggctcgctgtgcgggacctctacggtgacgtgctacgccgaatccgccgccgggatcgccgccggggggcgcacggggctgacgtccctgaccgtcggcatctgctttttgctggccgcgtttttctccccgctggcgggtatcatgaccgccgcagccacagccccggcaatgatcatcgtcggcatgtatctgctgatggagatcaagcgcgtcgacttcgcccagatggatgacgccattcccgcctttgccacgattgtcaccatgccctttgcctattccatcacgacgggcattgccgcgggctttctttcctatgtgctgtgcaagctggcggcccggaaatggcgggcgctgaatgtgccggtcgtgcttctggcgctggtttttctgctgtacctgtgcctgtaatgcggcagccctacaggaaagccgacagggccgtaaagtcgcgagttgaaaagcggggcgctttgtgatataaatagagtatcttcgcttttgtgcgcggagatactctatttttgcgccgcccatcgggccgcgcgaccgcaatgaagttttcataggagaaccgctatgacacatacaacatccgtcttggaagatctggcacgccagatcgcggcacagccggaagccgtcgccgttgcagacgcagcagacaaatggacctttgcccgcctgggggacgggtccgaccggctggccagctgcctgatccggcggggcgtgcagccggggcagcctgtgggcgtcgtcgcccggcggagcgccgccgttgtcgccctgttcctggccgtcctcaaagccggcggcttttatgtcccactggacccggactggaagccggaaaagctcgcacatgtctgcgccaatgccgggctgcagctggttttggatacgcaaacgcccggcccattgccggacggcgtcaccgccctggtctgcggccaggcggaatgggaagccccggcggacgctgccgcgctttccgccatcgccgcccgcct

SEQ ID NO: 2956 - DNA, 1848 bp, Unknown
  16S sequences of unknown bacteria
cgtcaagagcccgaactacaacgcgctgaagaaggacacccccgagatctggttcgccggaaacaacatctgctcctccgcgctttctgagctccttcaggtctgcgagggcaaggatatctgcgtcaacgtcatctcgaagtccggcaccaccaccgagccggccgtcgctttccgcatcttccgtgagctcctcgagaagaagtatggcgaggagggcgcgcgcgagcgcatcttcgttaccaccgacaaggctaaaggaactctcaagaagttcgcgaccgacaagggctacgagacattcgtcgttccggacgacgtcggaggacgctattccgttctcaccgctgtcggtctgcttccgatcgccgcttcaggctgcgatatcgacgctatgatgaagggcgccgctgatgcgcgtgccgcttacacctccgacgacatgaacgagaacgacgccgcaaagtacgccgctctcagaaaccttatgtacagaaagggcaagaccaccgagatcctcgtctcctacgagcacgctatgctcatgacgaacgaatggtggaagcagctctacggtgagtccgagggcaagaacaacatgggcatctatccgtccagcgtcgtcttctccactgacctccattcgctcggtcagtatatccagcagggcagacgcaacctcttcgagactgtcgtcgatattgcgaagtcgaacgacaccgtcgtcatcccggacgatccgcacaacatcgacggtctgaacttcctctccggacacgagctccactcggtcaaccaggcggctatgaaggcaacccttctcgcgcacgtcgatggcggcgttccgaacatcgtccttgagctcgcggacagaagcgagtactcgttcggttatatggtatacttcttcgagctcgcctgcgcgatctccgggtatattctcggcgtcaacccgttcaaccagcccggcgtcgaggcgtacaagaagaatatgtacgcgctcctcggcaagcccggctatgagtccgagaaggcggctctcgaggcacggatgaactgatccgccgatcggcggatttgcgcggaaaccgcggaaacgctgaatcttcataaatgattcagcgttccgtcacttagcactgtttttgacggcggatttgtacaatgtgtaaaaactttgcttcccacgcgaatttgttcagaaatgtacttgaaattttcacggttttagtgtaaaatataaataggacaaaccacaaccaacattacaggaggttcattatggtaaagttaataataggcatcaagggcaccggcaagacaaagcagctcatcgagctcgtcaacgccgcttccgaaaagagcgccggttcggtcgtctgcatcgagaagggcacgaagctcacctatgacataaagcacaccgcgcgtctgatcgacaccgatcagtacgctatctgcgacgctcagtcgctcttcggcttcatcgccggaatcatcgcgtcgaatcacgacgtgaccgatctttacatcgactccgcgctcaagatctgcgacaacgatctcgcggctttcgacaagctcctcggggaggttgacgagctctgcaacaaatacgagctcaactgcacgatgaccgtctcgcttcctgtcgagaaggcaaccgacgcaatcaagagatatctctgataacgtcataaaaactcgtcgtcgcgccgggatttttcccggcgcggtgattgatttcgtgagatgcggtttttatttatatgaatgatatatacattcccgaggtgcgcgggcacctcaagaaaaacataatcggtttacccgaggctatcgggaagg

SEQ ID NO: 2957 - DNA, 7615 bp, Unknown
  16S sequences of unknown bacteria
atcggctggttcgtcccggaagtcatcgtctatatggctttcgtcggcgttgcgaacttctcgcagtcgagctatgagctcggctacgcgttcaagttcctgcgcatgatgatgctccttctgaccgcgctgttcggtcttcccggatatatctgcggcgccgtcctgaccttcgtcctcgccgcgacgcagaaaacgatcaacgggaagaggaactacctctacccgctgatcccgttcaacgcgaaggcaatgaagcgtctcgtcgtccgcgagcgcctgagaacccgcgacgagtaacattaatccaccgcctgtggattgaatctcattttatctcggttgtgtccttcatagcggtcgtgcagatctcgaagaatgtctttccgcggttgattgtgagctcctcgcccgcctcgttgtagagcttcacggggatgtccttgccgtccttctgccatgtgatcttctcgtactttccctcggtgaggtaatagccctcgccctttccggtcgtcgtcacgtccatgtggttgtagtcgtcctttgtgctgacggtcgggagatacatcacgatgacgttcgtgaaggacagctgcttgttcgccgtgttgtccatatgcttatcgccgaggaactgccagcggtaatagacgtgctcgtcctcgttgtactcaaaatacggctgatgctgaccggagaacttcaccttcaggaaagtcgcgtcgcctgtggacggaacccgcgtcgtgccgtactccacgaaattcagcggagactcaaaaccgtccttcagcgtcgtgcggcactttatcgcctcgataccgctcgcgataccctctcctgtggtcatgaggctgtgctccatgcccatcttcttccaccttgtctcgtcgcggtagaaagttcccttcggtgacggaccgttgactccgtcgaggtgatcgacctttctcgactttatctgcgcgtaagccgtctggcttccgcccgcgtggatataaatcgcgtcgtggttcgccgcgaaatcgagataatactcacgcgaagagcgcaccgacccgacgaccggcagatcctcatactccatcgacagcatcataagcctcgtctgccatccctcgacgatgcactcatacatcacgtcggcacaggaaacgccctcctgcggcgtcgcgatcttaatattatttatcattatagcagccggtctgcgggtcgccaaatccttatccgcctcaagcccggtcaagggatttatgaactccggctcagttgattccggctcggtttcagtttcggtctcagtctcagtctcggtagtttccggctcggtcgtctcctcctcggtcgtctcagctgtcacggtatcaacgtcaaacgtcacaggcggctcctccggcgccttctcctcgccgcagccgaccgccagcgtcatcatcgccgccgacagcatgatagttaaaaatctcttaattttcatattacaataattcctttcgcggtcagagccgcagcagacaaacgtcccatccatcccccacacaagccgctcaccggtccatttaatataatttacaatttgtatgtagaagatgaactaccaatatgttaaaatatatatagtgaattcagaatgggaggaagacaatagtaatgagtgactcaaacggaaaatacctgatgttccgcggcaaaccgctcgtccgtgacggacagcagatctgctggggcgacatgaaagataaatatgtccttgttctcggaataatgtcgaccaaaaaggccggcgataaggaggttcccgatcaggtcctgatacaaatccaaagcaccgacgacggaaaagtagtcaaagtcggctccaaaaccggtctctacgaagccttcgaatacggaatgatctggctcgaatccgaactcaggaacgcgtaacacatcaccataaggctgccgcacgtcagtgcgacagcctgttttcttatttttatttatcttcgatgaaagtaaccttcttcatcaccacgtcatgaatcggcttatcccgcatatccgtatccacagccgcaatcctgtccacaacatccatcccgtcaacaaccgttccaaacgccgcgtaatccccgtcaaggaacgcagcgtcctcatggcaaataaagaactgcgaagaagcactgtccttaacctgcgtccgcgccatagatatagtcccgcgcgtatgactaagattattagtcaccccattagacttaaactcacccttaatagtctccggcgagccccccataccagtcccggtaggatccccgccctgtatcataaacccattgataacccggtggaatataagcccatcataaaacccttccttaacaagcttctcaaagttagcgcaagtaatcggcgccaccgccggataaagctgaagcgttataacgccgccgtcttccatttcaatcttaatcatttcgcataccctttcgtaatatataattgttagcttgcagggggagaggggaaaccctttgaaaagggtttcccctctccccctgcaccccctcttcccttctcaaacttcatacaagcaaaggaaaaggaagtgcgctataccaaaactaaatgtggaatcgctttcgcagctcactgcgagtactgcggctcgaaaagactattgtcacggcaaaacacagccaagagacacccgcagccgcgacaacaggccactctatatcggaaaacccggcaatccacaaaaacacgtcgagcaccccgagcaccgcgataacaagctgataaagcgtatacgcccgatacttcaccggccttatcagtatgcacagcacaatcgtcaccgccgccgccattataagccccggtatcacataattcacagaccaccgccggaaccccgtcagataatcaatgataaaacaaaacccactcacagtaagcagctgacaaagcgtaacagaccccggattccgcgtatcccgcgccagattcatcaggttcagccatatataaacaatagccgccgccgtaatgaacgcccatggactctccgtctttatcagatgattcacgagaaaactgaccgccgccacaacaaccgcaaggaaagtcacaatcttcacgaacatcctccgcgaaaaccccgtcctcacataaggataatcctcctcaaaatcatcgtcgaccacctcagtctccatatcgcacagcggacagtactcaaggtcattctcaagcctcacgccgcagttacgacacacccgcatatcatgacccctttccggctttcttcgccgcttttctctcagccttccgcgccttcttctcggacttccgctccgacttttcggacttcttctccgatttacgcgaagccttatccgctttccgcttctccttctcccgcgacttctcctccgcggtatccggctccggcgtctcgttggaggttatcgtcacctctatcccctcggacacaagctgacgtatcaggaaccgctcaagcgaattatcgtcgacagtagaagtaaaggtcagcgccatctcgttcttatacgagcagagcgtcgccttcttcgggtgagtcctcgagccgccgagcagcatctcgaaccgccgtatcctctccccggcaggctccgggaacgacatcctcccgagattcgagaaagttatcgtataccgtttttccgcctgcgcgaacagaatccgcataacaagatcctttatccagaccggaacgaacttcaccggaccgatcttctcgatcccgacgttcgcgtcgatctgccgctcgaaatactccctcgtgaggcaggaatcgaaccgctccttcacctctgagagcacctcgtcaaaggtcatcccgcgccgaggtctcacgccgatgctcacgtgcccgaagaaattccgcatagtcgtcgaaccgaacatattcctgagattgaccggaagactgacgacgaccggtcggttcagcatcgagcgcctgtatgacgtgttcattatcgaccagatcagcagcgcgcacatatactcggacatggtggcgtccttttcgtgcgcgagcgcgagcattttgtcggtcggcaggctcgcggtcagaaccccgagcctcgtgtcgtcgtacttgaagccctgtatatggaacgcctccggctcccgctccttctttttccggtctggagcgccggacatacccgaatttctcgcgaagctgtcctcgtccgaatccctcgccacacggtcgcagtattctcttatatactcctgcggaagcgcgctgccgtcgagaatactgaaatagcacatgaggattatctgcaaaaatctcgcggtccccatgccgtctgacagcgcgtggaacacctcgaggttcacacgcttgtggtaataagtcagtctgaacagaaacccgcgctcgcgtccggctctccatatcggcgagcacggataggcgtactcctccctcaccggcggagtctcgcggttagcgtcgaaatagtaccagaacagcccgcggtgcagcttcacggcgaacgccggaacaagcttcagcgcccgtgcgagcgccttttcgagcagctccgggtcgacctcgtctgtcagcaccgcgcttacgcggaagacgttgctgcccctcgaatcggagacagcggggacgatcttcgccgcgttatccagtcgttcccagtaattgtcgccgagcccgctgtgcagagctcttttgtcggtcaaatatcgtcacccccagtaagtcggaatgtccgacggttcagactttgaagactctgccgtcgtttctcgcgcttctcggcttcggctcgccgtccggatagccgacaatgcagttgccgatgccctcatagtcgcccttgacgccaatgtcggagagccacttcttccactcgggtttatcgaagacttccttcgcgcggtgtatccagcatccgccgagcccgaggctgtgcgcggcgaggagcatattctccatcgcgagcgacccgtcgtaaacatgcgtcgggcaggatttatcggcaagcaccacgagaacgaccggagcgccgtagaacgggtcgccgttcatccccatcacggcggcgttcgcggcggagagcctgtcgcgcgtctccttgtcggtgacggcgacgatgatcggcgactgccggttcatcccggacggagcccacagccccgcatcgacgatctcatcaatatattcgcccggaacggcgtcaggcttgtatttcttgacgctcgcgcgcgatattatattctttataaaatcattcattgatgaaaagccatcctttcatgaaatcatggaatctccaaaagtattcctgaaatattataccgcagatatggcggatatgcaagcatattttgttaattttaataatataaaaaccgtcgtaaggacttgacccggacgtttttttgagatataatattaatatggcgtcagaacagcatgccgtcctcgcggcgtttgtccgagaagccctcgccgagcacctccgccgcctggcaaacgatgacgaaagcgtccgggtcgacctcggagacgacctccttgagaagaaacagctcccggcgtccgacgaccgacattacgacgcgcttttcctcgcctgtgtagctgcccttgccgtcgagcagtgtcgcgccgcggtcgagcttttctgagatgcgtttcgccgtctcctccggcttctttgaaattatgagcgcgagctccgcgtgctgtgagccgtcgagcatcaggtcggcgagctttcccatcgtgaagatcgagatgaccgaatagaggagcccgtcgaagctgcggagcaatatcgccgaaacgccgacaacgacgagatcggacgccattataagcgtcccggtcggaagcttcctgaactttcgtttgagcaggcaggcgacaagatctgtgccgcctgtcgtgtacccgcgcgcgagcagtatcccgagcgagacgcccatagtgacgccgccgagaagtgagcagagcagcggatctgtgaccgtgaccggaaacacggtgatgaagtcggtggcaaccgaggtcgcggcaattccgaccatcgtcctcacgaagaactttttcccgaaatatctcgtgttgagcagtatcagcgggatattgagaatgatgatcatgacgccgaccggaacgccgaagaacatattgattatcgtcgcgataccggtcataccgccgacgacgatccctgccgggagaaggaacatattcatcgacgccgaaaaaagcacggcgcccgcgatgaccgccgccgcgtcaaaaagatatttcgcgtatttatttctggtattttccattctgagcgtcctttcgtactgtcagatttctatgttattattataccacatccggcgtggaatggcaagcggatattccggcgataagcaaaatatttatttgggacacaccgaacaaatcgttttttctcggaaaaatgacttggatttatgaacttttttctgagaaaacaaccttgaatcagcgtttcattaaaaaaggagattcacagtgaacaatataatcctgacaggaatggcaggctgcgggaagagctccgtcggagttctcgcggcgaagaagctcggatactcattcatggacaccgacctcgtgctccagcgccgtgagggcaggcttctctggcagatactctccgagtccgggctcgacggcttctacagggccgaggaagaggctctgaagagcgtcgaggcgtcaaacaccgtcatcgcgaccggaggcagcgccgtctactacgaggcggctatggctcacctgaagtctctcggaacagtcgtatatatgcgcctgccgttcgaggagatcgaaagccgtatccggaacctcgcgacaaggggagtggcgatgaagcccggaatgaccctccgcgacacctacaacgagcgtctgccgctatacgaaaagtacgcggacgtgacgatagactgcacaggctcgccggagcacaacgccgaccagatcgtaaaagcggtcgccggcaactgatatgtatgacacaaggtcaggacatacccgcgggcagtcctgaccttgtgaaatgtcagtcgttataataaatctcaagatcgccggagaccgttacatagtcgagcgggtcgacatagtcaccgtttatcttcatctcgaggtgcacatgcggctcctcggcaatctcgacgagggcgctgtcgccgacataaccgatcacctgtcccatctcaaccgtcccgccgacctcgatgccctcggcgatgtcctcggcgaggttctggtaggtcgtgtagataccgtcgccgtggtcaatcgtgacgctcctgcccatcatcgggtcgctccagattctcgcgatatgcccgctcgacgacgcgagaaccttcgtcccgaccgacgccgagatatcgactccggtgtgcgcgcggtagtcgttcattgtgatcgagtagacgggaatgtccgtctcaaacgcctttccggggattccgtcgaccgggagagcgaagacgcgctttcctacgtcggctccgttatcggtgactgccgccgcctgatcatctt

SEQ ID NO: 2958 - DNA, 21381 bp, Unknown
  16S sequences of unknown bacteria
acaaataatgtataatataaaagttaatatatattaaattaggagaaaaacagaatatgtcgagtgttcaaaaacaaaaggtggtaaaaaccaccattgacacccttgaattcggtgagatagacgccgaaaaagagggcaagtataaaaagtacaaactacccgacggcgttgacaagggaatgatgcgcagcgatattcttacaatcgccttgccttctcttgtcgaacttgttcttacctcgcttacgagtatggccgaccaaattatggttggcagattgcccgggcagttgggggtacaggctctttccgccgtcggcctttgcatgaaccctaagttcattcttatgacagctcttatggctatcaacacaggtacaaccgccgttgttgcaagatataggggtatgggcaatcaggaaaaagccaaccaaacatttaagcagtcacttatattcaatattttcttgtctgcaattatgatggttataggcgttgtgtttgcaagggaacttatcggccttattgcaggtaacggtatttccgagacaacggtagaatatgccgtcacatatttcagaatacagatgtacggctttatcccgctgatgatgacaaacaccgttacatctacattgcgtgccataggggattcaaaaatgcctatggtttacaacacaatagccaatgtggtaaacctgttctttaactacggccttatttacggtaaactgggcatgccggaaatggatgttgcaggtgcttctttggctaccgtcatcggtcagtgtgttgcatttgtaattgccatgcacataatgttcagcaaaaagagatatgtttatattgattttaaagaaaagaccggttacaacaaaacaattatgagcaatgttttgggcataggtttgccgtcaatgctggaacagctttgccttagaataggtattattatctattcaagaattgttgccagcctgggcgatatttcatatgccacccacatggtatgtatgaacatacaatcacttacatttatgtcgggtatggctttccaaaactctgcaaccacacttatgggtcagagccttggcagacgcagacttgatatggcggacaactacacaagaatgacaagaaatataagtttttggatttcttgcattatcggtgttattttggcgcttttcggcggacaaatcgtaaatatttacaacagcactcctgaaattgtagaaatgggcggtaaacttcttgccattgttgccataacacagccgttccagtcatcacagtttgttacaacaggtgctttgagaggtgcaggcgacactaaatatcctgccgttgttatttttatctgcacccttattgtaaggtctgttttaggttatatattcgtaattcagctggatatgggtcttataggcgcatggtttgccattgttgttgaccagttgcttaaaacagcaatgatttttgcccgttataacacaggtaagtggagattctttaaacttcataactgatttatatttatcgcacaatggaatatttttaccggctgtggtttaattgactcggccggtgattttttgtgcatatgttgttttgcacaatttaattgtaattgtgctgtaaaatcctacaaagttatttgtaaaatcctacaaagtttcaaacttttatttgtgcattgtgactaagtcactgaaatataataaaagaagtgatatactgtaatcacactaagggaaaggaaatcccaaggtgataattatagattaaaaaagaggtacattaccatgacatttacaagattttttaaagaagccgcacatagctacgctaacaaggttgaaaacaactaaggtttaaggcggtcacaacaaaaataaggctcaaaatcagaaccaaagaaaggagccgtaacaatggctgtacaaatgattataaaaaatgccgatttcgaaaagaaaatcgaaggaaaaaagaatataatcgacgaaataagcggttattccagaaatgatgagacatgtgacacagatctttgtaaaaagcgtgttgcaggctctaacaacaaaattttattgagagtgtaattaaaaatttatatataagacggagctcaaatgagttccgttttttgttgccatttttattttaaaccacatattaagtttttatcggttgtagttgaatttaatatatgaaatatgatattataaatttaataaattttggggattgaattattatgagtaaaatgaaaaagataataagcgaagaattcgactttattttccaaacatctccgaaaccttgcatcttcatgggctcaggagtacataggagcacaaaatggaattgggagtaaaagtttgatccaactgctatactatcagcaaaatgataattcgcgtaaaatacatggtgtattgatggatatacatccagatatacttatatggagggataaaaatggaaactaagattagtcaagaagaaattatgcagttgttggataagctatatgatcagtgcatacatggaattgctaaggtgagtccaccgattgagaaattggcgaatgattacttggcaaaaagtaaggatgttgatacggcggcaaagaagtttgtcaattatcagattgccaaatgcactacctcgggttttataacaggtctaggtggacttataaccctaccggtggctattcctgcaaatgtaggaagcgttatatatgtccaaatgcgaatgattgcttgcttagcatacatgggcggttatgatacagatagtgacaaagtacagacattggtatatgcttgccttgcagggatttctattgaccaaattctcaaacaagctggaattcagtttggaaacaagtttgcaatggctatggtcaagaaaattcctggtgaggtgctcaccaaaatcaatcaaaaggtaggattcagatttgtaactaagttcggcacaaaagggattgttaacataggaaaggccgttcctgtcgttggcgggatgattagtggcggatttgactttgtagaaacaaaagttatagctaatagggcatataaaatgtttatcaacggtgatttcaatgtgtcgtctgaggatgatgaaaaagtcattgaaattgacgattgagcagtctaaacaactggaaaaggctaaaatgagagactccatccatttagatggagtctctttttatgtcccctgatgaataaatctacattaaggttggctacccaagcagtagcaacaattaacttaaaagggagatgaataaatctacatctgggtcagccaactatgccttagccacaaataacttaaatgggagaatttttatcggttatcattgaatttaatatatgaaatatgatattataaatttaataaattttggggattgaattattatgggaaaaatgaaaaagataataagtgttttggcggtgttttttatctgtattacaggtatatttatatatgaagtaagaaaagaggagcattatgttccacacacccgggaaattgtttttgatgacaaaaaattcccggcaacggcacttgtacttaaagaacagggaacggaaaattttaaccttgccgattgtctgacatttttgtccgatgtggacaatggcacggcaaaccttgaaaccacaaaaaaggttttcggtttttatgagtgtaatgtaaaccgtgtttttgacgactatgtgccggttataagctaccaatcttcagatgaaaatattgcaaaaatagacgaaaagggaattattactccaataagtaaaggaacagccaaaataaccgtaacggcagacgatgtaagtcttgatattccgattacggtttacaagcttgttaaactcaccgacgtggagcagaatatccttatttttaagggaaaaatcaaaagtattttctcattaagcgattatgaaataccgatgtcggaaatttactcctcaaatgaaaatatagttgcggtaaatcaagacggcactattacaggggtaagcagaggtaaagcggaagtctttgtctacacaaacgaagaaaagaccgaaaaactttcaacaacggtaacggtaaaacaaccggttgaaaccgtttcaatcaaaaatataacgatttatatgggggataccgctactttgaatgccgcttatggaccgacagatgctgactacggcacatcttttacttacaaatcggcagatccgtcggtggcttttgtaaacggaaacagtatttccggtattaaagcgggggagacaacaattacggctgtttccggcaacaatgtaagcggacaggcaaaagtaacggttttggcaccgccaagggcaacgcctaccgttaccactataaaaaaagaggaatttgacgcctacgaaggtgaaaagtataccgacggttcggattatgattcttatttcaaaatctcattcgaccacccgattgcttctttcaaacttaacaatataagcgataacggcagcactaagacaacaggcagtgccatatataataatgtctcggtaggggccggttcgcctatttattttcgggtgtatgtaaatcaaagtgatgtttttgattatatcggtttttcttatgtgaataaggacggcacaagcagagcatactctttgcacacaagcggcagagacggcagtatgcttatgaccgaatactaaaaccgggttacatggatgttttatttgcacacaagccttaagtgccgcttatttgtgaaatcttatttttaataaattcataatacttttttcacttgaaaagggcggtttattagtatataatggtgacattaaaaggggtgattttttggcaaagtatgtagccgattcaaacaaggcaaagcgcagaaaacagcgcagagccaagagatatgccatgttggccacaatggcggtttttgttttggttttatctttcggtatagtaaaggtgattgaacatttcagcaccgacggaaaagatgttcctatgctcaatccggaacaacagcctaatacggatgtggacaaacaggcagacgattacgatacatttaccggaccggtacagcagacaataaatttgggtgttgtaactccggagataaatatgatacaggttgccgaaaacggtcgagttgacatttcctatttcagcgacgcagtgtttatgggtgacagtctggcagacggtttcagggtttatgcttcaagcacactgggactggacaacggttctacgagatttttaacccgtccaagtctttcaccaagttcatttactcagccgggcgctatgattgacttcggcggcggccccattgacccatggcggacattggagcaaatcaacccgggcaaagtttatgttaccatcggtacaaacgctttgaacagcggtatggatatagacacatttataaagggttatcagcttatggtagaaaagattaagcagtatgccccaaatgcggttatatatataaccacaattacacctacggcagccacagtacaagattcaaagcccaatatttccattgacagagtttaccgggctaatcagggcattgcgagaatgtgtaacgaaaacggacttgctcttataaatttgtacgatgtatttaagagttcatccggttatatgcgtgaggatatttgtgcggcggacggtattcaccttaccccaagcggatatttggaatggcttgactaccttattacccacacggtgtacaaccctaacagcccgtatattcagggctcgccttatgcaatgtaagcaagaagttaataaattaaaccggcctttaaggtcggttttatttttagggacaaataatgtgaataatttttgttttttgcaataaaaatacttcttatttctttacatatcaaaaaaatagtgataaaatgataactgtaaaaaaggcataagtgtgccttaatataaggaggataaaattccaatggcaagaaaaagaatttctatggatggcaaccaggctgccgctcatgcttcatacgcattcagcgaatttgccggtatctatcctatcacgccttcaagccctatggctgactatgctgaccagtgggccgttgcaggcagaaagaacttgttcggtacagaagttaaggttgtagaaatgcagtccgaagcaggtgctgccggtacagttcacggcgctttgcaggccggtgctttgacaacaacatttactgcatcacagggtcttcttttgatgattcctaacatgtacaaaatcgccggtgaattgctcccatgtgtttttgacgtttcagctcgtacagtagctgctcacgctttgaacattttcggcgatcactcagacgtttacgcatgtcgtcagacaggttttgcaatgcttgcagagtccaacccacaggaggttatggaccttacagctgttgctcacctttcaacaatcaagggccgtgttcctgttcttaacttctttgacggtttcagaacatcacacgaaatccagaagatcgaagtttggtcaaacgaagatttggctgatatggttgactgggacgctatctcagcattcagaaagagatcattgaaccctgaaagacctgttctccgcggtacagctcagaacggcgatatcttcttccaggctaaggaagcttcaaacaaatactatcaggcattcccggctatcgtagaagattacatgcacaaagtaaacgaaaagatcggtacaaactaccagctcttcaactactatggcgcacctgatgcagaaaaagttatcatcgctatgggttcagtttgtgacacagctgaagaagttatcgactacatgatggaaaaaggcgaaaaagtaggtcttatcaaagttagactttaccgtcctttctcagctaaacaccttgttgcagctattccggaaacagttaagaagattgcagttcttgacagaacaaaggaacctggctcaatgggcgaacctctttaccttgatgttgttactgctttggcaacagaaggcaaattggcaggcaagacagttgtaggcggcagatacggtcttggttcaaaagacacaacacctgcttgcatctttgctgtatttgcaaaccttgatcttgaaacacctaaggcaaacttcacagtaggtatcgaagatgatgttactaacgcatcactcccacttcctaaagatgttcctgcaacagcacataaatcaattatttcttgcaagttctggggtctcggcggcgatggtacagttggcgctaacaagaactcaatcaagattatcggtgaccacaccgacaaatatgttcaggcttacttccagtatgactcaaagaagacaggcggcgtaactatttctcacttgagatttggcgacacacctatcaagtcaacatactacatcaaccaggcagactttgttgcttgccacaacccttcatacatcatcaagggttactcaatggttagagatgttaagccgggcggcacattccttatcaactgccagtggtcagatgaagaactcaaccaccacttgcctgcagtagctaagagatatatcgctaagaataacattcaggtttacacaatcgacgctatcgaccttgccaaggaaatcggcatgggcaagagaacaaacacaattttgcagtctgctttctttgcacttgctaagatcctcccggttgacgaagctgttcagtacatgaaagaaaaagctaaggcttcttacatgaagaagggcgctgacattgttgaacttaactataaggctatcgacatcggtaaggacagactccacaaggtagaaatccctgctgattgggcaacagccgaagatgcacctaaggcagcatctaacaacaagtacacatcagaaacacagaagtacttcaacgaaaagatcgttgaacctgttgatatgatgaacggcgacgaacttcctgtttcaacattcgttggtcacgaagacggtacattcccacttggtcttgccgcatttgaaaaacgtggtgttgctgttgacgttcctacatgggatcctgcaaaatgtatccagtgtaaccagtgtgcttatgtatgttcacacgcagctatcagaccgttcgctcttacaaaagaagaagttgccgctgcacctgcaggtttgaagacaacagaaaagatgatcggtaaaggttgcgaagacttggtattcgttatggcagtaagcccacttgactgtatgggttgcggcgtatgtgtaagcgtatgtcctgctaaagaaaaggctatcacaatggttaaccaggaaacacagcttgaccaggctgcagtttggaactaccttgttaacgaagtatcagttaaggaacttccgttcaaagaagattcagttaagggctcacagttcaagcagccgttgcttgaattctcaggcgcttgcgcaggttgtgtagaaacagcttatgctcgtcttatcacacagctcttcggtgacagaatgtacattgctaacgctacaggttgttcatcaatttggggcggttcagcacctgctacaccttacacaacaaacaaagacggtcacggtccggcatgggctaactcattgttcgaggacaacgctgaattcggtcttggtatttacatgggtcagaagacaatccgtgaggcattgaagaaagaccttgttgaattgaaagaaaagacaactaacgaagctaaggcagcagctatccaggcatggcttgacacttatgatgacggcgatgctaacaaggcagcaacagctgacttgatcgcagctttggaagctgatcctgaatgtccatactgccagaagattttgaaagacaaggaataccttgctaagaagtcagtatggatcttcggtggcgacggttgggcatacgacatcggcttcggcggtcttgaccacgttctcgcctccggcgaagatgtaaacgttatggtatttgatactgaggtttactcaaatacaggcggtcaggcatctaaggcttctaacatcggtcaggttgcacagttcgcaacagccggtaagtcaatcggcaagaaggatcttcctgcaatcgctatgtcttacggctatgtatatgttgctcacatcggtatgggcgcagatatgaaccagacaatcaaggctatgaaagaggctgaggcttaccacggtccgtcacttatcatcggttatgcaccttgtgaaatgcactcaatcaagggcggtatgacaaacagccaggctgaaatcaagagagctgtaacaacaggttactggaacctcttcagatacaaccctgcacttaaagcagaaggcaagaacccgtttacacttgattcaaaggcaccacagggcggctatcaggacttcttgatgaacgaagctcgttattcacgtttgaaggcttctaaccctgaaagagctgcaaaactctttgcagagagcgaaaaagaagctaacgacagatacgatcaccttacaagattgattgaattgtacaaataatctgtaagttttggttaaatcagttgtaactaaataacagacacccctgttcgagcgctcggacaggggtgttttgccatagattttggcaaaacaaaataaaacaggcggtaattatttacaaattaccgtctgtttttatatgatttgatttttagatttttactgccccatgggttgcagggtgaagaatttcgatacaattttcgccgaatattttttcaacggcttttgtaaatatttcctttgtgccgtcttttacacaacacaacaacttccagtctgcggttttaggcaggcatttgtcaaaattcttgccgcaggtttccgcctctgttttaacggtggcctctacaacagggctgccggtgccgccggtaacatttttgcgatagagtttttcaaaattttcttgggtgtaaaagtccgccaaaaacagaaccgattctttttccgggttggacattttttcaattttggcgtaaaattcttcttccgacatatcctccggctcgcagccaagggcggaaataagcctgtctatctgtgcttcggcaatatcctcgtccaaattcaggtttgttttgcctatgtttacaacatacataccgtagccggcaaaattcggtttgatttcttttaaaatcggcttttccgggtttgtaaaatcgcctaaaagagtgttgccgtttaaagatgtgtaagggtcggtggcgtaacattccatattgccgtagtttgccaaaacccaccggtttatgtcggaaatttctctccggcttaaacctgcggagaacaaatcgttaaaaacatacagcagacttgtgcaaaaatggcttgcttcttcaagacctgccccgggcaatgtgtcgcaacaggcaaatatattgccgccggttacggtaattttgcggttgacaagggcggcgcaaacgccccttactatataggcgcaggtgccagtttcctcgttaaaaggacctgcctgcttaacatctattacatcttggccggaatagcccaaagcggaaaattttacaaatccgctgtcgtttttctccgcccgaataatccggcttttgtcggtggctatggaaaaatcctccccatccccggccagcaaaacagaataaggcacccgataaaccccttgccgtactgtgccgaatttgtttgtaaattcattttttgcggtttctatggccgctttttcaatgtctgtaaattttacttccatacttgcacctcacaattaacatattatatatgattatatcacaaaaccgaaattaaaataaagatatatcgagtattgtgaataaaatatttgtgaaaattttaatatcacaatgcgttctaatattgcataaagctgtatgtaatgttatacttttagtaagtaaaagaaaagagggtaatattatgttaaataataaggaaaatacgattaaaaacttaaaatcctttaattctaacggtatactcttttctgttatagggattgtttttgcaattttgaccggccttttttcacttgataaatacgcaatggcatttttcacaggctatgccggatggcggattgtaaatatttacatattaaaaaattttaaaagagataaccgggatatatgcgacaatggggtatttgagcaaattataaccttttattcttcggttatagtgcttttctttgtgatgtacactttaagatatatattttttgatttgataggctctgcaataatgttttatgcggcctcggttatagcttggttggctttggctttacggagtaaaaagattgacgccggcaaggcgataaaagcaaattaagataaaaggacagcttgattataagctgtcctttaaatttgtttaaattagttctgtacgtttattttacacagggcttcttcggtgtaaaaatagtaattgccggttatgttgtcatagaaaacatctataacaggatatttatttgatttaggatatatactttgagcagtcggcttttcgttattttcgcttaggtggattacacataggctgttatccgaattttcttcgtagaataaatttccgttgatgtattcggtgatagaaattgtgtcataagcagtatattttttattttgatatacaaggtagttgtgcataacattgtccggatcgtagtaagtgtaaatataaccgctgtcggtatatgcaaagcctcttaaatataaaggcaaaacatctgtttttgttattttacccttttccagttttaaaatcgttgaatttttatcatctttaccatgtaaaaatatttcttttccattgatattaaaataaaaattgtcgcaagtgatattatctttaatcggcattacagtttcaaagccatttggggaatatgaatatatcccggttttatcattatcctttaaatcatggtaataagtgtacagtatatcttctttttgtaaaaattcaggggcctcgccgttagtcgatatatcacccttggctaaaacagttatatcgttgtcggctatttctattataaaccatgtataaatatcctctgccggttgttgacgatatacaccggacaaaagaatttttccgttgaataagacaccattaaatacggacaaattaaaacccttaatatcgtaactacggtttatcacattatcctttaacgagtaagtgataactctgcttgtattattacacagttgccccggccggtcggttacatcatacatttgatttattaaaaccgtatcattgtttatgtctaaaatataattatatgttccgtcactgttatcaaattcttgggttaaattcataacctgggtatatgctatactgcttgtcggcgggctgatgtggggcaatgcttcactgtcggtttgcttatccacagcactgcaagatgaaaataaaaccagcattaagataaacagaatattcttcatagtcaaaatcacctacttatcaatcggcaaaaccgatgtacaaataattgttttaataacctttcaattacaggatatcataaatccaggaagttatcagtaaaaaagaaaattttcatattttttacacgactattccaactgccggccaagcatagccaccgccgtaaaggcaatgtccgtgtttactctccggccggtaaaccttgtggtgcttatatcaaattgattaaatcttgcttttctcaaatctgcttttctgaaatttgtgtttgataaaatgcaatcggagaaatcgcagttttcgcagacagcgccgtcaaaatcccgataggacaaatccgcaccggtgaagtttatgtcttttaactttttacccctgaaatcccgatattttaaaaatgcgtagctccaattaccgccgtttatatccacccgggcaaggtcaagctctgtaaattggctgccggtggttttgcagttgttcatctgccgtgcaaaggcggtgcaaaatttaaatgtgcaattcagcaaagcgcaggttttaaacacagcgccgttaaacttacagcttacaaatttacagttttcaaatgatgtgtggcttagcagacactcgtaaaaattaacccccacaaatgtacagcggataaatttaacattttctatattcatattccgccaatttttatcttcaagtctttcgtcttcaaaaatttcttccatatttttacccccgtttttaatgattataacggcatagatgaaataatgcaaattttttaaagcatacttgacagaagggtaaatgagtgatattatataaccgtacccctcagggggaggggtgcatatcaaaatgaggtaaaattatggtagcagataaaaataaagttttaacctgccttaaaaccgcaagggggcagcttgattccgttataaaaatggttgaggaggacagatactgcattgatatttctcaacagattatggcggcagaggggcttttgaacagcgcaaacaggcagattataaccgcacatttaaaacactgcgtaaataacgcagaaaccgaagaggacagaaatcggaaaatagatgagcttataaatcttgtaagcaaaattatgaaataaagatatatttttgagaaaggatagagtatgaaacagaaatacaatgtaacaggcatgacctgctcggcctgttcacggagagttgaaaaaagtgttgcaaaactgccgggtatagacagcgtaagcgtaaaccttttgacaaacagtatgcaggttgaatacaaggacggcgctttgacccagcaggacattatctcctgtgtggaaaaggcaggttacggcgcttcaccggcggatgaaagtgcaaaatccgcccaaaaatcaacacagcctaaggaaaacatagcacagaaacaaatacggcatatgaaaaaaagacttatggtgtcttttatcttctgggtgccgcttatgtatatatcaatggggcatatgtacggcgcaccgttgccggcgtttatttcaggccatgcaaatgctgtgtcttttgccttgacccagtttattctctgcctgcctattatgtatatgaaccgcaatttttacgaaaagggattttcttcacttttccacggctcccctaatatggacagccttgtggcagtaggttcttccgccgcattggtttactcggtattcgcaacatatatgatgagccacgctttgggcgcaggtgatatggaaaccgtggcaatgtaccacatggacttgtactacgaatccgccgccacaattcttacccttataacaatcggtaagtatttggaggccaagagcaaaggcaaaaccagcgaggctttggaaaagcttattgatatggcaccgaaaaccgccattgtggaaaaagacggggcacaggttacaatccctgttgaagatgttgccgtaggggatattctcatagttaaaccgggtatggctgtaccggtggacggcgtggttattgaaggctcaacggcagttgaccaggcggccatcacaggtgaaagtatcccggttgaaaagaatgtgggtgacaatgtaatcggtgcaacaatcaacaagacgggttttatcaagataagagcgtcaaaagtaggggaggacaccgcttttgcacagattatcaagcttgttgaggacgccagcgcaacaaaggcacctattgccaaaatggcggataaaattgccggcgtatttgtgccggtggttatgacaatcgcccttgtaacatttattgtttggtactttgttctcggcagaggttttgtattctcactgtcttgcgctatcacagttttggttatttcctgcccatgtgccttggggcttgcaactccggttgcaattatggttggcaccggcaagggcgccgaaaacggcattttgataaaaagcggcgaggccttggaacaggcccacaatgtaaatacggttgttcttgacaaaacaggcacaatcacacggggcaaaccggttgtaacagatgttatttgcgacagcaacaagaaggaatttataaaaatagccgccgctatggaatcccacagcgaacaccctcttgcattggcaattattgaccatgcaaaggaaaattcaatttcatacccggctatggacagctttaacgcaatccccggaaagggcattgaggcaagcttaaacggcgacgagtacatcgcaggtaacagccttctctttgaagaaaggggagtggatatttctgcggtaaaggaaaaaatcgaagaacttgccgacagaggtaaaacgccgttgctctttgccaaaaacggtaagtattacggaattatcgcagttgcggatgttgtaaagcccacaagtaaagaagctattgaaaagctccgcagtatgggtattgatgtaattatgcttacaggcgataacaagcgcaccgccaaaggcatagcaaaggatttgaatttgacggatacaatcgccgatgttctgccacaggacaaagagagagttgttgccgagcttcgtgacgcaggaaagattgtggcgatggtaggtgacggcgtaaacgacgcaccggcattagttcgtgccgatgttggcgttgcaatcggtgcaggcacagatgttgccattgaaagtgcagatgtagttttgatgaaaaacgacttgctcgatgttgcaaatgcaataagattgagcaaagcggtaatcagaaatattaaggaaaatctcttttgggcattcttctacaactgcataggtattccgctggcggcaggtatattctatatgccgttcggctggaaactcacaccggactttggcgcattcgcaatgagtttttcaagcatatttgtttgcacaaacgctttgagattgaaagcctttaagattgataaaaataagagcgaagaacctgtttcaaacccggtgacattgcccttagaggaggaaagccgccctgttgttacagaagaaaaagccgaggattacaacacaacaattaaaatcgaaggtatgatgtgccaacactgtgtggcacgggttaccaaagcccttgaaagcgttgagggaacaagtgatgttaaggttgaccttgatggcggaaaggccacactaaacgcccctttgggcagcgaagaaagccttaaaaaggccgttgaagatgcggattacaccgtaacttcaatagaagtaaaggatagtaccgcaaaacctttgcgggaaaatatagataatacaaaggagaacagaaaaatggtattaaaaattgaaggtatgatgtgccaacactgtgtagcccatgttacaaaggctttgcaggcagttgagggagtaagcgatgtaaatgtaagtcttgacgaaaagcaggcaactgttacggctgatccggctttggcagaaacacttaaaaaggctgttgccgacgcaggttacgaagtagttgatattaagtaataaatattgacagaataacaaaaagggggcgcaagccccttttttgttccattgaataaaattttggtttattcaagcggtcagtttatcatgcaaattgggacatcttccttttaacaagtacaataagatgttgttggttttgggttcgagttccgtaaaatttaggaaaataaaaaagcggccgaataaaaattcaaccgcttctttggtgcgctagaagggactcaccgtctgctgcggctgcgccttgcatacctaaccggcctcgcttgtgcgctgggatctttgagctaaaaacagtgtacaacactgttttataaacgctcaaagccctctcgggttcgagtcccgtaaaatttaggaaaataaaaaagcggtcgaataaaaattcaaccacttctttggtgcgctagaagggactcgaacccccgacctcttgattcgtagtcaagcactctatccagctgagctactagcgcattcaatgctatattataatagcaccgaactgatagtttgtcaagtattttttatttgtgttattcggcacaggtaaaataagaatatcggtggttattcatttacatatttgttgtacagatagtgatagtacatatttatctgctttggagtgagtgagatttcgtcaccggttggctctatgttccgacaacccaagcagggtaaagtgctaatatattctttttccgcacctatggatttcaaatgctcaacatcggcttttaccgtattttgccaaagagtgatttcatcttttgtaactgtaaaaacaatgctctcatccgaaagcatgattttgtcaaaaacagcgtagttttcctctctttttttagccactgctatatcccgtggatagccgaacatgctcaaagccttgggaatatccggctttgcaatgtccgtgcgctttgaaaccgacaaaaactttaaccacatggcccagtcttcgtcaccgccgatgtcctcacgcataccgccaactttatcataaagctcgcgcctgaacataccgcatgacattggtattcggcatttaacacacatatccataagcgttatgtgatcaaaagagaggggatacatattagttacggtaaattcaaaaggttcaatattggttatggaaacttggaaagccataaccccacttaccgcaaatcctgcctcgggaaaactttccaattttgcaacaaatgtgcttatacagtcggcgtaataatagtcgtcatcgtccaaaaaacaaacgtatttgcctttggcacgctcaattcctatgttgccggctctgcctctgcccacattttcccctgtggcaaaataatttatgttaaggctcggaaagtccgatttcaccatattttcggcggtgttttcaccgtcctcaactattactacctcgaaatttttgtaaatctgattttcaagacttttcaaggtacggcgcaaaacttcttttcttttgtgagttcgcaccactacggaaaccaaaggttcttcttttacaaactcccgtgggtaatctcctcttttaggggcaaaattcgggttgtattcaatttttttaaaattgtttttaaaagtgtatttcaaagccgcaaaactgtcttttgcgtattctttaagcagaagtttacggacgccggggaaagatttcggacttttaaattcttgccaaaattcccgagttcccggtttgtatttatatttttttgaaagaatgagttttgaacccacctcattaagatatttttggttttcattgcaatcaacggtagcactgcatttcacaaacggcaagtaatataatatttcgccggcggcttttaatcgcaaggatgcgtcctctcccaaaaattcggttagattttcgtcaaatccgtcgattttttccaatttttcacggtcgaaaacagtcggaaaagccgacacatactctgttttaaatgtaaccggtgagtagtgatattctctttcttttgggtatgttcgtatttccgcccgggcaaaattcgggtgtttgacttgaaatttatcaatgtttttgtcaaagtctttttcgaatacacagtcgggggttgtaataagcacataagtgttttgacatttttttaatgctttgttcaaaactttgccgggatatttttccgccttggcgtagattatcttgcaattttcaccgaaaaaatttttttcggcatattcgggtaagtcgattgctctccgagagtataaaataatatcaatgttcataattatatattcctcaaacgccaattttgggtgcgatcacaaaccaccaaaacagtaattttccgctttttattttgatgatatcagacaaaagaacaaatgcgaatttgtttcccctggctgttaaaatatcatctttacttacaattccgctttttacaataaagtcaagatttgcagctttttctcttttatccatagcagaatcgagaacttcgtaacatctggcgaaaaaattgtctgtccagtaccttgcccggcttaacatcacatctttatcattattacaatatgttgatataagttcgctcatttgttgtttaagccgagggtaacacttatatttgtttgccgaaaagcttttgctaagtgaaccctctgtttcatggcagatatagcatccgtctgttaacgatatatttttggttaaaaataaatattccaaattaaacagcgtatcttcgccatatctgtatgatgtatcaaatttaagcccattttcctttattagtttaaggctgtacattcggtttacagggccggtgaaagccgctattggggaaatatcaccttttaatgaccccttgataaattcacctattgatataagttttttcggtacatttacagccacggcaggctttgcggaatattgcattactcttgcacaaattgccatttgccgttcatggtctatttgtgcaaggccgtctatatatcctgtggagaattcatcatccgcatcgagaaaaattatatagtcaccctccgcagcgtcaatacccctgtttcttgccccagacgggccgctgtttgctgcttttattagcttaatatttggatatttttgtacatattcttcacaaatttttatagacttatcggtactaccgtcgtcggacagtataattaaaacatcatttctattctgatttaggacagaatctattgctctttttatatatttttcacaattataaaatggtataacaacacttattttatattccatatagacatacctcgctgttgttttgattatacccttttttcttctttttcacaagcggggaataatcaaatattattctgccatactatttttgaggtgattttatggaaaaggaacaggaaaaaggcgtagtttattttgtttacggaaatattcaaatggcgataaccgcaacaaaacatttaattgaaatttgcgaagatgaaaagcttaggaaaaaccttgcggatgatttaattgctctggataaatttgaaaatcgggttttgcgggtcaagggcgatataaaggttaaacctctcagcgccgctcgggaaattggcacggattttgccatagatatgaaaactctgaatgacaaatccgccgaaaaactgtgcgaaatgcttgcgaaaggctatgaaaaaggtgccaagtccgccgcagaaaatatacgggacagcgatggggaaagccggcaagcaatggaacttgcaaagggctacttggaattttgtaaacaaaatcggataaaatacaagggtctaaattgacacaaaatttaagtgtaactttgctttaaaatacttgacaagtatgatatactgtatatgtagcaaataacaggtacaactgttaaaaaatataagaggtataaatttatggcagagtgcacacacgattgttccacctgtggtttggattgcgcaagccgttccgccggcgcaccccaaaaagaaaaaacacatgagggaacacatgttaaaaaggttataggcattgtcagcggcaaaggcggcgtaggcaaaagccttgtaacaagtatgatggctgttaccgcaaaacgccgcggacacagtgttgcagttatggacgcagatattacaggcccgtccattggcagagtttttggcgttaaacagcaggctatggctacaaaacagggtggtattatccctgttatgagcaaaaccggcattgagcttatgagcacaaacttccttcttccggaggaaaccgacccggttgtttggagaggctctattatttcaggcgccgtaaagcagttctggacagatgttatgtggggcgatgtagactatatgtttatagatatgcctccgggaacaggtgatgttcctcttactgttttccagtctttgcctgttgacggcattatcattgttgcgtcaccgcaagagcttgtttcaatgattgttgaaaaggctgttaagatggcaaatatgatgaagataccggttatcggccttgttgaaaatatgagctatgttgaatgcccggattgcggcaagaaaatttatcttttcggcgagagcaaagtgggcgaaaccgcagagaaatataacttgcctgttttggcagagatgccgattagaccggaaattgcaaaactatgtgatgacggcgacatagaaagctttgacggcgactatatgtcaaaggcaatggatattatagagaaatctctgtaacctgcttagatttaagggcaaaataatttaataatgtgactaagtcaccaaagcacgcagaataaaatgcgtgctt

SEQ ID NO: 2959 - DNA, 11254 bp, Unknown
  16S sequences of unknown bacteria
gtatcgttttcaaggttccccgccgtcagttcgtatctctcgctgacagcttagtcatattaccacactctcttttccctgtcaacacctttttcaaagttttttgtacaaaaacagaaagaatttcagaatccgaacgattctgaaattctttcccgtatgcttgcgcaaaaatccctgtttcgcgcagcttagtccatgttatcgttcatgaatttcacggccgcgtcgagcaagctctgcgtcagggcggcggaaacctcgtggttttcggccacagcgttgacgtagaccttgaccttgggctccgtgccggagggacgaatgcagacccaggccccgccctcgagctcatagaagagcacgtcggacgtcgggtagtccaacttctcctcggcgccgccggccacgcgcacgcccttcttgtaatcgcgcacggcgaggaccttcttcccggcgaagccctcgggcgcgcccgcgcgcaggttcgccatgagcgaaaccatcttgctcaggccgtccttgccctccagggcaaaggaggtgaccttctcgctgtagtagccgtacttctcgtacagctccatgaggccctcatagagggtcatgccgcgcttcttgtaccacgcggcggcctcggccaggagcatggaggcgatgacggcgtccttgtcgcgcacaaaggtcccggcgaggaagccgtagctctcctcaaagccgaagaggaactcgtgcgagcccgtgtcctcaaactgctggatcttctcggcgatgaacttaaagcccgtcagcacgtcgaaggtcgtcacgccaaaggccgcggcgatggtcttggccatgtccgtagagacgatggacttgacgaccgcgccgtttgcgggcagggttccggcggccttgcgcccggagaggacgtagttctccaggatgcagccgatctggttgccggtcaggacgatgaagctaccgtccccggcgcgcacgaggcaccccaagcggtcgcagtccgggtccgtggcgaagatgacgtccgcattctcccggacggccagcgcgcgcgccaggtcaaaggccgagtagttttcggggttcggcgcggcgcccacggtcgtaaagtcggggtcgggcttctcctgctcgggcacgacgaagacgttctcaaagccgacttcctggaggatgcggcgcacgggcacgttgccggagccgttgaggggcgaatagacgatgcgcatggtcttgcccatctcgcggcagagctccggctgcacgcagagcgcgcgcacgcgggagatgtagacgtcgtcgacgtccttgccgatgatcgtcaggagcccggcgtccttggccgcctgctcgtccatggtcttggcggaggcgtagtcgagcgcattgatataggaaagcacctcggacgcgcgctcgggcgggagctggccgccgtcctcccagtagaccttgtagccgttgtagatcttggggttgtggctggcggtgatgacgatgccggcgatgcagtgcagatgccggaccgtgaaggagagcacgggcacgggccgcaggctctcatagaggtagaccttgattccgttggcgcacaggaccttggccgcctccagggcaaactccggggagaagcggcgcgagtcgtaggcgatggccacgccgcgctgcggcccgccctccaccttctcgatgaagttggcaaggccctgcgtcgcgcggcggacgttgtaggcgttcatgcggttggtgccgtagccgatgaccccgcgcatgccggccgtgccgaactccagcccgcggtagaagcggtcctcgatctccttgtcgtcgccggcgatggcggtcagctcccggaccaggtccgggtcctgcgcaaagtccctgagccacttttcatacatttgccgtgcatccatgggaactctcctcctttgtcgattctcttgccgaaagaaaacgcggaattcgccctggggcgggggcggctatgccggtgcggctacgccggggcggctatgccgtggcctccaggagctgctgtaggtcggaaaggtgcttcttctcctcctcgatgatgccctcgagcgtgcgcttatagccctcgttccgggtcttgaggagcatctccatgtaaaagagcaggctgtccttctccgagccgatggcgtagagcagcacgtcgcgcacggtctcgagccgccggttcatcagcgacgccaaaaccccgccggggaagaccacctcggccgccaccgcggaaagaaaggcgttggcctccgcgtcatagctctcctcctcgccctcgtcctcgatctccgagagcatctgctcgaaccgggccgcgtgcgcctcctcctgcgcgcgtagcatctccatgagcgcatgggccttgccgccgcgggtcacgcccatggccatgcggtagaaccgctcgcccttgcgctcgatttccgcggcgatgcgcagcgcctcgcggtccgaaaactcgtgtacgaccatatcatccctccggttgcgttcagtctgaatctcctccttaatggtacacatttttaacaagaaatgcaatatgaaattgcctggcccgcgcccctttcacttttttgccgccgcgtcatacggtatactatggaaaggaggtcttcctcgatgaagaatccgcccgcaacgggcctcaacacctacctgctcccctgcgtgcacgacatcgtgcgcctgcgcctgagccgccagtgcgcgtgcctgcgcacctgcgagcccatcccgccctgcttccagttcgacggcgggcacctgtgcggcgcgcccgcgctgcaggacgtcgtcctgcgccccgcgccgtgcggctcctgcctgaccggccagctctgcctgccgatgtgcctgtgcctgtgctgcgagtgcgagcggcgcagcgtgttcggctctgtgctcctgcccatcgaggcgatgctgcgcgcgtcgtcctgcgcgccggcgcagttcgtggcccaggccgacgtctgcgtgtgcgacgcgcagatgcaggacggctgcctgtgcgtgttcttcgacctgatgctcacgctctacgcggcgtgcctgacgcccgtgcagctccagggcgcgtgcccgccggcctgctgcgcgccggactgcgccccctacttcaacctgcccctgtatccgcagctcaggcccccgcggccctgaccccaaactacatcccccgcacagaagaaagaaggaatcccatgatcgagtgcaaggtcgcgacgcttttcaccttcctcggcccggtgacggtcgtggagaccgcgcgcggcgtccggcacgtggacctgctggacgacggcgcgcgccagtttgcgcgcgaggcggccgggcgcttcctgcgcctgcccggcgagccggagtgcgcgcaggagttccgcgactacttcgccgggcgcctgcgcgcctttgcctgcccgatggaccttgtgggcacggactttcagcgtcgctgctggctggcggtggaacggtccgttccctttggcgagacgatcacctacgcgcaggaggcgcgccttgccggaaccacgggctaccaggccgtcggccaggccaaccgccgcaatccgctggccatccgcatcccctgccaccgggtcgtcgcctccggcggccccggcggctattttgccgggcgcctggacctgaagcgcgcgctcctgcgctttgagggctgggcctggcccgaggaatgggacgcgctcgtcccaaatgcagccgaaatcccggacgcaggcgcattgacgcgcccgggggaaaggtgatacactaaccccaaaccatgagggagggaatgccatgtctttaacccaagaagaaatgaaggtcttggagctcctgtacgaggacgcgcgcgtcacgcccgagcgggccgcggtcatgctcggcatgcgcgaggaggacgtccgcgccgccgtggacaagctcgagcaggagcgcgtcatcgtgggctatcctgcccttgtcaactgggacaagaccccgatcgagaaggtcaaggccgtcatcgaggtcaaggttacgccccagcgcgacatgggctttgacgccatcgccgcgcgcatctaccgctttgacgaggtcacggccgtgtacctgatgagcggcgcctacgacctgatgctcgaggtccaggccgagagcctgcgcacgctcgccaacttcgtctcccagaagctcgccaccatcgacagcgtgctctccaccgcgacgcacttcgtcctcaagaagtacaaggtcgacggcgtcatcctcgaggaggagcacgcggaccatagactggcggtgacgccgtgaattacgatcagatcgtcaaccgcacggtgcgggacatcccgcccagcggcatccgcaagtttttcgacatcgtctccaccatgaaggacgccatctccctgggcgtcggcgagccggacttcgtcaccccctggaacatctgcgaatctgccatctactccatcgagcaggggcagacgcactacacctccaactggggcacgatcgagctgcgccgggagatcgcggcctaccttgaggagcgctgcggcgtctcctacaaccctgcggacgaaatcctcgtcaccgtcggcgcgtccgagggcatcgaccttgcgctgcgcgcgctcgtcgagccgggggacgaggtgctcgtgcccgagccctcctacgtctcctacgcgccgtgcgtgcgcctggcgggcggcgtggccgtgggcgtcccgacggatgcctccctcgggttccggctcacgggcgacctcatccgctcgcgcctcaccccgcgcaccaaagcgctgatcctgccctaccccaacaaccccaccggcgccatcctggagcgggaggacctcctggacctggcgcgcgccctggagggcacgaacgtcatcgtcctctcggacgagatctactccgagctcacctacggcggccgcacgcacgtctccttcgcctccatcccgggcatgttcgagcggacgatcacgctcaacggcttctccaaggcctttgccatgacgggatggcgcatgggctacgcctgcgcgcccgcgccccttgccaagctcctgtgcaagatccaccagttcaccgcgctgtgcgcgcccgtgcagggccaggccgcggcgctggaggccctgcgcagcgggcgggagaaccactacgcctccgtcgtccacatgcgcgaggtctacgaccgccgccgccgcatcctggtggacgccttcaaccgcatgggcctgccctgctttgagccgctgggcgcgttctacgtcttccccagcatcgcctccacgggcatgaccagcgacgagttctgcgagcggctcctgcgcgagcagaaggtcgccgccgtgccgggcacggccttcggccccagcggcgaggggcacatccgctgctcctacgccacctccaccgagaagatcgaggaggccgtgcgccgcatcgaagcctttgtgcgcgcgcaccgggaggggtgacgtccatgcagcaggacccgcagcgcgtcttcctcaaccgctcccgtccctacgtcacctacgccctgatcggcatcaacgtcgcggtgttcctcgtggagctggttctgcagtacgttctcggctggccctacgggcagacgatcctcaccctgggcgcaaaggagaacctgctcatcacctccgggcagtattggcgcctgctgaccgcctgctttctgcacgccaacttcatgcacatcgtctccaacctgatcggcctatacttctggggcccgcacgcggaggtcctgttcggccgcgcgcggtacctcctcgtgtacctcgcatcggggctgttcggctcgctcctgtcctacgccgcgtcggagccgctgtccgtgtccgtgggcgcctcgggcgcgatcttcggcatcttcggcgcgctgctctacttccgcacgcggcataagcaggtctttgaccaggtcttcggcatgcaggtggtggtcttcatcgggctcaacctgctcaacgggttcctgagcacgggcatcgacaacctcggccacatcggcggcctggtcggcggcttttgcacctcctacgtcgtgggcctgtaccgggagcgccccacgtggaagcgggtgctggcctgcattgggctggtggtcctggccgcggcgctgttcctcatcggctatgtgcgcgccatgcgcttcctcctgaccggaccgatctaaaagcgccgctccgcacaaaacgcgccgccggaagaaaattcctccggcggcgcgtttttctgtcgcttccgctttaggcaaagggctcgctcgcctccagggtctccaggttcacggcgacgagcgtgctcgtttcggacggcgcgggggccgcgcagccggtcagcagcagcgccaaaaccaggccaagtatgaaggaactccttgcccgcttgctgttcatgtcctctcctccttgcgtacacgcttcggtcgtgccgggacaagcggcgctggaccgcgcaggcgaaccctggcgtcgcgcccaacggccgcacttcatcgctgttttcagatcgctcagcgcgcgcatatcattctgttcatggggaccatctccgttgttcacattatagcagagatgcaaaataaggtcaattacatcggtatatgattataatatttgttttttcaatttcgcccatagggcacaatgcaactccaccaatttttatttcggccttcccacaaaatgctcgttatcctttcgaactgcaaagaaaaaaggttgccttttccattgctggaaagggcaacctcttgcgcttatggtttctctcctgctcctgcgcctcggactttgcatcctgggacatccttcgcacgctggacatcgagtacggtcctctgcccgcttgccgctgtccatttcgctcttcgttcccgtcagaccttgtgtccctttgaaaaacaacctcttccatcggacctatctctgtaggtctcgccttgccgaagcggaaggcaggtcctttttttgcggagcgctgccgccatcccggcgggggtttttgcgccgtgctccgcgggttcggcgcgtatttctctagcccatgggcgtatcctcagcaaactgcggttcgggattcccgctccccctgtctttccctgtgccaaccggctctgttccctgggaagcgttccatcccttggctttggcggtgcgcgttttgcgcggtttcggttttcgattctggacgttccctttgggctgttcccatgcagccacccggccgctcttttccctatggggtttgcgtccatgcgccctttgcgcccgaagcttccgccgtcttggggttctatgcagatttcggatctgtggattctgcgcttcgaaacgcattcacacttccgaattctcgctggatttggaatcgcgctttgcagactttcgggtcttggggccatcccgttggctgccggtggacggagaatccgtgcgtacccgttttcctccggggtccatcgtttcctggcgcctctgcgccctcgtcctctgtttctgcctttgcccgccgaaattctgcgcctcgcgtttcggaaaaagcaggtctatggaaaaagagttcccgtcgcgttttttgtttggtttctcggggtcctccgccgcgtctctgccggcactgcgccagaggcggcgatctttccgctgtgcctgtgtcgttcaattgtagggttcttccgatcttctggatgctgcgtcctgcgcgttttccgggcctctgcccctgcgcttccgcccatcccggcctcgccggaagagttccgatttcagggtttcctcttgatcggtcgtgcagccagcctcgctcttttgctcggcctgccgcctgcggttttttcgccgtccgacgacttcttcgaattgccgcttagccggtcccttatgcaacccctctgttgcatccgtatcaaacacacgctgtcaaggctcttgcgcggtcaatttccggaagccgtcggcacgctgccgctggcgatctcggccttttctccattcgccattggaagcgccccctttcctttttcttgtctatactatagcacgcccttcgccgtttgtcaacaagaatctttttgcgttaatttattatgtgtttataactagttgctcgcgcgccaatcctcaaaattcccttgaaaatcgcgcatatcttcaaaatttgtccgcatcctcttcattcgctccacaattgcaaccccatgtataacgatatgttttcataactatatgccaaaaaaatttgcgccgccccgcaaaataaggggcggcgcagggcgtcagggtctcctgagcacgtccacgcccaggaacggacgcagcacctcgggcacgaccacggagccgtcgtcctgctggaactgctcgacgatggcggggatcacgcgggaggtcgcaaggcccgagccgttgagcgtgtgcaggtactcgatcttcttggtgtccgcgcggcggaagcggatgttgccgcggcgcgcctggtagtcgcgggcgttggagacggaggagcactccttgtactcgttcatgctgggaatccacagctcgatgtcgtaggtcgtggccatggaggcggagcagtcgccggccgcgagcttggagaggcggtagtgcaggcccaggccctcgaccagggcgcaggccttgccgatgagctcctggagcatggcgtcgctgtcctcggggcgcgtgtagccgaacatctcgaccttgttgaactggtggccgcggatcatgccgcgctcggaggcgcggtaggtgccggcctcgctgcggtagcagggcgtgtaggcaaacatgcgcttgggcaggtccttctcctcgaggatctcgccgcggtagaggttgatgagcgcggtctcggccgtgggcagcaggaagtggaaggcgtcgtccccggcgttgacgcggtagacgtcgtccacgaacttggggaactgaccggccgtaaatccgcaggcataggtgaggatgtgcggcggcagcatgaaggtgtagccgtccttgatgtgggtggtgatgaagtaattgagcagggcccactctagccgcgcgcccatgtccgtgtagagccagtagccgttgccggcgagcttgacgccgcgctcgtagtcgatcaggcccaggtcctggcagaggtcgacgtggttcttgggttcaaaggggaaggcgggcttttcgccgaagaccttgacgacctggttgttctccttgccgccggcgacgacgtcctcggccggcaggttcggcagggccgcgacgaaggtctcgatcttctcctcgaggtcgcgctgctcctcgtccatgcgcttgacgctctcgctcatctccttcatcttggccatgagcggggccatgtctccgccttccttcttgatgcgggggatctccttgttgatgcggttgcgctcggccttcacggcctcgttctccgcgatgagctcgcggcggcgcgcatcccaggcgagcagctcggtaaagtccacctcgtactcgcgcttggccagctgcgccttgacgtagtcggggtccttgcggatcaggttgatgtccagcatgttcactttcctccgattccttgtgggttttgggtcttcacgaaaacaaaaaggcccgtccctgtatcgggacgagccggaattgcccgcgttgccacccgcgttgacggcccggcgaaactgcgcgccctgccgccctgcttgctcgcgctgtaacgggcgcgcccgccgcgctcctcgcgcggcgctccgggagtggataggccggcgcgccacccgcttccaccagccgcgggctctctttcgggcgctctccgacgggactttcccctcatcgctttccctattatagccccgcggccgggaaatttcaaccccgagcccatcgctttttctgcaaatcccatttcccgctatacaatcttcccgttggcgcgctcgatctccttgcgcgcgcggatggcgttgtctgtgccgatcgcggagatgatgccgtcgatcgccgccttccgccgtccctgcgccacttcctcctgaagctgagaaagcccttcctgcagttgttgctgactttccagcccctgacgctgaatttccaactgctcttcataaaaatctctttgattttctatcattatgttttgtctcttttcatcttcatacaagttcaaggcctctttgagatcgtccgctctccctgcctccaaatattcaataatgcactccaaaacatttttcgaaaagtatctttcatgcaatattccttggctcttatacttttgcacgatctgtccacaggccgcaacttgcctagacgcggcatccatcgcttgttttctctctgccgccaattcaacctgtgctttttctctctcctggttctcaatgcgtcttctctctatctcgcggtcaacttttcgaagacttatgcgacgaattagggcaatgagcccaatgcccaatacgccgaagagaaaaatcaccacgccgcgaaatatcctatccggttcaaaaaattctgctgcattcccacttccaattgcctttccgacggtggagattagcgcaaagaaaacgcaagcatcatatattgaaagaattatgcaagcaacttttgcgccgcctggcatttttctaggaggtaacgaaagccgaaatcccaatgattcataggaacgccttctttttgcttgctcgtcgagcgctgcatccaggtcattctgtgcggtgtaggctccttttagataagaaatgagttccacctttgtcataatcttttcctccttttctttcttcccttttattatacagaaaccatattggtataaaacaaaatataccaaattggtttccctataatggagatggagtcgaaatatgggggaggtcgttgcgcttgcgccgcatacgcgacctgcgagaagacaatgatctgacgcaaaaggaccttgcggacctgctgcgctgctcgcaggtctgctactcgcgctatgagacgggcgagcgggagatccccctgcgcgcgctcgtgcagctcgccgcgtactacggcacgagcgtggactacctcctcgacctgaccgacgacccccgcccctacccgcgaaagacaaaaaagaagtgagctggcgatttgaagtgaccccgaaaagttagacaatatttctgaaggaattgttcaagcaaccg

SEQ ID NO: 2960 - DNA, 26698 bp, Unknown
  16S sequences of unknown bacteria
gcgcctcccggtgcgcttttttgcagttgtcccggagttttgtgtctggaaaacaggaacgatgctcagagccggccggcggtcaaagcggcggcagcggccggaaagggcgccagagcacggggaaggataccctgtatgtgggcgatcagcacgccgtagttggtcatgggaacaccctgttcggcggcgcatttctggcggtaacgcatctggcggggattgagcatgcagccgccgcagtgcacgatcaggcggtacggtgacagatcttctgggaattctgtgccggaggagaagacaaagcgcaattctttgccggtatgcccgcggatccagcggggcagtttcaccgagccgatatcgtcgcactggcggtgatgggtgcagccctcggaaatcagaatggtatcgccgtcctgcacggtttccaatgcggctgccccgcgcacggcctggatcaaatcacccttgtgccgggcaaagagaattgaaaaggacgtcagtgggatgtcttccggcacaatggcggccactggggcaaaagcctggctgtcggtgatgacgatgcggggcgtttgagccaggcaggaaagcatgtgagacagctcggtctcttttactactacagcgccggcgccgctgtccagaacatcccggatcgtttgctgctgaggcagaatgagccggcctttgggagcggcggagtcaatgggcgttaccagtatggccaagtcgccgcgctgcagcagatcgccaacaatgggccgcttatcctccggggcggacagggcggcaatggattccttcagcgtgtcgatgttggttttgtgctgcgcactgagaaacacggcccgttcgccttccggtgcctccggcggtctgctgagcaggtcgcatttgttgtaggctaccaaaaaggggatcccctgctcccggaacagggcgatcagttcttcatctgtgtcggattttccgacggaagcatccaccaccagaaccgccacatcagtcttgtgcagcacctgctgtgttttctgcacacgcagtgcgcccagggcgccctcgtcatcgatgcccggcgtgtcaatgatcagtactggccccatgggcagcagttccatggctttttgcaccggatcggtggtggtgcccggcacagcagacaccacagccagattttggccggtcacggcgttgactaagctggattttcctgcgttgcggcggccgaaaaagccgatgtgtacgcggttgccggatacggtattgtgtaaactcataacaatcgccccttgccggtttaccctgcggacgggaaaaccgggactttattcattttataattataaaaagaaaccggcccgcgttccgtggcaacggcaacagacggaccggggaatatcaggtttgcgcggcaatttgttcggccaattcgttgagatagagccaacgggccgttttttcttccagctgctgggtgagagcctctttttgcgcacagagagtctggagcttcacataatcgctgcctgcagcgctcatggcagcctcgcactgggcgagctgctcttccagggcggcgaggtcgtcgtcgatggtttcaaattcccgctgttccttgtaggagaacttccgcttctgcggctttgctttcggtgccggggacgtggaaggactttttttcatcggatgctcttgggccggggcggggcgtttggcggcgtagtccgaccagttgcccgtataacggtgcacggcgccgcccgggcagatttcgaagatttcttctgcgagcttgtccagaaaatatcgatcgtgggacacggcgatcacggcaccctgaaaagagtgcagataatcctccagaacggtcagcgtttcggtatccaggtcattggtcggctcgtccatcagcaatacgttgggggcgcccataaggacactgagcagatacagccgccgccgttcgccgccggacaggccgccgataaatttgcgctgagtctcgccggggaacagaaactgttcgagcatctgtgcggcagtaaaagtgccttcgtcggtgtggatctcccgggcgatgccggtgatgaaatcgtacacccgctcccgctcgtccatggtccggtcgccctcttgggtaaaatagccaatgcgcaccgtctggcccacctctaccgtgccgctgtccggcgccagtgtcccggcgatcagattgagcagggtgctttttcccgcgccgttgcggcccactacaccgatgcgggcgcgtcggccgatgggacaggaaaaaggctggagcacacactttcccgcaaaatatttttccacgccgatcagttcgatgcactttttgcccatgcgagtggaagcagaggacagggagacctgagtgtccgtctccggggcggactgcgccttcaaagcttcatagcgttcgatgcggtcacggctcttggtgcttctggcgcgggcgccccgctggatccaggctgtttcccggcgcagcagagcctgccgtttacgctcggcggcttccgccatttccaaacgctcggctttcagggcgagataacgggaataattggcttcatagcaatacagctttccgcggtccacttccacgatgcggttgcacacccgctccaggaaatagcggtcgtgggtgaccatgacgaggctgccccggaaggcgcgcagataatcttccagccatataatactttcgctgtccagatggttggtgggttcgtccagcagcaaaagctccgccgggcgcagcagggccgcggccagagccgcccgcttgcgctgtccgccagacagcgttcccaccggtgcattgtaatcctccaggcccagccgctgcagcatggctttgcattcatattccgcactgctctgcgcatctgccatcacctgggcaagcacggaggcatcggcatccatgtccggccgctgggggagaaaggaacggcgcactccggcggaaagaatcacttggcctgcgtccgcctcttccgcaccggcgagcaggcgcagcagagtgctttttccagcgccgttcagacccacgatacccactttatcatggtcttccaggtagaagtcggcttgctgcagaatgggccgcatcccaaaatgaatggaaagctgctgggcggaaaggatcatagcgcattgctcctgtcaaatcgtttttcccatcaaagggcgctccgcacagaggcgggagatcgtttctcatagtatactcatactttggcctgctggcaagccccggaaccggctgtgcaggaggggagggtgaacgctgtgtcaaaaaaagagggcaaatttcgggtaaaacgctgattgactggcgcggaagaattgtgtatagtagatatgtaaagttcgttaaaatattaacgaataaaacgccaaagtacattcatcttttatctccttttatcggcggcgaaacagcttttttgggattgagctgtttcgccgtcgatacgttcgccgcgcttgctttcaggcggggaaggcagcgaaaaaagcgcccggccatccggtcgggcgcttgtactgtgcgggaattaggtggtttcgtcgctttttgaagtgctcttgcgggtgcgacggggtttggcggctgtttctgctgcggaagtctccgctgtttttttcgcacggcaggtgcgggtggcagtggttttggcggcgctctttttggccggcgctttacgggcagcctttttggcggcctttgccgcttcctgtgcggcctcctccacctgctccttcacgcgcttttccagctgtgccgcgctggggcggatggcgtttttatccgtcacgtctttcaggatccagcgctgattggtgccttcgttgtccgaccagatctgggcgcggccgccgttgccgctgaatgcctggtagagatcgaggtatttgccggcgagcacggagcggaagcggacataaccgtcctccgtcggctccagtttccactgctggccgcggccggtgttgcagtcccactggtgcagccaggtgccatccgccgtgccgcccaggcacagatcaatggctttgccggtaaaacggttgcagatgcggtaggtgtccgcgccgacggggacgaaggtccactgctgccactgggcgccggcgtaatcccacagctggatggccgcgccggactcgggattgtaattggccacctccagtactcttccattgggagaagcaatggtatagaatcgaccttcaacgatgacagtctcggaagttttctttttcatggggaagcctcctttgtatcaaaaaccatgctgcggcatgccggtggagcgcggtggggccgcgcctgtgcgccgcagtatctatacatattatagcatgctttgcaacgctttgaaagtggaaaaaaggcgaaaaagacgcttttttcaagggaaatttccacctggggactgctgcgccgcgccggggtgccagaggaaaacagcatggctgttggtgcaaagcaaaccacaagatattgtgttttgtgctgcgcggcagatctaggagagagtgagcggaaaagctgtccgaaataccggaaaaagtgcgtgaaaagcacaagatatcctgaaaattgttccggatttgtagcaatatacaaaaaatgcggaatatttttgtttgttcttggagggcctgaaatggcatgaattgcggttcagccccttgaccaaaccacaatatcttgttatcatggaaaccgcacagcgtggcatggagcaaaacaaagttgtttgctccaatgcatttttacatacatgagagagcagcacgagaaggagagagccaccgatgaaaattattaaacgcagcggctgcgaagtggattttgatattaccaaaatcattgccgccatcaccaagggcaacaacgagatgcgcgaggcggacaagctgaccgctgcccagatccgcgagattgcgaccaaagtggagaacaaatgcaaggttatgagccacgcaccatctgtggaggagatccaggatctggtggaggaacagatcatggcccacagcgcctatgccttggcccgcagttatattacttatcgttatacccgttccctggtgcgtaaatccaacaccacggacgagcagatcctggctctcatcgagtgcaacaacgaagaggtcaagcaggaaaattccaacaaaaatcccacagtgaactcggtgcagcgcgactatatggctggcgaggtcagcaaggacatcaccaagcgcattctgctgccccaggatattgtggaggcccatgagcagggcatcatccacttccatgacgccgattattttgcccagcacatgcataactgcgacttggtgaacctggaagatatgctgcagaatggcacggttatttccggcactatgatcgaaaaaccgcactccttttccaccgcctgcaatatcgccacccagatcatcgcacaggtggcatcttcccagtacggtgggcaatccatttccctgacgcacctggccccctttgtggatgtcagccgccataaaatccgcagggatgtggaagcggagctgcagtccctgggcgccgccgccgatgaggagcagatttccgggattgtggaaaagcgcctgcgcgaagagatccgccgcggcgtacaaaccattcagtatcaggtggtcacgctgatgaccaccaacggccaggccccctttgtcacggtgttcatgtacttgggtgaggcggaggacgcccgcacccggaacgatctggcgatcatcatcgaggaaatgctcaaccagcgcattcgcggcgtgaagaatgaagccggcgtgtggattactccggcgttccccaagctgatctacgtgctggaagaggagaatatccacgaggattccccttattattatctgacgcagctggccgccaagtgcacggccaagcgcatggtgccggactatatctccgaaaaggttatgctcaaaaataaagtggacaagaacggcgagggccactgctatacctgcatgggctgccgcagctttctgactccctatgtggatcctgaaaccggaaagcccaagtattacggccgcttcaaccagggcgtggtcaccatcaatctggtggatgtggcgctcagttccggcggcgatatggagcgcttctggaagatttttgatgaacggctggatttgtgctaccgcgccctgatgtgccgtcaccgccgcctgctgggcaccaagtccgacgcggcccctattttgtggcagtatggcgccctggcgcgcctgaagaaggacgaacccatcgacaagctgctgtttggcggctattccaccatttccctgggctatgccgggctctatgagtgcgtgaagtatatgaccgggaagagtcacacagacccgtctgccacaccctttgccctggaggtgatgaagcacctcaacgaggccactgctgcatggaaggccaaagaacatattgatttcagcctttacggtacgccgctggaatccactacctataaatttgccaagtgtctgcaaaagcgtttcggtgtgatccccggcgttacggacaagaattatatcaccaacagctatcatatccatgttgctgagcagattgatgcctattccaagctggaatttgaggcgcagttccagaagctttcccccggcggagcaatcagctatgtggaagtgccaaacatgcagaataacctcgaagcggtgctggacgtgatgaaatttatttacgaccatattatgtatgccgagctgaacaccaagagcgattattgccaggtgtgcggctatgagggcgagatccagattgtcaccgatgagcacggcaagctgatttgggagtgtccccaatgcaaaaaccacgatcagaacaagatgaatgtggcccggcgtacctgcggctacatcggcacccagttctggaatcagggccgaacgcaggaaatcaaagaccgcgtaatgcatctgtaacggaaaagaggggaagagagggccatggccctctctttttttgtatttggagaagcaggccattctttgctttgcatagccggggcggggctatttattgttttcggcaaggcaaaacctcgccaaaggcgcggcttgtcaccaccggccgtttatgatacaataaaaacaagcgaaaggagggctgcgccatgtattacggtgagatcaaaaaagtggacatcgccaacggtcccggtacgcgggtgtcgttgtttgtatccggctgccgccggcactgtaaggactgtttcaacgccgaaacctgggatttcagcttcggagagccgtttaccgcacaaacggagcaggaaattctgcgcctgctcgcgccgggctatatccatgggttgacggtgctgggaggggaaccctttgagccggagaaccagccggcggtgcttgccctgctgaaaaaagtgcgcgccgcctatccgcataagacgatctggtgcttcacaggaaatgtgcttgaagaagacattttggccgagggcggctgcggccgctgtgcggtgaccgatgatctgctgcggcagattgatgttctggtggacggccccttcgtggccgagcagcgtaacgtgtctctgcgtttccggggcagcgaaaaccagcgtattattgatatgaagacaacactgcgcgccggaagcgcggtgctgtgggaggagacataaaacccatggggcaggcaatcattaaaatccgttatttttcagaagatattgaacggctgcgctacatcgacggaaagtccgactggatcgacctgcgcgccgctgagcgtgtggaattgaaggcgggcgagttccgcctgatccgattgggaattgccatggagctgcccgcagggtatgaggcgcatgtggtgccgcgctccagcacattcaagacctgggggcttctgcagacgaattctatgggtgtgatcgacggaagttactgcggcgacaacgacgaatggcgtatgccagtgtatgctacgcgaaatacggtagtggagaagggggatcggatctgccagtttcgcattgtggaaaaccagccgcggattctttttgaaacagtggagcatttggagggcgccgaccgcggcggcttcggctccaccggccgctgctgagatgaaaaaacatgctccgggtgccattggcatccggagcatgttttattttttgggcttttttcctgggtgctttttaggctgcctgggcaaaggaagcaatcctcccaggcggcacagacccaacacggcgacgctcttaacaacggaggctgccgttttaccggcacgggcaggagaaggccggcggctttgtggcgtggtttcggggcggacgcagacgggacggcagcggcccaagtccagggcttctttcaggaaagcgcgggataggcgggggcaggagatctccgtgtaaaccgtacccagctctcggggggagcgggcgttgctgccgcccacgcgggggcgctggtgctccgtggcccacagaagagcgcgctgcccagcggcgctgtttgggggcacaacgctggcgcacgcagtctccacggcatcgggacgaatgggaaacagggcggggttggcgtctgtttgggcaaaagggtgggcaagaatggccagtccgccgcagcgatggatctccagtacggtttcatctgctgtgggcaggccgtgctgccgcagccggacaaagtccagaggacgctccaggaagacgcccaaaatcgaaccgcctagggtactcacttcgcagccggggatcagcaccacgccgcgcagctcaatgggcacgggggtgcagtaatcggtatcggtgatggcaatggcatccagtccggcctgccgggcggcgcgtaccagttccgacaggcacagggccggatcggcgctgccccggagggtatgcacatgaagatcgacgcggtagatcatagacggcctcctttggtgctgacagggcaaaggcggagcaggcacggcacgccgttgtgctgcctgcggttcactttgtcatcgctgtacaaagcatgttgaatgtattatagcacagttgcgggaaaatgtcacataaatatggcatgcagttgcgcttcaaagcgcccaaccgatgggaactgcgccgttctcccgcagaaaggcgtccacctggctgaaaggccggctgccgaaaaagccgcgcttggcggacagcggcgagggatgggccgaagtatggaccagccgcggcccgccggcgggggcgtcgatggcccgctccagtttgatctgggcctgcttgccccacagcacgaaggccaccggctggggcagctgccagaggatgcggaacaccgcgtcggtgaaggtctgccagccgaattttgcatggctgttggcctggccggcatccacggtgagtaccgtgttgatcagcagcacaccggcgcgcgcccaggggatcaggcagcccgtctgcgcagggggaaggccgagatcggcttcacgctctttatagatattgcgcaggctgcggggcagcggaacgccggggcgcacggaaaaggccaagccgtgggcctgttccggctcatggtagggatcctgtcccagaataacgcagcgcacccgctctggcggcgtcagggcaaaagcggaaaatacgtctgcttccggcggataaactggcccggcggcgcggcgcgccgtgactgcccggcacaatgcggcgaaatagggctgttccaactcttctgccaacagggccgcccagcgcgcatccagcggtgagcgctgaagaaattcctgtacacaactttccatagcagcaatcacatcctttcgtatcctctattatctaaagggaaaaggcaattgtcaacggtagatttttttgtatataaaggatgaatattcgctagtatattcatttttggcaatatgttataggaaattttacaaaaatattgcataaaaagtggttctgcctcttgcgctttacaaaaaatcagatacaatattgctattggatggaaccgaaaacggccggcggccgttttcgctctgcattgcaaagcagagcgatgatttgatttcagaaaggaagattctctatgaacaagaagtttttggcattgctgagcgccggcgctctgaccgcgaccctgctggcgggctgcggcagcggcggcaacaccgatccgagcaccgcggagccttccggtgaagaaggcgccacgttgaccaccatcgaaagcggcaagctgatcatgtccaccaatgctcagttccctccctatgagctggtttccgacggcgagggctatgaaggcaccggctacgagggcattgatgtggagatcgcctatgcgctggcccagaagctgggcctggaactggtgatcgacgacatggactttgacggcgcgttgctggctgtgcagaacggcaagagcgacatggtcatggcgggcgttacagtaaacgaagagcgcctggtgaatatggactttaccgattcttatgccaacggcgtacaggtggtcatcgtgcccgaggactctgatatccagaccattgaggatttggaaggcaagaagatcggcacccagcgtggcaccaccggctatatttattgctccgacacgcctgaaaatggtggttacggggaagatgccgtcaccggttatgaggacggcgccacggctgtgcaggctctgatgaatgggcaggcggactgtgtggtgatcgacaatgcgcctgcgcaggagtatgttaaggcaaatcccggactgaagatcctggataccgagtttgccaacgaagactatgccatcggcgtggccaagggcaacactgcgctgcaggatgcgctgaacaccgcgctggccgagctgcaggcagacggcaccatccagtccatcatcgataagtacattcccgccgaggcggagtaattccggcccttgtggagaagcgaaaaagggcggcgtcagccgcccttttttcggtcgtcccgcgcatccatcggctgacacagggcagcaccgcaggaggctgccccgtgtcaacggatggatcatccaggcaaacgagagaggagagacaacatggaacattgggcgcagctgtatgagttgtggagcagccaaatcaaggcgggggcggatctgccctttcagcaggaattttttgtcaatttttatcagagctttcttttgaacgaccgctggatgcagtatctgcagggactgggccgcacactgcagatcacagtgatggctctgatcatcggtgtgatcctgggcgtggcggtggcggtgctgcgcacggcgcatgatcaacagcgcgtgggacagcgcagcatggtgctgggcattatcaacacggtctgcaaactctataccactatcatccgcggtacacccatgatggtgcagctgctgatcatgagcctggttattttcagccacagccgcgattttgccatggtgggtgcgctgacgctgggcatcaactccggtgcgtatgtggcggaaattgtgcgcagcggcctgatgagcgtggatgccggacagatggaggccgggcggagcctggggctgaactacagtatcacaatgcgctttgtggtggtgccgcaggcgattaaaaatatcctgccggctttgggcaacgagtttattacgctgctgaaggatacgtcgctgattacagtaatcggcggaaaagaaatgctgtatgcggctcaggcgatctatgccaaaacctatgcgccgatgatgccgctggtgggcacggcgatcctgtatttgattgtggtggttttgtttacctggctgctggggattctggaaaggaggctgcgtcaaagtgatcgacgttaaagatctgcataagagtttcgggccggtagaagtgctcaaaggcatcaacgaacacatcgaccgcggggaaaaagtcgtggtgattggtccctccggcagtggaaaatccacgtttctgcgctgtttgaatctgctggaagagccgagcagcgggcagattgtgttcaacggtactgtgatcaccgatcccaaagtggacatcaaccgtatgcgccagaaaatgggcatggtgttccagcactttaatctgtttcacaatctgaccattctggacaatatgaccctggctccggtgaagcttaaactcaagagcaaggctgaggcggaggaggaggcccacgctctgctcaggcgcgtggggctggacgataaggcgggggcttaccccggccagctttccggcggccagaagcagcgcattgccattgtgcgcgctctggcaatgcacccggaggtgatgctctttgacgagcccacctccgccctcgatcctgaaatggtgggtgaggtgctggaagtgatgaaagaactggcggaagagggcatgaccatggtggtggtgacccatgagatgggctttgcccgggaggtggccacccgcgtactgtttatggacggcggcgtgatcgccgagcaggctccgccggaggagttttttgcccatccgcagcacccgcgcactcgggaatttttaagcaaggtgctttaatggataccggtgtacaaaaggaaaaagaatatcagcgtgcggcgggcattgcccgccgctgcgctttgtctgtgcagcagcgtactgcttttgatgcggccattgctgatcgggtgctggcgctgcccatgtttgctgcggcgcggacaatcctgtcctattgtgctgtgggtggcgaggtcgatcccgctgccattgacgcggcggctgtccggctgggcaaagcggtggcctacccgttgtgcttggcggaagggcatatggaggcggccctgccagcggcggcggacgcgttggcgccgggccgctatggcattcccgcgccgatccctgggcgctgccgtctgctggtaccggaggatgtggatctggtgctggtgccctgtgcagcctttgatgcatcctgccgccgcatcggcatgggcgcgggatattacgaccgctatctggcccgctgcggggctttctctttggcgctggcctacgaagcacagcgtgtgccgcaggcggcggcgcaggaacacgatgttttgctgggtgccgtggccagtgaaaaccgcttgtattggaagctgtgaaagacggggtctgcggccgcggagtcctcgggacattggaatcggttcggttggaagaaattctgtacaaatgcgtttgtgcagaattttttcgcatttttaggaaaaaataggaaaaacggcttgctttgtgaagaatttcaatatagaataaaaacagtaggaaaaaggacgaaaagggatttaggttgtagaaaaggagatcagcatcatgacgattgccattgtcgcacacgacagcaaaaaagagctgatggcacaattctgcattgcttacgaaggcgttttgagcaaatgccggctgatcgccagcggcgtgaccggcaactggatcgaggaacagaccgggctgcatgtcaattgttatcttccgggatcggagggcggcgttcaccagattgccgccagcgtgttttgccatgacatcgatatggtgctgttttttcgggatgcgcagaaggcaaaggaaaaagaccccaccgaactgcatcttctgcggttgtgcgatgagtatatggttccgctggccacgaatattgccacagccgaagtgctgatccacggattggagcggcacagcatcaacagccgcaccatgcagtccgatatggatacctggtaaaaggagaaaggaagcatcggccatgacatttctttgttattccaaatgcagtacctgcaaaaaggcgcagaagtggctggagcagcggggcgtggcgtatacggagcggcccatcaaggaggagcgtccgtcggcggacgaattgcgcgcttggcagaaggccagcggcctgccgctgaaaaagtttttcaacacctctggccagctttacaaagcgctgcagctgaaggacaagcttcccgccatgagcgaggaagagcagcttgcgcttctggctaccgacgggatgcttgtcaagcgtcccatcctgattggggacgggtttgtgctggtgggctttcaagaagcggagtgggcgcaaaccgtataaaaaaccaactatgctgaaaaaggacctgagagctgcatggctttccggtccttttttcaaaacgtgtgtgctgtgcgctgtcacaaaacggagctttctgcgtttacaaagtagaggaaggagggagcggccgtggagcattcagaattttcggcgctgtaccggcgctggtatcgtcccatgctgctgtatacgcgctccctgaccggcgatctggctgcggcagaggatctggttcagaatgcttttgccaaggcgctgctgtcctatcgcgccggcggcagtgtgcgcgcctggctggcgacggtgctgcgcaatgagtttttaagccagaaaaggcgggaaaaaatgtatgctgtgccattgcaggaggccgaagtggctgccgtgcccggcagcgatccgctggaaggacttttggttcaggagcagcagcgccaggtgtatgaagcggtgctcgcgttacccgaggcctatcgggagaccattgtccagagtgctgtgctgggcctttcggatgcagaaattgccgctctgcgaggcatttcacaggaaagtgtgcgccagctgcgtcaccgggcgcgggtcaggctgaaacggatgctgaaggaggaagagccatgagtgaacgggaatcatgggaaaaagagttggaagccctgggccgggacagcgcagcggagggggcggagccagtggaaaccgctgcgggggagacggaaacgggagccgaacaaagctttgccgaagaggcagaggaaggcgccagagctgcggagcgggacttcgagcggcggctggagaaagccatcgaccggcgcatccgcagcatttgtttgaaaacgatcgctgtggtggctgccgtctgcgcggtggtgtttctagtcgtcagcccggtggtagggctgttcttcccttcgccgcagcgtgtcggcggcatgagcagcgccagcttggaggagtatttgggcgcgtattatgaaacaacgcggccctatgtggaactggtgcccgcgagcgaccagaagcgccgcaaatggacgcagaaccgcggcttcgggtgttatactgtggggctgagcgcactggatatgaaacagtattgggcgagaataggcgaaaacagcgtgaaggtcacgctgaactgggggcgctatgcagtgaaaaacgacccggagagtgtgttggtccgaaactggagcgctttcaattaccgcgacagcgtggaggaggtgcgtgccgatctggaaggcctgccgcgcaccagctatggttacatcagcgttcgcgccaacgagccggtcagcattgagacgttgcgcgaaagcggtctggatgtgaactgaatcgaggtttacagtgacggggaacccgttgtcggaaggggttaccagtggggcggtggattgaatacacgcacccgcacatccaagagtggcgacgattggcgccaggatatgagtagcgaagaactgcggcagctctatcttaacaatctggagacgctgctcagtgccccgcggctgctcaggcagcggagttttgatgtggagaccgacggcattccggatgatctttcgtcggacggcggcgcttattccggcggctggtatggtttcggcggcgatgctttcaaagaagcgatccgggcaaactgtgacgctgtggcagcccagaccggccctctgctgacggagcgctactgtgtttccggaagccgcgacgaactgctggcttatcttgatacggcagatattcaatgcgtcggcatcgatattgtgcatataccttacatgcaggatgactaacggatgaaaagggccgttgggcggagcatatgctccgcccaacggcctgtgttgtttatttaatgtaagcgttaatcatggccgcgccgctttcgggggcacggaaataaatctccaaattgccgcggctatctaacgcgtggcgggtttcttccagcaagccgttttctacgccggtcagaagtgcttctaatacggacttttccgttaatgcgcgaaatgagccatactggggtttgagtgctgccactacttgggcgggagaagcctcctgcactgtcgtaatatatttcaaaatagcgtagtttaatggtttcgtaatgtattccctctttcgctgattagtttttggccttaatgagtttctgtttttgtgtactctttttctgaaagagttgtcgaggatccatggcaatcaatacaatgccgcagaacatgaccaaggcactgacccagccgataggcgttatggcccagcctggctcgcggaagatcagacccagtaaaatccagcagcacaggggggtgaagaacgaataagtgccgttgagggccatacccagggccgcgccgcacatggaagtgcccttataccacatggagaaagtcagcatggcgcaaaagcccgagatcacaaagaaaggcattgcgccggcgctgctccaggcttgtcccagcagctggggcgccagcgtaatgttgccggccaagacggcgaacaggggaaccagaacgagagtgttgacaataccggaggtgcactggcggatcgtaatgccgatttcagagtcgatcaatgcggtgccgtggccggcgacgcagccttcaatgccccaacccaatgctgcgataaaagaaatggcgcaacccagcagcacctgagaattcatggcgctcagtgcggtgccgccgatcatcacggtggcggcaaagcacagcacgatgccggctgccatgcgcagattaagcgtctgcttatatagaatacggcccagcagagcgccgattgccacgcatagggcggaaaccggggctgccatggagccggccatctgcaggccgataacgtaagctgtgttggccagcggaccgccaaacaaggccgctaataccatgatccaaccgggtttggtgcgcatggtacgcagaaaatctttcaacttccctttggcggttacgttggccaggctgaacagcccgctgatggtatcgttaatggagctgccgattgcgctgagcatataggtcagaatgaaaacggaaagaccgctgccgggagcctgccagtcggcccagatcccccgggacatacccagcgtcaaaaaggcggaatatacgccgtacagcaagcctgacatgccgccgatcaggatgccgcgcttgaaaaagttattcttcagcgctttgtatttctcttctgtttgctgtcggttcaattgttgtgtgttcatgcgttttgtactccttgtatatccaattggctttggcagaaacggcgcagtgatgcgggatgtgtgctcctgctccggttctgtattgtagtcgcctctgatcattttttattatccgattccgctctatttattgcacaattttttcttgattatttgggtgttttgcacaatgctgacatctttttgaaaattattggattttatcgacttccttatttttcaattttacatttgggtaaaaatgtcacattagaatataagaaaagcgccgcgcgtttgaacgggcggcgcttttggcacattgttaccatccggcagcgccgaataaaacccctgcggcggcggagccgagaatgaacacaatggggtgcagtttttttgtcggttttacccagcgggtcagaaccagaatgacggcggccaaggcaatatacttccattgaaacagttctgccgggggaccgttgaggttcagcagcgccagggataccacagacaggcccgctgcggcgatcagaccgcaggaggccgggcgcagcccgtaaaacactgcatccacagtgcgattggtgcggaaggtctccagaaattttgcaacgattagtatgacgatgatggagggtgacaccagccccaatgtagcgatgacagcgccgggaatccaggctacagtgaagcccacataggtggccatgtttatccccatagggcccggcgtggattccgacacggcaatcatgtttgccagatccgcgtgggaaaaccagccggtggtgtcggagatatgatagaggaatggcatcgttgccagaccgccgcctactgcaaacagaccggtgcggaaaaattccagaaaaaggcgcagataggtcatttcttcacggcctcctttcgggaagcgccgtccagacccagggcgcgaagcacaatgcccagcgcaccggccaccacaacgaacagcaccggggacaggttggtaaaggctgctcctgccagcacagccaaaaaaatcaggaatgtggcgaggtctaccacgtcagttttgaacagcttgagcacggcgttcaggatcagcacgcatacgcaggcgcgtatgccgttgaaggcgttctgtacaatctccagatcggcaaaattggtgagcagccctgcaatcacgcagataatgacaaggcaggggaacgcctgccccagggttgctacaataccgccgatgataccggcttccctgcggccgataaaggtggccacattgacggcgatgatgcctggcgtacattgtccgatggcgtaataatcggccatttcttcttccgtggcccagcctttcttctccacgatttcccggtgcaggatcggcagcatagcgtagccgccgccgaaggtggtaattcccacccgggcaaaggtataaaacagttcccacaattttgatagcatacggatctcccttatttgcctgtaaaatacagcggctgctgcattttatacgtatccatacaaaccgcgcacggaaacttctccgctgcggatggtttcccgccggccgtcgtcgtagcgcacgaccagcccgaaggcgtcgtcgatttcctcggcataggccacgcgttccgggccgctgccgaggatgcgcaccggatggcccagcgtgacgcagctgcggcggtattccgccagccagggagcatagtcttgggtcagaagggctgcatacagccggtccagttcttccatcagggccacggccagctcggcccgggatacggtgcgccctaagaccatgcgcagtgaggtggccatatcagccaccgctccgctgaaatcagcctgcgtctgattcagattgatgccgatgcccacagccacatactgcagcacaccggtttcgccttccacgcccatctcagtcagaatgccaaccagcttgcgtgtatccagcaccagatcattggtccatttgatgcccggccgcaggccgcagatgcgctctatggcccggcaggcggccaccgcggccagtgctgtcactggcagcactgctgcaggcgcggctgtgggcctgagcagggcggtgagatacagccctttgctgggcggggattggaaggagcgtccgctgcggccccgtcccccggtctgctggccggcaaggatcaccaggccgttttcaccgccggtcagggccgcttgtttggcgtacgtgttggtggaatcaagggtgtcgaaaaaaaggatacggcggcccaccacggcggtgttcaaccgtgcggccagcgcctccggttccaatgtgtccggcatggagagaagccggtaccctaggcgggttctggattcgatttcatacccctcccggcgcagggcgtccacgcctttccagacggcggagcgggtaatgccgagggtttggctgagatgttcaccggaaatgtattcgcccttgctcgcgcacagggcttccaaaatggtatgacggcgcatagtatttgcctcctgtatattccatcctatcatttaagtgtagcaggttttgagggaattgtaaaccagaaggaaagaatttgttgacaattaaatgcggctgttgtattctattgtaaactaattaaaacggattgaggtttacaatatgactgcaaccgcaactcacgcaaaaactcgtatgttgctgctgacggcgctgtttgccgcgctgacagccatcggcgcttttctgaaaattccaacgccctggtcatcctttaccctgcaggttttctttgtctgcatggcgggtgtgctgctggggccaaagtacggcgcgctgtcccagttggtttacattgcgctgggcctgatggggcttcccattttcacagcggggggcggactcggctatgtgttccagcctacctttggttttttgctctcttatatccccgcagcctttgtcattggcctgatcgccggaaaaagtgctttgcgccggcgcatcgccctggcctgtgcggcgggtctggcggtgatctatctggtggggctgccttacatggggctgattcttaatgtttatctgggtaaagatatgggcgttgcggcgatcttgtgggctgggatgctgccctttttgccttgggatgttgtgaaaatcgcggcaaccgtggtgctggcggggggattggtgccgcggatgaaagaaatgaaatgaattggcggtctgccggacaagcagacgaaaaacgtgctccacaaactgcggagcacgtttttgtcgttttattcctcggtgtgaacgcgttcctgacggctgtgcatcgcctgatgctcctgatagatctcagaaaaaagctggcgtacggtccagtctttgtttgtgggggtcagggacgccttataggggatatacaatccggctttgcgcagcgcagctacggtcagctggatgccggcgctggtcaggccgcacaggaaaagcacttcctcgcgcagttcctcagcgggaaggtcgggctgtgcggcggtttccagccccaccagagcgcccaatggcgtgtcccactcctcgcggggaacgactttgcaggcgatgtgcagcggaagcagcgccttgcgcacagcgttcaggcgggtttcattttcaaagtgaaataaaaggatctgttctttcacgcttttccaacgctcctttgcgcgccgctggcgcagcgcatagattgtgtttatcatagcatagtttcggacaaagcgtcaatccgtccgttgcatttatcgtacaacaggggtacaatatttttgattcgtcattgtgcggaaaacactgattgcagaaaccgaggcgttatttgttgaaacaaaagcacactgctattctttatatccttctggcggcactcttcttttcggggatgacggcctttgtccatctttccggggatctgcctacgggacagaaggcgctgttccgcaatctgccggcgctgtttattgccgcctttactctctggcgcaagggaatctctccgctgagcgtggcacccgtgaaccggcggcccatgttttggcggtgcctgtttggtaccacgggccttttatgtaatttttatgccatcgaccatctggtgctgtccgatgccaatatgctcaacaagctcagtccgttttttgcggtgatcctgtcgtatgttattctgaaagaaaaggtgcggccagtgcaggcagccggtttggcggcggcgtttgccggcgcgctgctgatcatcaagccttcgttttaccatgtggattatgtcccggcgcttatcggggcgctgggcgggctgggtgccggtgcggcctacacctttgtgcgcaagatgggcctgcagggagaagaaggcgcgcgcatcgtgttttatttttccctgttttcctgtgtcgtcacgctgccgatgttcctgctgggcggcgcggccatggcgccctggcagtttttttgcctgctggcggcggggctgtgcggcgcgggcggacagttttccattaccaaagcctactgctatgccccggcccgggaaatttccgtgtacgattatacgcaggtgctttttgctgcagtgtggggctttgtccttttcggacagcggcccgatgcgctgagtgtggcgggctatgctgtcatcatcggcgcagcggtctggatgtatcgctacaaccgcggccaggcagccgttgggccggatgcgccgccggcgcattcttaaggagaatttaaaaaaatccccgctttgtttttaacatgctgtatgctatgctggtggggagaaggggagagtatccagtatgtataatattttgatctgcgatgatgagcgggatatcgtgtctgccctacgcatttatctttcggcggagggttatcgtatttttgaggcccatacaggaaaagaggcgctggacattgtggctggccatgagatccatctgattttgatggatattatgatgccggagatggacggtatctctgccacagccaagctgcgcgaggcatccaatgtacctgtgattcttttgacggccaaaagcgaggacagcgataagatcctggggctgaacatcggcgctgacgactatatcaccaagccgttcaatccggccgaggtggtggcgcgggtgcgttcccagctgcgccgctatacgaacctgggcggtatggtcaagcgggaagcgcactttaccatcggcgccgtggagatggatgacgatgaaaaaaccgtctgcgtggatggggagccggtcagcctgacaccgctggaatacaatattttgaaacttttgatggaaagccccggccgggtgttttcttctgcggagatctatgaaaaagtgtggaaagacgtggcgctgggcagcgagggtactgtggcggttcatattcgccatctgcgggaaaagatcgagattgacccggccaacccgcgctatttgaaagttgtgtggggccagggctataaaatggaaaaggacaaaggggttgggcgcatatgaaacgcttttacaccaacgcggtagtcaaattccttgccttttgcctgacggcgctgttttctgtgggcgctgtgatgcttgcgttcggcgcggtgaactttgccgagcagggttgtgtgccgggccagcgctacgaggacagcgcagcctatcgcagcattatgtccggctacattatcagcgcggccaacctttaccgcatgcagggggaagatttggaaaactccgggctttcctttgtagatcagcaggagcggcaggccagccgggaggagctggagcagggattgacgggcaaagcgagcaatttccgctttgagatccgcacagcggatggaaaggcgaggctctactcgaactttcaggatgaggaaagctttgacagcctgaatattacgccgcagtatgccacggtgcaggacggaaccatatccgtattgtttgcaaacggtttttccgattattttcggatgggcgttgaccatctgttccgcagtgattcgtattatgatgcttacgattcctattacagcgtggtgtacggcggcgagtacagcggcatggattcggccagcacatatgccttctgggacgacggcggcgcctacgaggctctggactcttccagtgccgaagcctatgtgctctgctggggcgtgcggccggattatccggtagaggatgcgcttttgcggatgaatcactggtatttcagcatgcagagcagcatgccgggctatatctgcgctgcggtgctgtgtgcgctgctggccgtgacaatgctggtatttgtctgccggggcgccggccgacgcgcgcaggtggacggcgtggtgctgcgtgtgtttgaccgaattccctatgaagcggtgctggcggtgctgtgcattgccggggtgctggggctgccgttgctggaagaggcctcctttgccgaagagacatcaaccaggatttttgcagtgggggcatatctcagttatttgtgtgtgcttgcggaggtgtgtatcgtgacgactgctgtgcgccagaaagcgcgtgctttctggcgccataccttgttgggccgcttggcgggcctgtgttcccgcttcacgcgcctgtgttcggacatggtcaaccatgtggatctgacctggaaatttgtactggcctatgtggcgtatgagtttgtatcgctggtgctgtttctgccgtccaacacgccgggtgtttttttcctgctggccattgtcaatttcttcgtgctgctgtggggatgccgctggtctgtcaaattcggcacagtgcgcgacggcgcggcagaactggcccggggaaatctcgaataccgaatcgacacccgtcatttgcctgctgccctgaaagaccacgccggggatctgaaccggatttccgagggtatggcggcggcgctggaagagcagatgaaaagtgaacggctgaaaagtgaactgatcacgaatgtatcccacgacatcaagacgccgttgacttcgatcatcaattatgtggatctgatcaaagccgagccagtggataacccgaaggtacaggaatacatcgccgtgctggaccgccagagcgcccggttgaaaaagctgacctgcgacttggtggatgcctccaaggcgtcttcgggcgccatgccggtgcatctggaggatgtggatgtctgcgaactgctgcagcaggctgtgggcgagtacagcgagcggctcggcgcagggcagttgacgccggtgttcgacctgccggaggagccggtgctcattcgagccgacggcgcgctgctgtggcgggtgatcgataatcttttgagcaacatctgcaaatacgcgctgccaggtacgcggttgtatatcagtatggagcgcagcggcgaacagatgacggtgcagatgaaaaatgtgtcccgcgcgccgttgaatattccggcagatgagctgatggagcgttttgtccgcggcgacagttcccgcaacagcgaaggcagcggtttgggactgtccattgcccaaagcctgacggagctgatgggcggcgctttccggctggagatcgacggagatctcttcaaagcgaaactggacttccctgtcatactgcggccgcatggctgagccatgcggcggacgggtcccgcgggacccgatggacgattctggtcggtgaaagaaaaatgccctctctgcccccgcgaatgcggggcagagagggcatttttactcactcggaggcggccttcccgacagagaggcgatcccggaccgtttcaaatgggtctgacatttattttttcaaactgcggaaaaccacacggatgtcggtgccttggtctacgatgctgtgcagttcgatttgtgcactgtaaatggcggcgatgtgcttgacgatggcgagaccgagaccggtgccgccggtttccttactgcggctcttatccacgcggtagaagcgctcaaacacgcgctggtgctgctcttccggaatcccgatgccgttgtcgcgtacccgcaggtatgggcggccgtcagcggtgccgcaggagaggatcacttttccgccggggcggttatagcggatggcgttgtcacacagattcatgcacagctcatccagggaactgcggctgcccagcactggggtgtgttcagcttcgcacaacagcgttacataggctcgctgggcattgacagccagattgtccgcacaggcgctgaccacgtctttcagatccagcagttcaaattctgcttctgcctggccgcgcagtgcttcttgggtggcatccagtttggaaagctggaggatatcgttgaccagactcaaaaggcgcgcggattctttgcggattttctgggcaaactgtgctacatccttgggcttggccatgccggtctcgatcagttcagcatagccggaaatggaggtcagcggcgttttcagttcatgggatacattggcggtaaactcttggcgcatggtttcgctctgtcgtctggtgtcccggtcgcgaaggattgcgtctacaaagggctgaagttcggggtaggggacgttgcgatccagttcgtcaagacgatttcccatctgcacaataggttgcaccagctgccgcgtaagcagcaggctcagcagccagcccagcacccagacgatcagacagcagaccagcagaaccggaatggcgctgcggaacagatcgaaacggctgtgcaggtcgctggctacgcgcaggatatttccgtcatccaggcgcacagcataataataggcgttctggctggtggtatcggaatggcgttcggcgtggccttccccatgagccagcgcgtcgcggacttccggacgccccagatggttttccaagtttccggataccgcgttgtcaaagagcacggtgccgtccggctggatcagggttacgcgcaggtcgctgctgcccacgcccatatcggataagctgtgtccgttttggtagtacgccgcggtgattatatcggaataaatgcgcacgtcctgagcggcctgacgttcaaatacagtgaaaaagaccagcacgcacagcgccagggtgacggctgtgctgcacaggcccatcagcatcagccgttttgtaaactttttctccataccttatgcgtcggtgccggattcgagcgtcagctgatagcccactttgcgcacggtatggatactgtct

SEQ ID NO: 2961 - DNA, 23109 bp, Unknown
  16S sequences of unknown bacteria
gatgataaatctgtagataacaaaatagatttacacttgtgaaaaaactaacaaagaaacttacacacttttcttgacaaacccgagaaaaaaaaatacttacagatgttcgcacaacaagaagatcagcaaaaggaacgatcctgctgatcttccttctgcatgatggatgatgcgaaaaacgtccatcgatacatcaggccgtacagacggatcatgctcatccatctgtacggcccctttccacatgcgtttctaaaaaaagaaaccaagcatctcgctcagtttcttcttcatctcgatttagattccgtcagtcggttcagactgttcaaccggcttgaactcataacgcatgacctgatctttaccagtattgactgccatgtcagtcagcgttgccagttcttcaacgaactgacggcccatgttgacttcgatcagcatcggcaggttgcttccggcaacgacttccacgtttccacgcgggaatccgacttctacagccgtcttgaacggagaaccaccggcaaggtcggagcatacgaggatgccctggcattccttcagttcatcaaaagccttttccagcttctttctcagatcatctactgaatcgctggcttcgaagtcgacagcgcggtagttctgcagatcacctgcgatcagttccagtgagctggtcagcccgctggcgaaatgtccgtgtcctgtaacaattaatcctaacattgaatctcttctgcgcaccgtgcattcatccggcacgctctcctttcctcgaatctattatacctgaaaactagcgttttgtatacggatgcaggataacacccttgacgacgcggttgacttctcctgtcgggcacggattgtccggtgtgatgccgtaagacagagacttgaacagcgcgatcagctgtgcaaccacgatatagtcgaatccgaggaacatgttgtcatgctcatccttcatctcaaacgcgtaagtgtaatcaaccagagaagcgatctcatcgtctttcttgttcatgaccgcaaggatcttgttgcccttgcgctgaccgctcatctctttgatcagatcgacttcgtactgacgagtatacggatcatcactgacataaacgaccgtcagcgtatcatcgttgatgatggacttcggtccatgacggaatcccatcggagaatcgaagcatgtgcatacttttccggcagtcagctccagcatcttcagctgagactcctgcgcgatgcccttcagcgcatttgcgcccagatagacgatacggttgaagtcataaccgctgacgatatcagaagcgatgctccagttgtcatttgccagtctttctgcggcagtgatcacatcttccagttctgcggcgatctcatcgatcttatccaggttgaagcacagcatcgttgccagcatcatgttggagaagctgctggtcatcgcaaagctctggtcatgtgtctccggcgtcaggttgatggcatacgcattgtctctggactcagccgccttggacagcgcgccttcacagttgcaagtcacgaacagatgataaacgttctctccgcaaacttcatcggccacattgaccgcgccgacagattccggagagtttccggaacgtccgaaagaaacaagcagggtcggacggttctgagacagatagttttccggcgtagccacgatatccgtggtcgcataggactttaccttgaatccgttggtcttgttcagataagaatacagtgcgtttccgacatattcgctggtgcctgcgccagtcagaatgatgtcataatcttcctttgatgtaacgttggcgatgaatgccttgatggcttccttttcattcttgatctgggcgatcgtctttctccaggtagccggctgctgattgatctcgctggcggtgaagattccgttcagtgattcccaatcggccttttcttttccaaaaatcatctctaacatctccttctcatcagccttgctgatgcctcattacactatcattatagccgatgttttcactttttcaaatcttgtgtaagcactttactaaatagtgcaaaagaatcattaaattatagcattcgcggttgtgctgaaagaacttgtcagatataatgataaggcagaaagcaggtgttttgaatgttgaacaatcagaaaaaaaatgtcaaaaataaaaatgagcgctcggaagtagatgtcctgagcgggttcagcgtctaccatgatgacaagaaccgcacgatctattacaaccggctgaaccaccgcggttatgtgatcaagccgcgtgatttcacgaccttccgcaccttcagcaagcgtctgtttgccgcgcttgccgtcatcgtcctcatgttctctttcgagaacgccttcaacacgatgccttacatcccgatcggcgtgggcatcctcgtctatgccgtcatgcagttcaagttttcttccttcttgcatcagtgcacgatggtcgctaacttcgatccgaaaaaggcttacggacagatccagatcctgtctgtcacgccgatgaggagcctgctgctcagagcgctgctgtacatcttgctcgcagtactgatcgtctatcatacgctgaccaacctggagtacacgaccctggcgctcgtcatcgcgtttgccgtctatgcagtattccagtcagtgatcctgatcgctgccgccttctataagaaaaatcatcctgatcttaacctggacttcatcacggaagaccgcgggccgcgcaaaaagtcccgcagctgagcagaaacgtccagcagtcatactgaatagagggccggtgtgcttgccggccctctatcctattcttttgtcccattcagccccacggctgatttttttatttccctctcagatgtaatgacagctggtctcctgcacgattttcctgggaaatatctttacctgctgtgattccacatcggcttcttcagcaagtcaaatgcctccacagcctgatgcgccttggtgttgaacagcttattgaacagcgccgggctgttcaagcgcgccatcagatgatcctcgcggtgagcgatggcctgcggaaagatgaactccagctgttcgtcatcggaaaccgtgacctgtacgctgcgtacgctgcgggagatataagacagcatctgtctgagcgcgcgtgagtcaaggtagacgatctcatgcaccctggcctcatgatcttcgttcagatagcggcagtatccgctcatgccttcctcatcataacaaaagcacagcttctcatgacgctcttttacctttgcgagcagttcttcgaaataggagacatcgcggacgaacacggcgtcaaaatgactgatgaaccgctggtaaagcgcatgcatctgccgggcatcgccttccaggctgaccgcatcgcagcggatgccctgaaattcctgcgatgtcagcagataacgctttccgctgtgcaccgtccggaatccatagcgttcaaacaggcgcgggttcatggcatacagcagcgtaaacagctgattatgagcagattcatccagcgccgcttccatcagctcgctcatcttatgccggcggcgataatccgggtgcgtggcgatctgatcgatcaggcagacttccagacagcgtcccatgaacatcatgccggcgcggtgcgtctgcagcgtgctgatcacccggccttcctcggcgatgtacagacagcgcttcggttcaaagcggcgttcgaagacggattcgctcatccggcgccgcatattgggataagagagctgcagcaggcggaagatctcctctttgtgctgcaaggcattgcggctgatcatgatcttccctgcccctcgtcatccaccgtttcctcggtgtattccacatcgatgacatcgccggcaccctgccgctcctgccctcgttcatgcggatcgtgcggccgtgattgttcaacatgctgctcaaactgttttctggctctgtagctgcgatagatgctcacgatgagcaggatcagaaacagcgggagcagaaacggaagcacctgaagaaacagcatgcccaccaaaaagatcagaagcagcgcgatcacaaattccatgatatccctcaccttcctttttcattattatacgatagatcctgatgagaaaaaagagctgtgcgccagctctttgatcttcattcgctcttttccacttccagcatcacgccgccgaaggccggtacatcggcttcgatcatgtatggcttgccattgcgggaaacacgggccgcatgacagtgctgcggctgctcagcaagcgtgccgccgaagcgctcccactccgtattgatgatctcgcggtacgtgcctttggaaacgacgccgaacacctcgtgcgtatacgtattcggggagaagttgaggatgacgacatagtctttgtcttttcccttgcgcagatacgagaacatgttcttgtccgcgttatccgcgtcgatccactcaaagctctcccagctgtaatcattctcatacagtgtcgtctcgctcgtatacagctcgcccagcaatgcgaaatagcgatggaaggcgtcatgcgccggataagagagcaggaaccagtcattctccttcatctcatcccattcgcgccaatgtgccagttcattgcccatgaaattgagcttctttcccggatgggtaaacatatacagatacagcgtgcgcagctgcgcgaatttctgttcataggtaccccacatcttattgatgatggtcgccttgccatgcacgacctcatcatggctgaattcgatgaggaaacgctcagaatagaaatacgccatcgagaaggtgatgttgttgtgatgccatttgcggtacaccggatccttcttcagatagttgagcgtatcgttcatccagcccagatcccatttgtagtcaaagccaagcccgccctccagcgtgctcttggtcacattcgggaaatcggtggaatcctccgcgatgagcatgatcttgccctggtatttctcattgagcatgaagttcatgcgcttgatgaagtcaagcgcgccttcattgacgcctaactgcttgttgccatgccagaagatggcgttggagatggcatccatgcgcaggccgtcaacatgatatacgtcgatccaaaacgatgccgccgacatcaggaaggaacgcacctcttctttccatagatcgaagttcgccgtgccccactgactgtccgcatcatgtgcccgcggatactcatacagcgccgtgccgtcaaaataagaaagcgaaaaatcatccttgacaaaatgcaccggcacaaagtccatgatgacgccgatgccggctttatgcgcctcattgatcagatacatcaggtcatgacatgtaccataacggctggtgacggaaaaataaccggagcactgatagccccatgagccgtcaaagggatattcgcacaacggcatgagctcgatatgcgtaaaatggttctgcttcacatagtcgatgagcctgccggcgatcttgcggtagttgacgaagtcttcgtcctcttctttcatccaggagccgatgtgcacctcataaatgttgatcggacggtcaaaccctttggaacggcccttcagccattccgcatcttcccagccatcatagctgagatcttcgacgacgctggccgtattcgggcgcagttcgctgtaaaacgcgtatggatccatcttgtccaccacccggccggttgcctgcgtgatgcggtatttatacgagtcattgacctttgcgcctttgatgtacaagctccatgtaccgcgttcgtccaccttcttcatctcatggccttcacattcccattcatcgaatgatccgatcacctggatggcctgcgcgttaggcgcatagacggtgaaccgtacgccctcccgttcagggtgagcgccgaaatgccggtacgcatccagcgaacggccttcatggaaatccttcagatatgtattcttcaagagaaacctcctcctctcctcggttcattacttctattgtactctattttaatcggaaaaacgatatctttttgtatttttgcttctggattgtaacccgttacatcatctgatcttcgtttgcttgttgtggaccggctaacaaaaaacgccgtcttcgcaaagacagcgtttgatgggtcaatccatttccagcgcgccggtgtaaagctgatagtaaatgcctttcttggcgagcaggctttcgtggttgccgcgctcgatgatgcgtccctgatcgaggaccatgatgacatcggagttcttgatggtggacagacgatgcgcgatgacgaatgtcgtccgtcccttcatgagcttgtccatgccatcctgtacgatcttctcggtccgagagtcgatggagctggtggcttcatccaggatgagcaccggtgcgtttgccagtgccgcgcgggcgatggagatcagctgccgctgtccctgagacagcgccgaaccatctccgctcagcacggtgtcatagccatgttcaagatgacggatgaactcatgcgcattggccagcttggccgccgcgatgacttcctcctcgctcgcttccggcttgccatagcggatgttatcgcggatcgtgccggagaacagatgcgtgtcctgcagcacgatgcccagcgatccgcgcaggtctgccttcttgatcagcttgacgtcgatgccgtcataagtgatcgatcctttctggatatcatagaagcggttgatcagattggtgatcgtcgtcttgccggcgccggtcgcgccgacgaacgcgatcttctgacccggattcgcatacagctcgatgtcatgcagcacgactttgttgggcacatagccgaaggagacgtcgtggaacagcacttctccgcgcagcggcacatattcgaccttaccgttttcccgcggatgacgccatgcccatttgccggtgtattccgtcgtctcgacgatcttgccttcttcttcgcggtaacgggtcagcgtgacttttccttcatctttttcgatctcttcatccatcagcgcaaagatacgctctgcgccggccatggccatcgccacggcattcatctgctgggagatattggagatcggcatgttgaaggaacggttcagctgcaggaaggaagccagtccgcccagcgtcagcccgctgacgccgctgatggcaagcacgccgccggccagcgtggacagcacataagagacattgccgatgttggcgacgaccggcatcagcacgctggcaaaggtgttggccttgtagctgctttcaaacagctcctcattgatcttgttgaatccgtcgatgacttcctgctcgtgcgtgaagaccttgatgaccttcgccccttccatcatctcttcgatatatccgttttccttccccaggttcttctgctgcttctggaagttctgggcggaacgtccgccgatcttgccggccaccgtcagcatcactgccaccatcgcaaatgagaggatggccagcggccatgacatgacgatcatggacacaccaacgaagatgaccgtgaatccggcagaaagcgtctgcgggatgctctgggtgatgacctgacgcagcgtatcggcatcattggtatacacgctcatgatgtcgccatgagcatgcgtgtcgaaataagagatcggcagccgttccatatgcgcgaacagatcatcgcggacattgcgcagcgttccctgtccgatatagaccaggatgcggttataggcaaatgtggagagcacgccggtcatgaacacacacagcatgaccaacaggatctgcagcagcgggccgaagtccggcgtatccgtctgtgccagcggcgtgatatagtcatcgatcagcacctggatgaacagcgataccgacacgctggccagcgaggccaagatgatgaagatcagcgtgaacagacaggcgaccttgtaatgacggatgacatagcccagcaaacggccgagcaccttgaaatccatatgtttcctactcatcgtcatcagcccccttcttctgtgtttcatacacttcctgatagatcgcgttgctcttcagcaattcatcatgcgtgccgatgccgcagatcttgccgtcgttcatgacgatgatgcggtcggcatcctcgatggaagagatacgctgtgagatgatcagctttgtcgtattcgggatatcctcgcggaacgccttgcggatcagagcgtccgtacgagtatccaccgcgctggtggaatcgtcgaggatcaagatcttcggcttcttcagcagcgcgcgggcaatgcacagacgctgcttctgtccgccggagacattgcttccgccctgttcgatataggtgtcatagccatccgggaagcgctggatgaactcgtcggcctgtgccagccggcatgcctgcaccagctcctcatcgctcgcgtcggcatttccccagcgcaggttttccttgatcgttccggaaaacagcacgttcttctgcagcaccatggccacattgttgcgcagcgtttccagatcatattctttgacattgcgtccgccgacgagcacttcgcccttgctggtgtcatacagacgcgggatgagctgcaccagcgtggatttggcgctgccggtgccgcccaggatgccgatcgtctcaccggaggcgatcttcagattgatgtcgcgcagcacgctgtcatcctgtccctgatcaaactcatgcacgaaataatcaaatgagacattccggaactcgatggatccatccttgatgtcatagaccggatctgccgggttagccaggtcagagcgctcttccagcacctcgacgatacggcgggcgctggctgcggacatggcgaccatgacgaacaccatcgacagcatcatcaacgacatcaggatctgcatcgtatacgtgaacatgctcatcagctcaccggtggtcagcgtgccttccacgacgaactgcgcaccgaaccagccgatcgccatgatgcacgcgtacatggccagctgcatcatcggcccgttgagcacgaggatcttctcggccttcacgaacatcttatacagcatgccagacgcgccgcggaacttctctgtctctgcgtcttctttgacataggccttgacgacgcgcatgttcgtgatgttctcctgcacgctcgcgttcaggtcatcatatttgcggaacaccttgcggaacaccggataagaaagcagggtgatgatcgtgagcgccactgccagaaacagcatcgcatacaagaagttcacggccagctcggcattgatggcaaaggtcatcaccatggccaggatgagcatcatcggcgcgcggaccagcatgcgcaggatcatcatgtatgcgttctgcacattggtcgcatccgtcatcagacgggtgaccagtcctgctgtggaatagcggtccacattgcggaaagagaaccgctggatgttctcaaacatcgcgcggcgcaagttcttgacaaaaccagccgaagcgaatgatgcatatttggcagacagcgcgccgcaggtcagcgacaggaacgccactgccagcatgagcagtcccatgatcacgactgtcttcatgtcccccttggtgacgccgttgtctatgatgtaggccatcaaaaacggcagcgacagctcaaggccgacctcgccgatcatgaacagcggcgctttgatcgaaggtgctttatactctttgagctctgcaagcagtcttttcattttcttacctccttattcattctgagatgttttccaacagtcgcagcagcagtgctttcagctgatcctgctcatcctgggaaaacccggcatacagcttggattccatctcgccgaagttatgccgcagctgcgcgatgcatcgatatgccggctcatccagaacgatctgtttgtagcgaaggtctttgctgctttcctcataatgcaggaagcccttctcctccagacgtttgagaatgccggcaaccgttggtttgctgatgcggaaatactgttcaagatcacggggattgatctcatgatctgcgttggagatcagatagctcagggtccgcatctgcgaagaagagatgtgaagatcctgattgcgcgcatccaggtcctgacggatccggatgtccaccatcttgagcaggctgctgatcctcgtgttgtcctccatcctttcacctcttttccaattggttagcacactaattagcacattaaccattataggaataatccccttgttgtcaagcacttttttctgacaaaaaaaacgatcggactcaatcggtccgatcactgtcagttatggtcttttttctggtcagcctgcggatgatccgacggctgaccgagaggatcggatgatacttatccgatatcatgccggatccttcgatgaacagatcgaccgccagcatgatcacgaacagcgagatcagcccgatgcccttgttgatcatatagacataggcagtcagcccgaacagcgcggtcacgatgcacatgatgatcaccgtgttcttgtgtccgaacttgttcatcagcagatgatggatatgacttttgtccgcctcggagaacttatgtcctttcagcgtgcggcgcaggatggcgctcagcgtatcgatgatcggcagcgccagcagcagcagcggcagcgccagcgtcatgatcgtcgagctcttgaagcccaaaagcgagatggccgagatgatgaatcccaggaacagcgcaccgcagtctcccataaagatgcttgccggatgggcattgtaaatgagaaagcccagcgtagcgccgaccaggatcagcgcgatcatctccacatcgccgcgtccctcgatgacggccagcatagcgatgaccgtcaggatgatgacgctgatgccgccgcacaggccgtccaatccgtcgatcagattaacggcgttggtgatgcccgtgatccagaagaacgtcacgatgaaggagacgacgcccatgttgatcgtgatgcccagcggaagccggatgacatcgagcgtcacgcccgaagcgatcagcacgatcgcggccaccacctgaaagctgaacttgtacagcggcttcagattgaccagatcgtcgaccagtccgccgatgaacatgatcgtggatccgatcaggatgccgttcatcgccatgtcagtcttgacatacagcgccatcgtgatgatgaacgccagatagatggctacgccgccgatgcgcacgatcttgccatgatgcacggtacgctcattcatctgcgcgaaagcgtccagccggtaaccgatctgtttcacgaccggcgtgatcagcgccgagatgataaggggcagcaccagataccagatgtccctcatacgcggcccattatttcacgagatgcaggttttccagcaggatccccgttccttctgccacgcagcgcagcgcattgtcggcgacgaataccggaatgtgcagctcatcgcgcagcagctcatccagcccgtgcagcagcgcgccgccgccggtcagcaccatgccgcgggtcacgatgtcagcggccagctccggcggtgtgttctccagcacggtgcggcacgcatgcacgatctcagccaggcgctcgctcaggcatccctggatctccgcgctgttgagctcgatggagatcggcagtccgctgaccaggtcgcggccgctcacctccatcacttccgtcgtgctgcctttccatgccgttccgatcttcttcttgacttcctctgccgtgcgatcaccgatcagcagcttcttctcttccttacagaacttgatgatctcgcggtccatcgcatctccggccaccttcagcgagctgctggtgatgatctcgcccagagagatgactgcaacatcggtggttcctccgccgatgtccagcaccatgcatccgctcggccgtccgatatccagaccggcgccgaccgcggccaccttcggctcttcctcgatgtataccttcttcgcgccgctgcggtatgccgcgtcgcggatcgcattgcgctctacgctggtgatgttgctcgggcagcagatcaagatgatcggccgcttgaacatgcctttgagctccagcttcttgaagaaatagttcagcatgatctcggtcacttcaaagtccgcgatgacgccgtccttcagcgggcggatcgccagcatcctgccgggcgtccttcccagcatttcttttgcctcgcttcccgccgccaggcatttcttcgtttccgcatctatcgcaacgacgctgggctcatcgatgacgacgccctcgcctttcacgtacatcagtaagttcgcagttcctaagtcgattcctacttcctttgaaaacatggccatacctcccgtttcatgattgttctcattatagcataatatttcctttccctgcatcagggttcgcgggaaagtgagtttattctatcacttttcaaataaaaaacaaataccttcgacaaaagccccgtctatcttttcttcctcttttttcttcgcttttctgctccaaaaaaatggaagcgttttcctcttcaggcacgctctgtatgcatatgatgcaagggaaatgcagtgatccgcacatttttcccgcaggatgaacaaaattatagtagaataaagaaaaacagaccaaaaatgcctacatgtcgaaacagcgtgcatcgcggcgctgttttttatcgaccatttgttcggggagatgagaaaatgaacaagaagatcatcacggcatgcgccgcagcgctgctcatggccgcgtgcgccggcgcgtggctcgcctatcaccacgccaacccgaagacggaccgtttggaattcgaatacggcgatccgctggacatcgaagccgagacgctgatccgatccccggatcccgccatcgccgacaccgtggaaatagacctctctgccatcgagcgggaagaagacggcaccgcggccgcggggagctgggacgcatcattcacctacacagatgtgttcggcacacatacctgtccgctgaccatctgcatcagcgatacggcagccccttccttcctgaagctgcctgagcgcatcacccttgcgccaggcaatgccgatcatgacttcagcgcgtacatcgagatctgggatctgagcgaatgcaggctggagatcgacagcagcatggtcgacttcgaccagccaggggagtacatcctcttcgccacagctgttgaccgatatgacaaccagcgttcccgttccatccgcctcaccatcagcgaggcgcaggatacgccggcattcatcgccagcagcgagaccgtgactgacatcgatcctgtgctgcagcgcatggtcgaagcgtatctgaacgcccatgccggcggtcaggagcattggtcgctcatggtcatggatgccgagaacgctgcggccatcgtcagcgtgaacagcgccgtgcagcagtcagcgagcctgatgaagctgttcgtcatgggtgccgtctatgaccgctatgacagcctgagcgccctctggggcagcgccgccatcgacgatctgcttgagcgcatgatcaccgtcagcgacagtgatgcctggatcgagctggtcacgatgctgggcggcggcgattacggcatcggctgcagcgagctgagcgcatggtgccgatcgcacggatacccggacacggccatgtatccggattactatcaaaacttcacttccgtatcggatacctgtcattttctgcaggatgtctgtcagggcgcgcttccgcatgccgatgacatgctcgctctgctcaagcagcagcagttcacctggaagatcccggccggggtgccggatgatgtggtgaccgccaacaagaccggcgagctttctgacacggaaaatgacgccgcgatcatcttcgcgccgaagggcacatatatcctgagcgtgatgtccacatccctgcaggacagaaacaatgcccagcagatgatccgcgagctctccgccatgatctacgactatctcaacgcataagaaaggccgatgatgctcgccgaacgagcgtctcggcctgtttactgttcatccagctgagtgagcgtcttgtcgatcacgctttccggatccacgatcacaccgttatgttcgctgaccagatgcagatgcgcacccagatccggactgtatacacaggtgccggccttgccgatcacatctccctgactgacctcatcgcctttctgcacgctgacctcgctgaggctctgcagggtgaataccattgagccgcaggtcagctcgacgctcctgccgaacagctcatcctcccggacatcactgatcgtgccggagagcatcgcgacgatcggaaactcttctccgttaaaggtatagtctatgccctgggaagagcggtatacatcttcaaacttcgtgaactgatcgatctccccggctgctccgtcaaaataatcgaccgcggtctgcgcttccaccgtaaagggcaggatgaccttttcttccgccggcgtatccggcagctgcagcgtcacatcgacatcttccgatacggtcggctcgccttgctcgctctgccggttcatgacccaggtcagcgtgcccacggcagccagcaggaccagggacaggacgatcaccgttcgctttttccatttcacagcgttgttctcatagctgcgcatttcatcacctctatccccattatgcccttgccttcagcttttatacacatcggcaaagctgattcccgtataataatgggtcaatatctcgtgatggtcatagccctccagcgccatcccctgtgcgccttcctgcgacatgcctacgccgtgcccagaaccttccacggtgaaggtgacctgatcgccctgcacgctgatcgaaaagcagctggacttcagctggagcgcctcccggatatcgcggcctgagaatgcctgtccatcgatgcgcacgcttttcacatagccgctgtcatagcgcacaggcgcttcgatctcgctgatggcgctcatgcccagggatgcggccagctccgccttcgtgcatgtcatcgtgctgacatgatcgctgtccacttcggcatcccagggagattccacgctgcgcagataaggcagcgcattgctgtagtattcctctgaatcggcggtatgtccgccgctgctcgcaaaaaagaacgcggtgatcgcttctccctcataggtcatgatctctccgcgtgtcgcttccacggcttccttcacccggctgcggctttcttcatagctgtctttccagaccgcctgcagctgggtgtcatccatatagacctgcgaggcggtcgaatcatcgacctgatagccgcgggaggcgacaaaggtacgggcggccacggcctgtgccttcagcgcctccagctcataagaaggaggcatctcacagccgacgacgcccagcagatacgtctccagatccatctcctccacgctgccgtccgtgcgtttcaccgtgacgctccggctggtctgcggcgtgccctggatcgaggcgacgatctcctcataaatattatgtatgccgccgtcctggcccagccacatcaggaaacagatcagcacgactgccgcggcagccgctgctttcaatccgactttcactcgctcacccacaccatgcctatgccggcgcttccgcatttattccttctccccgcggatcttcttgcggtactcacgcggcgccatgccatagaagcggcggaacaggcggttgaaatagaacggatcttccacgcccacccgcgcggcgatctcatggatggagagctccgacttgtccagcagcggcagcgcctccttcatcttggtctcattgatgtagtaaatgatgttctttccggtctcctgcttgaacagacggctggcatagctggctgagacatcgaagtgatccgccacctcctgcagcgtcagcttgcggtggatgttgcggtggatgtattcgatccactcggtcacatcgcggcgatactggctgttggccttctcgctgagccatgtctccacctcatcccagatctcatccaggatctgttccaacgcgcccatcgtctcacacagcgcgatgagcttgctggcatcttcatatgggaagctcttgcggatgccgaaggaaagctcgcgtccttccacattgtgcagcacgaagctgcagtatgccttgacatcctgcggatcgatctgatgctcctccatatagctgagcatctgtttctggatggtgcgcacggccgcaaaatcatgcgcgctgaccgcatcgagcaaatcggcgtggaaggagacggcctctttgttcagcggccggaaggaaaagcggctttcccgcagatcgagcacccggtcctgctgatagaagcgcgtgcggctgcattcgatcatccggtcaaactgagccatcatgccggcggcatcatcgaccggctcactgacgatcacggacatcggttcgctgatcacccgatcagcctcattcagcaggctgcgcacgatgaactgcacctgcgtgcagtcgctcgtctgaaagagcatgacggcgctgtgctgattcagaaacagcgtaagggaatagaccgaatcgggacggttctcgttgagcaccgcttccatctgcatgcgcagctcagcgcggtcgatccgtttccggcagccgatcaggtggatctgatcgacacgcaggtacgccatgacgatcccgtcatggacaaattcgtaaaatgggtgatccagcacctgtgcgaaatcctgcacgctgctggaatgatcttccttatgcaagaggaagcactgctggagctcgcgcatggcgccgcgctcctgatcgcggctcatccggtgcatctgccgcgatttcgccttggcttcctccactgccgcgcgaagcccctccgggctcagcgccttgcccagcagcaggtcgctgatgccggcgcggatataagagcggacccggaaatactggaaggtgtccatcaccagcaggatctggacatcccggtcattgcgccggatctggtggatgagcgggatgcggtccagccggcgtccggtcacgcccaggatgatgatctgcgggcggatctcgctgtacaggcgataggcatctttgttgttttgggcaaaagcgacgatgtcgcagttcagttctttccacggcagcatatttttgacagccagctgccggtgcatgctctcatcgatgacgatgaccttgaacagttcaggtgaggccattgaagatcgtcagctccaggatgagcgttccgcacaggtaagccagcgccatcgccagcaatagaaacagcacctgcgccttcatcggctgtctcacgttcacgaagcggtcgaactgaaccccgctcagtgcataaagcgctgccagaaaacagatcagatatactgacagcttcaagatcccatataccatcgtcatccctcatttcagtcttattctaccgtagagccccgcacgaattcaatcgcttccagaaaaaaagaccatgacgccaggtcatgatcagtcgatattgccgtttgtctctctctgcccgccgttgttgacatagatcgcgctggcagagaacaccatgagaaagagcatgccggtctggatccagttgagcgtatgatccagcaccccgtgcaccagcacggcgatcacgaaacagacgatcagcgcgaacagcggcacatcgtagcggcgcgtgtacaggcggacgatctccttgatgttgggccagaaatagatgaagaacagcgtgcagccgacgatgccgtagctgagcagcgggtcgaggtacacgctgtgcgcgtgcgatgcctttcgtccgtcatactgcttgtagaagatctgatagcactgtgggccgccgccaaacagcagatgatcgcggatcgcctgcagcgccgtgcgccagatccgcccgcgcacgatgaaggaatccaggaagccgctgcgcgggagcaggctgggatccagcaagaccgcgccggcaccgcagccgaccagcgctgcgctgaacgcaaacgatttccgatgccgcgtgagcaggaacatgaccggtatggcgacgacgaacgtcggccaggcagcccggcagcccgtcagatacagggcaaacaggttcatgatgatgatcgcccagtaaaacacgacacggcgcagggtatgggaatacaacagcttgtacacgcagcacagtaccaggaactcgatcatcgcggcatagaaattggcattgaagaatgttgagttgacgcgccagcgcggcgcgtcctccacctccagctccaggaagctgtagccgaaatggtcgatgatgcggaaatattccatgatggcccagatgaaacagaagatggagatgatgcagcaggcgtcgatcagcagcacgaacagccgcttggagatgacgctgcggtaaaacatatagtaaatgaggatgagcagcaggcccagcgtctgcactacccccagcagattgccataacacagcgacaccacgacagacagcccggcgaagacgaaggcaaacagcgagcggggcgtggtgcggatgagccggatgagccgtccggtgaacgccagatagatcagcacgatgatgatcgcagcgatcgaacagaaataaggaaggaagattgagcaggtgacaaacataatcagatattcatccagcgtgtagccatcgagcttacgatgataaaacgcttttgcacgttcgagcaggttcatgggtcccctccttcagcagcgctgggtcagccagctgtcacagcccagcgcttccgccttctgccgcaggcgctccagcacggcgatatcccggctcagcgcaaacaccgccgatccgctgcctgacatgagcgcggcgtcggcgccttcttccgcgagcatcgcgcggatctcgcggatctgcggctccatctgaaaagcgctgtattccagcgtattgcccagcgagcggcacagcgtctcatagtcatccgccagcagacagcgttcgaccagatcgatatccggatgttctgcctgctgcagatcgagcagctgatatgccttgccggtcggtatgccgcagggcggcttgaccagcaagagctgaaaatcgcagtgatcctgcagaaaagtcagcttctctccgatgccttccacccgcgcgcagcggttcatgacgcaatatggcacatcggctccgacgcatttggccgcttccgcgacctgttcaagcggctcgctgatcgcgcacagcgcatgcacggcgcggatcatcgcgccggcatcggcgcttcccccggccaatccggcctgcatcgggatccgtttttccacacggatatgaaaatgctccttcagcccatagcgctcgcgcatgaacgcaagcgccctcatgatgaggttggactcatcgcagggcatgtccggacagtcgctttccaggatatcccggctgctgcaaacgacatccagcgtatcatgcagccgcagcggcatcatgatcatccgcagctcatgatagccatccggccgtctgcggacgacatcaagcgacagattgatcttcgcattcgcttctattttcatgttcatacacctcaaataagttcaggaaggctgacagctccagctgctcgctgcgcacgccgggatcgatgcccgccttctgcagcagcgctgccgcggcatcctttccgccgcagatggacgcaaaattattgaggatggtcttgcggcgctgcgcaaagcatgccctcaccatggcggaaaacgcagcctcatcgagctgcggacgctcccggaaacgaaactgcagcaccgtgctgtcgacgttcggccggggcatgaagacattgcggggcaccttgacgacctgcttcacgctgcagcgatactgcgtgacgacgctgagcgcattgtagtctttgctgccgcattcggcatggaagcggtccgccacctcgcgctgcatcatgacggtgatggccgcgatgtccgcttcggattcaaagatcttaaacaggatcggcgtcgtgatgtagtatggcagattggccgcgatcaccacatcatagccctgcgcgcgcagctcctccaccctcgcgctgagatccgtctgcaggaaatcctccatcaccagctcaacattatcgtattcgccaagcgtatccgcgagcactgcaggcagtctttcatcgatctcaaaggcgatcaccttagcggcatattcacacagaaactgcgtcagcgcgccgatgcccggcccgatctcgatcacggcgcagtgatcgctgacgaccgcgctgcgggcgatcttttccacgatgcccgcatcgatcaggaagttctgcccatagctcttctttgccgtcatcccatgacgctgcaggatcgcctttgtctgcgagggtgtcgcgatcacatgtctcatgaaaatcctccttcgctgagcaccttcttcacctcatccgcctgcacgcccagcatgttgagccggcgcagcagcgtcttggcattcggtctccccagatgatagtatgtcccaagaaaggcacggcgctgcgcgctgtcagcttttccctgcaggcccagatccagcatctgatccatgccgatatgcgcatgcggctgctccgcatggatatagcagtgcttcaacgcttcctccaggtcagcgcgcgaggcatgttccacgccaaccttcttcggcgtcttcgccttgtctttctcgataaacgcattcttgcagccaggcacggcctcattcacccggcggcggatatactcgccgggatgatcgggatccgtgaagatgatcacgccccggcgctgctgggccaggcggatgagcgcaaacgtctgcgcatcgagcgacgtgccgtgggtctcgatcgtctcacaatcaaaatactgctgcagcacattcgtgtcgttttttccttcgaccacgatcacttctctgatcttcacgtaaatcgcacctcacttccatggtattatcgcacagaatgacatttttttcattatttatttcagttctgtaagtcacacgcaaaacgtgacgccctctggcgccacgctcatcattcgctgattgcttccagcatccgtgccgcgatcggctgcacatagaggctggagcccgcttctttcgtattctccatcatcacgctcagcgccacctgctcattgaccgcacaggtccagccgatgacttccgcgccgttatcgacttccgcagaaccggtctttccggccgcgttggtcggattgtccccatagctgctcatcgtctgccgcagatcgtccagcaaggtctgcgccgtctgggcgctgtacgcattttcctgatatatccggcgttcgccatccgcatagatgagatacggctgcaggatcgtcccttcattgacatatgcggtatacagcgccgtcatgtgcaccgggttgatgagcagatcgccctgtccatagcccgtcgccgccagcgtctgcgcatcgctgagccgatcgccgtatgtggaataggtcagcgtcagctcaaaaggcagcgcgctgttgaacccgatggcatccaggccttccgccagcgcctgcgcgccgatctgatcggccagctgcgcaaagaagatattatcggaatagcgcagcgcgttggccaggttgctcggttcatcatacagatgcgtggtcgtcacataatgatcgccccagctgctgtccttctgccagcgctccgtcttttcaaacgccgtgtcggccgtgatcgtcccattgtccagcgcgatggccgccgtgatcgccttgaaggtggagcccggacagtaagcggactgatagcggctgaacatcgggttgcgcgcatcgctgctcagcgtctcccattcctcgctgtccatgccgttggcaaaatcgttgggatcataggaaggtgtgctgaccagggcgagcacctcgcccgtctgcgcatccatcgcgacggccgcgccttcatcatcgcccatgccctcatacagcgtctgctgcacatccagatcgatcgtcgtgacgatgtccttaccatcctgcgccgcgctctccgcaaccacttccttttcctgtccggaagcgctgagcaccacgatgcgcacgccgtctctggcgcgcagctcatcttcatacaccgcttccaggccgctcttgccgatcaggctctcctgcgtatagccttcatccgcgtgttcctccagatcctgcgcagaggctgtctgcacatatccgaccagatgcgcgcaggtctgcgcatacggatagacgcggccgctcacgctctgcacgctgatgcccgccaccgtatccagctgattgctcagcgcgtggtaatctgcggcagagaccgtcttcaccggcacgaacatgcccgcctgcacccagctggccgacatcgcgttttccaccgtctctttcgaaatgtccagcgccgaggcgagcgccgcgttggagcgctcatccgtcgaaccggcagccaggccgacctgatacaccgcgccgtcctgtgccagcggcgtgccattgcggtcgaggatcgatccgcgtgtgccctgcgtcgtctgcacgctgacactgtcttcgtcgctgagctgcgggaagatgaacgtgctgtcccagtcgatcttatagccgccctcctcgctcaccaccacggccgtgttgtcaaattccaccgtgcctgcagaggtctccattttctgatgatagctgacattcgcgccggtatcggtcgtctccgcctggatgtcgctgaattcgatggctgaagcaccgatgccgccatagatgttctgattacgcgtgatgaacgcctcctggctccaggatgcgcgggcgttctcgctgagatgcgcatacatctcctcatagttctgttcctgcagcagcgcggcaaatgcctgcagctccttctgcggcgtcg

SEQ ID NO: 2962 - DNA, 9030 bp, Unknown
  16S sequences of unknown bacteria
cgcaggacgggagggcgaaaatacggaaaagggtactcttttcctatgcttgctaagaaagttttttatcttttatgtccttatttccctctacggagaaaaaaccattttgccgaacttatgcaaaagaaaaacgctgcaatctcaaaaaagattacaacgcttccgaaaatccatattcaattttgccggacgtttctatttgtcctctttttcgacttctgaaatttcctttgcggttgctgttacaatccgtatgccgttatcgctcatatcatcaagcagagcgtcgagctgccgccgctttgtatcttttccgacgggcgtatctaaaagaaactggtctacggatatattgtaacggagcataagctcaaaaaagatttgcagactggggtgctgtcctttattctcaatattcgcaaggtagcgaggggaaatatacatttcatcacttacctgtttgcggctttccttgcgtcctgtccgcgcagcttttatcgcttctccaaaggctttgaagtcatatttttctactggtctttttgccatatttatttacccagttacattttactgttcccctttcttcttggatatgtctatacagttccactaattagccataataattcatatttatatacttgctattattcgtatgtccgactataattatactgatatgatttgtagaaaggacttgggtgttatggaatatatgtcttgccccgaagcagcgaagaaatggggaatttctgaaaggcgggtacaggtactttgcagagaaaaccgcataccgggtgtttcaaaacttggatatatgtggctgataccaaaggacgctgaaaaaccgattgacgggagaacaaaacgaggaaaggagctgcaccatgaataaagttttgattatagatgatgataaagagctttgcgctcttatgaaaaagtgcatagagcaggaaaaattatcagccgtaactgtatataacggtattgagggggttcgtctaattgatgaaaataaagatagctattcccttattattttggacgtaatgctgccggatatagacgggtttcagattctccaaaaaattagagatacaagcaatatcccggtgcttatgcttactgcaaaaagcagcgaagaagataaggttttcggtctgcgactgggagcagacgactacttgacaaagccatttggtattaacgagcttttggcgcgtgtcaattcccttatccggcgatataccaccttaaacccctttacggcagacatagacagcatatcgttgaaagatatggtaattgacaaattaaatcgtacagttacggtcaaagatattcccgttttgcttacaggaaaagaatttgatttacttctctttcttgcttccaacaaaggacgagtatttaccaaaaaacaaatttattcacaggtatgggaggaagaatacgcttttgatgatagcaatattatgtcttttattagcaaattaaggaaaaagattgagccagaccccgaccaccccttttacattttaactgtccggggtgtcggctaccgttttaacaaggaggcgtaacatggatataaatgtttatcttttcatagtgatagcccttatgctgcttattattatgtatctcctttttgtcttacggcgtgtgcggacacagcttgcgctgataaaagacgccttagatgatataaagggcgggaatttgaaccgacgtattttagcaggcgaaaacgatatgacaaaaacaatttgctatgacattaacaaaatagcagtaaacagtcaggcgcagcttatacggcaaagacaatctgaacaggcatataaacggctgatgacaagtctttcacatgatgtaaagaccccgcttgcttctcttgtaggttatctggaagcggttgaaaacaaaattgttattggagaggaaaaggacgaatatatccatgtcgcacatgaaaaagcccactatatgaaatcctttgtggaaaatttgtttgaatgggtaaaactggattccggagagcagatttttcattttgaaaaatttgaccttaacgagttatcccgcaacattatagcggattggattcccgtcttagaaagcaatcattttgaatatgagtttgtcatacccgaaacagagtattttattcacatagatgtaaacgcatatacccgcgtacttaacaatctttttcaaaatattattatccatagtgcgggagataaaatggcactgcatatttgtgaagatatacaacaagctaaaattataatttcagataatggaaaaggaatagctcccgataagctgccacatatttttgaaagaatgtaccagtgcgaccagtcgcggtctgcaaagggaaatggtttaggactggcgattgctaaagagcttatcagtgttcacaaaggaaccattaccgctgaaaacagctctgataaagggactgtatttactatattgcttcccaaagccctgtaaataatgcggggctttcctgctataaaacaagaaaaaagcaaggtttcggcaaggttatggcaaggttgatactatataatgggaggtagaaaggaggaaaagacaatgactatcatttctactgaaatgctgaaatggaaacgcaataagacagtcttaggtatctttattctaactgcaattttaggaatattcgcagttgaacgtgctttcagtatatcaagaagtagctcactaatgaatagttttagtgatttatacacattggcatttaagaaccttacaagtttgtttctgcctattgtgttgagtatgtttgcaaccacattgttctttgatgaacagaaaaatgataccttaaaaggacttctgattattccgatttccaaaacgcaactttatttttcaaagatagcagtggtaatttttatgtcattagcactatgtctgcttacttttgcaatctgtattcttggcggctttcttgtaggcggctttacagatttgaatacggaaacaattttacaggcgggattattatttttagccggtggcgtgttagttccacttgcaatgctccccgttatttttttagcaacattggcaaagggatatgttctaccgattggggctgcattactttatcttgtgcctgtcgtgcttattccgtcggggattatgggactgcacccactggcgagtgttatgggaatttatccctatatttcatctgacgcagcagaaatggttaagaaatgggcgggaggaatagaaataactatatctccgaatatctgtttaatttctcttttggtaattggaagtatttcagccattgtttccgtacttgcattgcggaaacagacctattgaaagtgaggatatatgatgaataaatatgtaattgaaacaaaacaactgacaaaaacttatggagagcaaacggtagtcaattctgttaatattcatgtgaaacaaggacagatatatgggctgttggggcgtaatggggcgggtaaaaccacaattatgaaaatgattttggggttgaccgatattacttccggcgaagtagacgtattcggtcaaaatatcaaagggagggaaaaaagagtatatccccggattggtgctattattgaaacacccggcttttatccgaatttaacaggtacggaaaacttggagatatttgcaaaactgcgcggtactgctgcgccaaatgcagtaaaaaacgccttggagattgtcggtctgccttatcgggacaaaaaattgtttagcaagtattctcttggaatgaagcagcgtcttggaatagcaaatgctattttacatgaccctgaactgctaatcttagatgaacccacaaacggtcttgacccgataggcattgcagaagtaagggactttattaagactttaagtatcgagcgcggaaaaacaattctcatttccagtcatattctgtccgaaattgcactactggctgatgacatcggcattattgaccatggtgtactactggaagaaaacagcatgaatgagctacaaaagaaaaacagtaagtatatacttctgcaagtttctgatataccgaaaacttctcttgttttggaaaggcagtttggggttaccgaatattccgtacaggacgaacacaccctgcggatttatgacacttcgttggatatggctgctgtcaataaagctcttgtggtacaggatatagctgttatcagttctcagctatgcaatgatacattagaggactatttcaaaaaaatcacaggaggagaaggaattgcttaggctgatacaggcagagtttcttaaactgcgtcgaaaaaaatttattgtgttaatgctgttatccgctcttttcatgccacttcttgcagttttttatttcagaagtgctgataaaacagttattgaaccattacaattttataagtggactacattcagctatacagcttggattatacttcctgttgtattgggtttggtttctactatgctcatgtatgacgaaaatcaaaacgatatgctcaaacagttgtggattataccgattagcaagacaggatatttttttagcaaatttattgttgtactgtcttattccgtttgttttatgttgcttacagccatagcgtctgtatttttcggtatgcttcccggttatataacctttgaatggaatagtatcagttatctatttaagaaatgtattgaaatcgccatacttaccgcattttccatattaccacttttagcggttgcagctgccgggaagaactatatactccctgtatgtgtgacactggtttacacctttcttagctttattttgcttatggttaatatgtacctacaccctctatccagtgcaacagcaattatcatgcgagatattcccggtgttattttggcacaggaagtcaatattccggctgcacttttttgtatcggtatatggactattgtttctatcgtatttgcgtacatttccttaaagcatagaaagtgagtgattgaatgatgaaagaattgatttgggcagaacatcaaaaactccgacgttcaaaaattgtgttggtcgccatattcgcagttattatggttgcaattattgtttttactcaagggcagttttcttttggggaaaaacgctatatagatgacgcagggtggtttatgaacgcagcacagtctttagcaactttttttgttcttcctgcggttattgcacttttggggagctatatgatttgtcgtgaggaacaagaagatactattaaatcattacgtttaattccaataagtgaagctaaaatgacgattgcaaaattacttattacttttgcatttagcgtactcttttatttgctgcttttcggcattacatttttagttgaagttattttgcattttaggggcttgtctatcaaaatgattttaagttttttcaaaatctatttacttgacggcattgggattttctttgctattgcacctgttattgcggttgtatcaagaataaagaaaggctattggcttgctttgatttttacagtaatttattcttttgcaggattattcacaagtatatccgatgttctttcggcttgctatcctattactgctacattcaatatttccggctattattctgccacctttggagaaatcattattagccttatgagtttgttcttttgtggattgttttctgtcttgattttaatatctaaaaaaacaatcaaaaataagtaatgatacaaccaacatctgccggacgacggcaaagaaaaaaagccgtcgcagagcagccatattttcacgcgcctattctatttcggcggctttgattttcagagccgccgtttctttttgtctgtacgacgacccttaaccatgtagacatggcggctttaggaggtagccgccatgagttataaaccacatcaacaaattcttacattctttgatttatcaaaaaaagcccgaccgccaccggggatattcctacccttagatatgaactattaaatcatctaaatactttttattattcctatgcgcctgtccgcgtttttttgcggacgggcgcattttgtatgcttaaaaaaatttttgaaaaaatttccgaaaatatttggcattttttcaaagctccgtattaccccgcgaaaagggggaagcaccaccaactttcaacgagaaaggaggtgagaatgtggaacctaatagcagggagttttataagcaatgttcttttcagaagtattgcaatgcggtattgcacaatgaagcgtgcgacgctcatagagagcttcgtacacataaggcaaaggaagtaaccttttccgacatgaccttagatgaagcgcgacagctacatacctttgatgaatatttcaaacgggaaactgctgaaaccgtctttgaaaaagccggaaagaaaatcacgccgaagctgcttcttgaagcaatccgtactttgccggaagaaaagcgcaaagccgtactcctgtactatttcgagggaatgaacgacaccgagattgcggagctgttcgatacgtcgagaagcacgatacagtacaggcggacaagctcttttgagctgctaaaaaaatatctggaggaaaatgctgatgaatgggacgaatggtaacgaacccggctacccggaaaatgcccttgttccttatcctgtcattgtggcagcgacaaagggcgacccggacgctatgaaaatggtcttgcagcatttcagcggttatatagcccgtttatccatgcgaaagttatatgacgagcgtggaaatgtttattttggtatagacaacgacattcgggaacggctgcaagccaaactgatgatggctgtcctcaattttagaacagagaaataaccgcaatcggcggtggaacgtctttactcccccttttccgttccgctgctaatgcggcaacacagccattttgaaccttgacaaagaaagcggcgcaatagaacggcgacgcagcataaggcaaatcggatacgttccttttgtgccgagccatacggcgggtgcgccatgacctttctcctacgggaaaagcgagcgaacaacaccaccgctgcaaagcaagtgtagcaacttgcgggcgataacgcacagaatacataatgatacttccttacagccatagtccgagcgttagaagcgtcgcaggcaatgggtagggcttcggcagaccgccggaggggtgcaagtcccatgaggttacgctaatagccgtccgattaaagcctatgttacaaattgacttttgacccatttagaaagggggacgacaaattgaacaataacgacgtgccgatttgggaaaagtacactcttaccatagaagaagccgcaaaatatttccgtatcggagaaagcaagctgcggaaactggcagaagaaaatcccgtcccggactgggtaatgatgaacggaaaccgtattcagattaagcgtaagcagtttgaaaaaatgattgatacggtggacgcaatctgatagtgaaatcgagccttgaatgtggtacaatgtagtcaagcatatcaaggctctttccattatggaaaggagcataacgatgtcggaaaaaagacgggataataaaaatcgtattctccgcaccggagagagccagagaaaagacgggagatatgcctacaaatatatagatacctttggaaaaccgcagtttgtgtattcttggaagttagtacctacggacaaaaccccggcaggaaaacgcgacgatatagcgttgagggaaaaagagaaagaaatccaaaaagaccttgacgacggtatcgaccatatcggaaagaaaatgacggtctgccaactctacgcaaagcagatacgccaccgggcaaatgtgcggcatggtacaaagcaggggcgaaaacagctcatgcggattttgcaggaggataaacttggagcctgccggattgaaaatgtgaagctctccgacgcaaaggaatgggcattacgcatgaaagaaaaaggttacggcttcaagactatcaacaaccacaagcgttccttaaaggctgctttttacacagccatacaggacgattgtattcgtaaaaatccatttgacttccagttgaacacagtccttgaagatgatacggaaccaaaggaacctctatcccctacgcaggaagcggcttttctgtcctttgtgcagcatgataaagtctatcagaaatactacgacgagattatcatactgttagggacagggcttcgcatttcggaactctgcggactgacggaagctgacattgacttagacaaacagcttatcaatgtagaccaccaacttttgaagattgcagacgtgggttactatgtggaaacgcctaagacgaaaagcggcaatcgggttattcctatgagtgaaaaagtgttggaagcatttcaacgggtgctgaacaaacggaaatatgcacagcctgttattttagagggctacacaaagtttctgtttcttaaccggaacggcttgccaaaagtggcagtcaactatgaaagtatgttccgggggcttgtaaggaaatacaacaaaacgcaaaaggtcgcattgccaaaggtaatgacaccgcacaccttacgccacacattctgcaccacgttagcaaatgcaggaatgaacccaaaggcattgcagtacatcatgggacattccaacatcaatatgacgctgaactattacgcgcatacgacttccgaaacgtcgataacagaaatgaagcggctgattgcataagtagtaaacggagaatttactactccacatactacttttgaacaccaaaacatacggggatataagaagatttgagaatatcttccataacaaaaaatgccggaaaagcctgtaacaataggctataccggcatataagaacttttgaaaagatagtcaaaaattactttgtgattt

SEQ ID NO: 2963 - DNA, 28414 bp, Unknown
  16S sequences of unknown bacteria
tccacccgccggtccgtcaggaagcggcgcagcggcttttcccccggcgcgcccatgggtcgaatccggtcgccggggcgggggcggcgcatgacggggcccagcgccagcacctccggggacagcaccgcctcgcccgcatgggagggcaccggggtttccggcccggcgggggtctgcgtcacgtgcgtaaaatcgaggacataggcgctttcatgcaccgtcaccggcaggggccgtgcggcgggcgcggggctaagcggttcgtcccgctgggtgagcagatagaggtgcgcccgccccgccaccgccttgagtccgaggggcaggttgcacgtttcgcccgcctccgcgcgcgccagcgcggccagggccagcgtgtcggcgtggctgagggcgcgctcgtccggcagcgggccgtgcagggccgcgccttcccagaaccagcgccggagcacgcggcgcgccagcgcctccggggcgtgggcgagcggtccgcgccgcagcgcatggagcgggggcaattcggcccgggcggtttcatacagccgctcggccagcgcatccaggcagactgcgtccgtcccgagcgcctccgccgcctccgcgatatggcccgccgcgccgggaaacagcctctccatggcgggcaggacctccaggcgcaggacgttgcgcggggtgaccgggctttggttgctctcgtcctcgcggtgaggcaggccctcctgcgccagcgcctggaccagcgtttgcttgcccaggcccagaaacggccgcagcatcaccccgcggccaaacggcacgcatgcccgcatgccgctgagcccatccgtgcccgcgccgcgcagaaggcgcatcagcaccgtttcggcctgatcgtcccggtggtgcgccaccaataccgcatccagcttcagcgcgtccatctgccgtgcaaagatggcgcgccggcgctcgcgcgcccgcgcctccatgccgggagcctccatgccgccggtcaggcccgcattctccacgtgcagcggcacccccagctcatcgcacagcgcgccaacaaagcgctcgtcctccagcgaagcctcgccccgcaggtcatgctgtacatggctggcctccagccgaaaacccgcctccgaccgcaggcgccacagcgcgtacagcagcgccacgctgtccgctccgccgctcaccccgcacagcaggccggtccctccgcgaaaaaggcccgcgtcctccagcgcgcgtctcaccgctgccaccggcgcgtcaaagcccatcggcgccctcctccccgcttagcagctccatcacctgcctggccagcgtttccgccgcccggcacgcggccgcggcccagccctgcgccgcctcgcgcgtgggcaggaggagcagcacggcgaaggtggtttctcctttgcgcagggatacggcggcggcatgttcccgtcccccataggacaccaaagccggatggccctcccccgctgccctgagggcctcctcctcatccggcaaaacgggaagagggccaccgtcctcctcaaagggcagcgtatagagaagcgtcagcagccggggggcgcaggtacggaagccatgcaccaccgcgcgggcaagggcctcctgcggggtccgcacatccaataccagcgccggcacatcgccctcgcgcaccgttcccaccgcgcggcacaggcccgcttcggcccgccggtacgccgccgcggcctgacgccgctcgttcaggccggcggcataggcgggcgccgcctcccggatgcgtcggcagtccgtgtgcgtaagcttgtcccgcaacagcgaaagggtcttttcgcccttgggcgtcagatagagcacgccttccagcgcacagcggccctgggctacctccccgtcctttttcagctcgtccagcagcagacaatagggcaggtactccatcagctccagctccgccacaaagggccagagctgatcggatgtggccatgcccagcgcccggaggcacagaagcagccgcagcttgttttccgcgtccgagacgcggcgtttgggcgaaagaaacggcatcataccctcctcagatttcatggcggcgcttttctccccgggcgccgtaacgaaagaatgggcaaagcggaagctttgcccatcaaagtatcggaaaaattccggccacgccggtcttttccgccagaacacgttttcctgcgcccgcggcggagctggaaagacgcgaaaggaacccttgccgcgcaaggctgcgaacccaccgcaccggccgccggattcgcaatggattcgaaggataccgaacctttgcaaacaaggattcgtcggcaaaagggcctgccggagcaggcgatgcgccgtcaggccatgaaaggcttgatatcgctcagcaggtcgtcgcaggagtcggtgtagatctccatggtgatgggcttgctcagatccaggctgaaaatgcccagaatggacttggcgtctaccacatggcggcccgcgcgcaggtccacatcatagggataacggttgacgatgttcacaaaggacttgacgttctccgccaggctcagcttgatattgacagatttcataattgaaagccccctttcgtttggttacgcaggtattatacactacgccttgaaaaaaagcaaggattcccgccttgtatcattcaacaaagttccccttaaagttccccttcggcacgggggattgttgtcgcggatgatccatgttataatacgacctaatggcggcctcttcgccatgatccgagcgaatatgattggataaggatgaagcgagcgatgagcaacctatccccggaagaaatcgggcagctggccctgtgctttgccccggaaggcatgctgaaggcgccggttcccttcggcggcggtcacatcaacgacacctatctgttttcgcccgcgggagagaagggcgtgcgctatgtgctccagcgcatcaacaggaccgcctttccccacccggaggacgtgatggacaacatgctccgggtgacgcagcacctgagggagcagatcgtcctgcgcgggggcgacccgcagcgcgagaccctgcgcctgctgcgcacgcaggacggtcttttctttgccgtggaccgcaacggggactactggcgctcctacagctttgtgagcgattccgtcagctacgaccgcagcggcgacgaaaggatcttccgcgaatcgggccgggcgttcgggcggtttctgtccatgctggacgggtttgacgccgcttcgctgcatgagaccatcgagcgcttccacgatacgccccatcgctttgcggcgctgcacgaggcggttgcccgtgacgcggcgggccgcgccgggggtgtgcgggatctgatcgatctggccctgtcctatgagccgttttcctccacgctggtggacgcgctggcctgtggccgtctgccgctgcgcgtgacgcacaacgataccaagctcaacaacgttctgctggacgagcgcaccggccgcgccctgtgcgtgatcgacctggataccgtgatgcccggcctgtgcgcctacgacttcggcgacgccatccgctacggggcctccactgcggccgaggacgagcgcgacctcagccgcgtgaacctgagcctgtcgctctaccgcgcctatgccgagggctacctgtccgaggtggggaacgtgctcaccggggaggaactgcgctcgctgccggtgggggcgaagatgatgacgctggaaacgggagtgcgctttttgacggattatctcgacggcgacgtttattttaaggtggcctgccccgatcacaacctggtccgcgcccgcacgcagctcaagctgttgcaggacatggacgcgcactgggacgagatggtttccgtgatcggcgagctggccggccgttaagaaaggcggcgcgtgacgggcgatcccgcttctcccgccgccctggagaggaccaagccatgaagctacacatcaaacccatcacccttgttctctgcgccatgctggcgggaggcgcggtggcggtcgcgctgcttttgcccggtacgctggacagccgccgcacgctggagatcgagcgcgccgccacccccacgcccaccgcggacgtgcgcagcatgctgatggtgaccctcgatcccgccaatacgcctgcccccacgcccatgctgctcaaaacgggcgtcaagggcgacgaggtgacgcgccttcagcagcgcctccaggagctgggctattacaacggcgaagtggacggccagtacgggcccggcacagccgaggcggtgcgggtgtttcaggcccagcacgggcttgacagcgacggcatcgcgggcgaagccacgcgcgcccgcctctatgcccaggacgcgcagacctgcgtgcccaccgccacgcccacggccacgccctcgctgctcaaaaagggcgacgccagcgacgccgtgcgggaaatgcagcagcgcctcaaggagctgggctactacgacggcgaggtggacggcgacttcggcggcggcacggaggaagcggtgcgcctctaccagcgccagaacggcctggatgtggacggcattgccgcggaaaagaccttcgccagcctctacagcgacaacgcccggcaggtgaccatcacccctacgcccgacccggcgcagatgccccttctggtcaaccgggagcatcccgtgggcgcggattatgagccggacgacctggtgaagctcaaaaacgtgatgccttcctccctggttaccgtcaagggcagcgacatcgagggcgaccgcaccgccgcaaacgccatgatcgagatgttcgaggccgccaaggccgacggcgtgaccggctggcagatcagcgcgggctaccgcagctatgaataccagcaggagctctttgacgagcaggtggccgagtaccgcgccgagggcttcacgcaggaaaaggccgtctccgccacgcgaaacaccgtggccgatcccggcgccagcgagcaccacacgggcctggcctttgacatcacggtggccggcaccatcttcaagggcaccgagcagcagatctggctgcacaagcactgctgggactacggcttcatcatccgctaccaggaggataaggaggacatcaccggcttcctggccgaatgctggcacatccgctatgtgggcctgccccacagcaccgagatgcgcgaccgcaacctctgcctggaggaatatctgggcgaggcctagggcgcttcgcccggatgccgggcggagggcaaatcaacacgaagaagggacatcatgtacgacctgatcgtcatcggcgcgggacacgccggatgcgaggcggcgctggccgccgcacgcatgggcgtggaaacgctgctgcttactctggatcttggaagcgtggccctgatgccctgcaaccccgccatcggcggcacgggcaagggccaccttgtgcgtgaggtggacgcgctgggcgggcagattgggctgtgcatcgaccgcacgttcctgcaaagccgcatgctcaaccgcgccaagggtccggccgtgcacagcctgcgcgcccaggccgacaagcgccgctaccacgaggacatgctgggcgttgtgttttccaccccgcatctgaccgtgcgccaggccgaggtcatggacatcctcaccaaggggggacgggtgagcggcgttcgcaccatgacgggcgaggtcatcgcctgccgggcgtgcgtggtatgcggcggcgtgtacctcaaaagccgcatcatcatcggccagtattccaaaaacagcgggccgcaggggcttctgcggtccgaggggctgtccggcacgctggaaaacctgggctttgcgctccggcgcttcaagaccggcacgcccgcgcgcgtggacgtgcgctccatcgactttgaccggatggagccccagcccggcgacgaccccatcgtgcccttctccttcctgaccgccgcgggcgatccggacacgggcgtgtccttcccgctgcgcaaccgcgccctgtgctacctgacctataccaatgaggaaacgcaccgcatcatccgggaaaacctgcacctctcccccatggtgcgcggcgatatcaagggcaccggcgcgcgctactgccccagcatcgaggacaaggtgcgccgctttgccgacaaggaccgccaccagctctttctggagccggaggggctgtccagcccggaatggtatgtgcagggcatgagctccagcctgcccgaaaatgtgcagtgggccatgtaccgcacggtgcgggggctggagcgctgcgtgctcacgcgcctggcctacgccatcgaatatgactgcatcgaccccacggagctgcgcctcaccctggaaagccggcgcgtgccggggctgtatttcgccggacaggtcaacggcacctccggctatgaggaagccgccgcgcaaggcattctcgcgggcatcaacgccgcgtgcgcgctgctggagcgtgagccgctcatcctcacccgcgacatgggctatctcggcgtgatggtggacgacctggtggtcaagggcacggacgagccctaccgtatgatgaccagccgcagcgaataccgcctgctcctgcgccaggacaacgccgacctgcgcctgacggcgctcagccacgcgcggggtctggccagcgagcggcgcatggcgctcatggagcgcaagcgcgaggggacaacgcgtttgctcggcgcgctgcatgccgtgcggctgccggcctcgcccgcgcgcgacgcgtggctgaccgggcacggccagcccacgaccgccgccaccctgaccgcggaggacctgctgcgccgccccgacatcaccctttcttcgctcaaggagctgtgtccggagctgaccggcttccccgccgatgtggaaacgcaggcggagctgaacgtgaaatacgagggctacctcaaaaagcagcaggcccaggtcgcgcgcgcacgcgccatggaggactggcgcatcccggaggataccgactacgaccggatcgacagcctgcgcatcgaggcgcgccagaagctgaaagccaaaaagcccctgagcctgagccaggccgggcgcattccgggcgtgaaccccgcggacgtggccgtgctgatggtatggctcaagcggcggcgggacgccgtcgaagccaacgacacaagagagagggaacagccatgaaaaagcattcctccatggcgctggtcgtgttcgcggtatgcatggtcagctattccgggcccatggtcaaaggcgcgctgaacgagggtgcctcgcccatctcggtggcgcttttgcgcatgctggcggcggcgctgctcatgctgccctacgaggcgcgccagtgcgtccggcggcgcatccccatgaagctcacgcccgcccagtggggcctgacggcgctggccgctgcctttctggctgcgcactacatcacctggattacctcgctgaccggcacgagcacctttgcctcggtggcgctggtatgtacgcagccgctgtttgtggcgtttttcagctatgtgctctttcacgagcgcacgccccggcgcgcgcttccgggcgcgctgctggcgctgctgggcgcggtgacgatcgccctctccggcctgtcggggcaggaggcgcaggccacgggacaggaagcgctcaggagcaaccttctggctctggccggggccgtgctcatggccgcgcactggctggccgggcggcagatccgccagaccctggccgcggaggtctatacccccgtcctctacctgatcacggcgctgctgctggccctgtgcctgcccctgtccggcggctttcgcatgccgctttccgccctgccctacatggcggggctggtcatcggcagcacgctcctgggccatgcggtgttcgcctatgccctttccggcgtgtccgcgaacgtcatcagctttgcgctgctgggcgagcccgtgggcgcgatgatcttcagcatgatcttcttcggcgaggtacctacctggccggtggccctgggcggcctgctcacgctgatggggcttgcgctctatctggcctttgcgggcggagaaaagcagcccgcctagcgccacaggtatttttccagatccacggtgccatccttccgcaggcccacgccctccatctccagcagcaggcggtgcgtctcccggccgcagggcgagaacgccgcgctcaatccgccctgccggttgaccacgcggtggcagggcacatccggcggagccacgctcagggcataccccacggcgcgggcggcccgcgggctgccgatcctgcgggcgatctgcccgtaggtagccacgcgcccgcgcgggatctccctcacggcggcatagaccctttcaaacattcccatccatgcgccccctttgcgccatcttccctgggatgataccacaaaaggccgagcgcggaaacctgtttttcagaagggaccggcgatacaactatgcaggaacgctcaacgctcatgacggagggctccgtctggcggcacatcgttcgatttgccctgcccgtgttctgggggaacctcttccagcagctctacaacgttgtggactcgctggtggtgggcaactttctgggcagcgacgcgctggcggcggtgggctcctccagccatctgatttttctgctggtggggctgttcagcggcatctttacgggggccagcgtggtcatttcgcgctactacggcgcgcgggatgatgcgggcgtgcgcacggccgtgcacaccaccgtggctttcggcctggtggcgggcgtggtcatcaccatcgcgggcgtgctgctcacgccccgcctgctgatctggatgggtacgcctgaaagcgtgctgcccaactcgatcctgtatttccgcatctacttcggcggcatcatcttcgtcatcctctacaacacggcggcgggcatcttccaggccgtgggcgacagccgtcatcccctgtattacctgatcgtttcctcggtggtcaacgtggtgctggacctgctcttcgtcgcgggctttggcatgggggtggatggcgcggccctggccacggtcatctcccaggccacgagcgccacgctgggcttctggcggctgtgccataccaccgggccttaccgcatctggtttcgaaaggtgcgctttcatggccggacgcttcgccagctgctcacgctgggcatcccctccggggtgcagaattccatcatcgccatcgcaaacgtggtcgtccagtcctccatcaacctctacggccccatggccatggcgggctgcggctcctattccaaaatcgagggattcggctttctgcccatcaacagcttcgctttggcgctggccaccttcatcggccagaacctgggcgcgaaacaatatgaccgcgcccggcgcggcgcgcgttttggcatcctgtgcagcctgctgatggccgaggtggtaggcgtgggtatcaacctgctggctccatggctgatttcgctgttcaacggcgatccgcaggtcatcgccttcggcacgctgcaggcgcgcacggttacgctgttctacttcctgctggccttctcgcactcggtggcgggcgtgatgcgcggcgcggggcgggccatcgtacccatgctggtgatgctggtgtgctggtgcgtcatccgcgtcagctatatcatgctggtggcgcgcgcatccggcaatatccagatggtgttctgggcctatcccatcacctgggcgctcagctccgtggcctttttgatctatttcctacgcggcgactggctgcattatctggaaaggaaagaaagggcggcctgaaggggcggccccttcccttgacttgtcccgccgcttgagctacaatagcctcggctgtgcggcgtgcggcggttcatcatcatatattgccattatttatcatcgctggaagtccgcgtggcctgacgcccggcccctttgcgcggggccctctgtcccccaaccattacggaaaggaaggaacgccatgtttggacaccgccccgaaggccgccgtgtacgcgatgtggaccccatcgtgcagattaccccgtacctcatgcccatgcgctgcgacgcgcaggtttttctggactacgatgtggaatacgaacccctgatgcgctacatcgccaaaaagagccgggaaggcgtaaaaatcacgtttatggaaatcctcatcgccagctttgtgcgcggcgtgtcgcaggtgccggaagtgaaccgcttcatcatgaacaagcagttctacaaccgcagggagctcaccgccagcttcacgttgctgatggacaccgacgacggcagcatcgaggaaaacaccgtcaagatctttttcgatcctaccgacaccatctacgacgtcagcgcgcgcattaaggacatggttcagaaaaaccgcagggcggaaacctccggctttgcggtaaagctggcctccgccgtgctgaagattccgctgctccccagtctggcggcggggctggtgaggctgctggaccgctacggcctgctgcccaaggcattgctggacggcctgcccttccacaccagcatgttcatcaccaacaacgcctccatcggcctgatgcgcgtgtaccaccatatctacaatttcggcgacaccagcatgttcatctccatgggcacgccccagcgcggctattccgtggatgcgggcggcaatgtggtgcgcaagtgcacgctgcctgtcggcgttaccgtggatgagcgcgtgtgcggcggcgcgatatacgccaagctgtttgcggtgatgaaaaactgcctgcgccatcccgagcagctggaaaccccgcctgaaaaggtgttttacaacaagggctgcgagttccatgtgcccaagcccgaaaacgtgttccatcctgccgggtcgacggaagggtccgtcacggcataaccactttgcggcctttgcgcaaaaaaagcgtcaaggccgctttttgcgtttctccccaccttgacacgtcccccgaaaacgtctataatgatgtagtcggctatacaggtttatcgcgctttgcgagagccttgctgttttgcgaaatatactcccatttcccggctttcccccgcgtcgcgcgcggactggcgtccgcataagcgacgggttggttttgaaacgctccggcgttttgtaagggtatatgaacttggtctgtccatcgtcccgtgtgccttttgccggggcgaaaatggggtatgcgcctcgacgcccgcctctttccccccgtgccgtgttatcgcgcgcggaaggggcggacatggccaaacaagcgaatcaacatagccgcacgagctctggctcgacggcttttttgcatgaagcaaaaagccgttccgcgcatgaagagaaaacaagcagctgggagcaataccaacggaagggagtgtacgccatggactggatcgtagcgatcatcgtagcggttgtggcggcggcgctgggcgcagcgggcggatatctgtaccgcaagcaggccggcgaaaagaagattggccgcaccgaggaatacgcaagaaacctgctggaagacgcgcagcgcaaggccgatgaaaagaaaaaggaaaccatcctcgaggccaaggaggaggttttgcgcctgaaaaccgagctggaccgggaatgccgcgagcgccgcgccgaggtgcagcgcagcgagcgccgcatcctgcagcgtgaggaatcgctggataaaaagcaggacgccctggaaacccgcgaggaggcgctgggcaaaaagcaaaacgaactgcaaaagatgcaggaggacattgaaaacgacaagcagcgccaggtggccgagatggagcgcatcgccggcatgacgcaggatgaggcctgccagatgctggtcagccgcattcagaaggacgcctaccacgacgctgccgccatggtgcgcgagatcgagacgcgcgcccgcgaggagggcgagaagaaagcccgtaacatcatcgccctggcgattcagaaatgcgccgccgaccatgtggccgaaagcaccgtcagcgtgatcaacctgcccaacgacgacatgaagggccgcatcatcggccgcgagggccgcaacatccgcgccctggagaccgccaccggtgtggacctgattattgacgacacccccgaagcggtgattgtcagcgcctttgaccccgtccggcgcgagatcgcgcgcatcgcggtggagcgcctcatcatggacggccgcatccatcccgcccgcatcgaggaaatggtggaaaaggcccgcaaggaagtggatcagcagatccgcgaggcgggcgagcaggccgtctttgaaacgcatcagcacggcatccatcacgagctggtcaagattctgggccgtctgcgctaccgcaccagctacggccagaacgtgctcaagcattccatcgaggtcagccatctggccggtatgatggccgccgagctgggcgcggacgtggcgctggccaagcgtgcgggccttttgcacgacatcggcaagggcgtcgatcatgaggccgagggcacccatgtcacgctgggcgcagagctggcgcgcaagtaccgcgagagccccgacgtgattcacgccattctggcccaccataacgacgtcgagccccagaccgtcgaggccgtgctcgtgcaggccgccgacgccatctccgccgcgcgtcccggcgcgcgccgcgagagcctggaaaactacatcaagcgcctggaaaagctggaggagatcgccaattccttccccggcgtggagaagtgctttgccatccagtccggccgcgaggtgcgcatcatggtcaagcccgaggatatcaccgacgacggcacccgggtgctggccaaggaagtggccaagcgcatcgaaaaggagctggaatatcccggtcagatccgcgtaaacgtcatccgcgaaacccgcagcaccgaatacgcaaaataaacggcatggctttggcccggcggcacgatccgccgggccttttgtgcgcccgcgtgcttgcgattccgcagaagtatgatatactgtattcatccggacgcatctgaaaatagatttgattccgatcatgaaaggagtttgcgccatgatcctggatcaatgggaaaatgctcttcgttacctggggatcagcccggagctggatacagcgctgcgttttctctcttccctgacgccgggtcagcttgccgtgggcagccgggtggagcttcaagggactgacgtattttacaccgtcagcgaacccacgctgtccgcgcgtcccatgacctttgaatttcacaggcgatataccgatatccatgtgccggtgactggcgaggagcgcatcgcgctgtgccccgcgtcgtcccgtcccgccgacaccccctttgacagcgaaaaggacatcggtttcttccccggccgctccatcaacacggtcaggattcctgctggctggttctgcatatgcttcccggaggatgcgcacgtgccctgcctcagtgacgcggaggagcacgccatcgtcaagctggtactcaaggtccgggcgtgctgaagcccgcggccctttgggaggtacatatgaagatcgtcgttctgattccctgctacaacgaatccaaaaccatcgccaaggtggtggccgactaccgcgcggccctgcccgaagcggatatctatgtctacgacaacaactccaccgaccacacggacgaaatcgcccgtcaggccggggccatcgtccgctacgaataccggcagggcaagggcaacgtcatccgcacgatgttccgggaaattgaggccgattgttatctgatgatcgacggggacgatacctatcccgccgaaagcgcgcgggaaatggtggaccttgtgctgaacaaaaaggtggacatggtggtgggcgaccgcctgagcgctacctattacaccgaaaacaagcggccctttcacaacctgggcaaccgcctggtcaagcgcctggtcaacaccattttcaaaggcgacgtgcgcgatatcatgaccggctaccgcgctttcagctatcagtttgccaaatccttcccggtgctgtcgcagggctttgaaatcgaaacggaaatgaccatccacgccctggacaagaatttgagcctcaaaagcgtgcccgtggaataccgcgataggcccgaagacagcgtcagcaagctcaacacctattccgacggcatgcgcgtgcttcgcaccatcgcaaggctgtacaaggaataccggcccctttccttcttcgggctgtttgcggcgcttttcggcgcggccgggctgatcctgttcatccccgtgctggcggaatttttccgcacggggctggtaccgcgctttcccacgctgatcgtcagcggcgtgatgatgacctttgcgctgcttctgctggtatgcggcttcattctggacaccgtggccaaaaagcaccgccagctgtttgaaatcaacctcaacctgctcaggctcacccacgacaaggagacacgataatgggcaagcggcaaccctctcgcatcccgcgcgctttcctctgcgcagcgctgggcgtggccagcgccatgtgcttcgtggtggataccgagggctatgtgggtatgagcgctttgcccgccgcctccacgagctatctgtggagcgcgctggcgctgtgctttgcgctgctcctctaccatgtgcatgtgcggcggggcattcgggcgggcgcggtggcagtgcttccgggccttctgttcggcgtgctcaatgcctttgggggcctgctgtttgcctacgacagctgggccatgctcgcttcgccggccacgctggcgctgacgctgctcaggtccgcagggcaggccgtgcccatggcctccctgctggcctgggtggacgccgggctgcgcggcggtgcgctgtaccggccgggtacgctggacgatgcgcccgtgcccgccgcgctcaggccgctgcggcggtgggccttgcgccatgagatggcggcgtacatgctcatgctggcgctgtgctggtcgccctacctgatcgcgttctatcccggcaccgtgtgctgggatctgggcgagatggtggcgcagttctttggccagcgccccatggatacctggcatcccgtctttctgacctgggtgatcggcgggtgcgtgtggctgggccgcctcgtgggcagcgacaacctgggtgcggcgctctatacgctgattcagaccgcgcttatggcctttgcgctgagcggcgtcctgcgcctgatgcgggccctgcggctgaatcgcgcggcgcgtctggccgcggccgccttctttgcgctgctgcccatctggggcggatacgcgcagtttatcagcaaggatacgctgtatacctcggcgctgctattgtttgccctgtgcctcatccgcctcgtgctggcacgggagggacggttgtccgtgcagaccggacgggaagccgccggcctgttcgtgtgggggcttctgacctgcctgatgcgctccaatgggctgtacgtcatcctgcccacggcggtattcgccttctcgtttgtggtgcggggacgggcgcggctggctgtgggcggcgcgctggcaggggctgtggcctgcgccctgctgttttcccatgtgctgctgcccgcgctgggcgtgcgcgacgagacggccagcggcctgtattccgtctgctttcagcagagcgcgcgggttttgcgcgatcatgccggcgaggttacgcccgaggaatatgccgagatcgaccgcgtgctggacgcggaaaatctggctgagctgtacgagccgtggatctccgatccggtgaaatacaccttccgccagtacggacagggcgcggaggctgaaaaggcggcgctggcgcgctaccgcaaaacatggttttcgatgctgaccaagtatccgctgacctacgcggaggccttcttcgcgggcaacgtgtcctactataccttcgcgcccaagctggagggcgagacttacaaccagcaggcgggcaaccgcctggtctttgaaacctatgatctgggcgaggacccgcgtttcctgcacaccgagcagatcgccgcgctggagggggcgcgcacgctgctggcggtgtttgcgcggggcattcgtcacattccccttctggcgctgctctacgcctgcgccacctacacgtggctgctggcaggcgcggggatgagcgccgcgcggcagcggcgctggcggcttctgtgctgcttcctgcccgctttgctcacgctgggggtgtgcatgctcagcccggtgaacgactatttccgctacttcctgcccatcgtggccataacgccgccgctgctggcggcgacaggctcgcggccggcagcatcgtcacacctgcaaaaaaacacgcaatcccttcccccgcaacaggaaggccctctttccccgtcgaatgagtgatgaggagcattccacagaaatggaggtattcacccatgaagaaatatctggccctgctgctgatgatggccctggccgccgcgcccgtcgcgctggccgaggacgccgccacccctctgccctgcggcgcgacctttgagatggacggtcccgcgctggtggaggccatcggcggcgatgcggagtttgtgccctatttcgaggatgatgacaccgaaacgggaaacattcagctctcaaacgtggacctgggcatcggcgacatgaccgcttcctttgtgtgctttgatgtgcagcgcgtcaacagcgcgcgcgagccgcgcctgagcctggtctccgtcacgctggacccgggcgatgacagcatcgcttccttccgggcggcgctggaggcgctcaccggtgtgtatggcgcgcccgacaacaatccctttgacgaggccgccacggacatgtacgtggaatacggcatgctggatgcctcctgggtcaaggaggatgtgcgcatctatctgtcgctgcagcgcatgtacgaggattatctggagctgagcttttcgcccagaatctgctttgacgcctctgatctggacgtgtaagagcggtttgcatccaaaaaaggagcagggattcttccccgctcttcagcgtgtcgaaaaagcccgcctgcggcgttcttttccgacaggagcttaagaaatgtttgcgccagggcgcaaactccccgcccgcccggcaaagccgggcgatacgaattcagctcggagggctgcggccctccaaacctcccaaatggggcagtctgaggagcagggattcttccccgctccttttccatttgcggcctttatttcaggtacgtgcccaccagccggttgaccagcgcgccgtcggccttgtccttcaccttgggcatgagggccttcatcagcttgcccttgtccttggccgtgggttcggcgaggccaagttccgccagcgtcgcctcgatcacctcgcggatcgccgcctcgtccatgcgggcgggcgcaaattcagcatagaccgccatgcgcagccggcactcctcgatcacatccgtgcggtccgcgggggtggtgtccagcgtttcctgggcttccttgatttcccggtacaccacggcgttggcctcatcctcggtcagatcctcgcgcttgtcgatggtcttggccttgagcgcggacaacagcagcgaaagcgcctccttgcggggcttgtcgcccgccttgagcgcgtccatcatggccttgcgcactacctctaccttggtcatttttaactccctcccaaatcttcggtttcatggtatagtatatcacagcgggcaaggcccgcaaagaaggaggcgccgccatggacctgaccatcccctgctttgaccccgccctgatcgcacgcagcggccagtgcttccgcatgcgcgaaggaaagggcggcatcgtgaccgcgctggccggagcggaccgggtgcgcgtgacgccgctgggcggggaccgcttccgcttcgactgcccgccggaggacttcgagcggcgctggcgcgcctactttgacctggatacggactacgaggccatccaacgcgaggccgccggccaggatgagcttcttgcgcacgcagcctgcacctgccggggcctgcgcatcctccggcaggacccatgggagacgctggtctgttttctgatttcccagcgaaagagcattcccgccattcaaacgtgcgtggaagcgctgtgcacgcgctgcggggcgaaggtgggtcggggccgcggacggtacttcgcctttccgggcccggaggacctgctccgggcgggcgagcgtggccttcgcgcctgcggcacggggtaccgcgcgccctatctgctggacgcggcgcgccgtgtggcggacgggcgggccgatctggacgccatggccgccctgcccgacgacgagctgctggagcagcttgaggccatccacggcgtaggcgtgaaggtggccagctgcgtaatgctcttcggctatcaccgcctcgcctccgcgccggtggacgtgtggattcgccgcgtgatcgacgaggactatggcggccggtcgccctttcccgcctacggagagcatgcgggcatcttccagcaatatctgttttacgggcgcatcgcgcaaaagggttaacgcgtgcgcctgggccgccggtgcctgcgcacctgcggcttttgaatgtcgtcgtgcttttcgccctttaagcggaacagctcgtcgcgcagcttggcggcgcgctcgaaatcgaggtccttggcggcggagagcatctggtcctccacgctcttcatcagctcctgaagctcctcgtcgctcatgtcgtcgggcttgtggtccttcatgctgtcggtgatgcggatgagggcctgcacggtgctcttgacgctctgcggcgtgatgccgtggagcttgttgtacgcctcctgcagcgcgcggcggcggttggtttcgttcatggcgcgctccatgctctcggtgagcacgtcgccgtagaggatgacgcggccgtccacattgcgcgccgcgcggccgatggtctggatgagcgaggtttcgctgcgcagaaaaccctccttgtccgcgtccaaaatcgccacaaggctgacctccggcatgtccagtccctcgcgcagcaggttgatgcccaccagcacgtcgaactcacccagccgcagatcgcggatgagctgggtgcgctccatggtttgaatgtcggaatgcaggtaacgcacgcggatgcccaggtttttcaggtaatccgtcaggctttcggccatgcgcttggtcagcgtggtcaccagcacgcggccgcctttttccgtggtacggtggatctcccccaccagatcgtccacctgacccgtcgcgggccgaagcacgatcagcggatcaatcagccccgtgggacggatgatctgctccaccgtattttcgctcagccccagctcataggccgcaggggtggcgctgacatagatggtctggttctgcctggcgcggaactcctcaaacagcagagggcggttgtcataggcgctgggcaggcggaagccataatcgaccaggctttttttgcgcgcgcggtcgccgttgtacatggcgcggatctgcggcacggtgacatggctttcgtcgatgaacatcagaaaatccttgggaaagtagtccagaagggaatacggcgcgtcgccgggcttgcggccgtcaaagtagcggctgtagttttcgatgcccgtgcaaaagccgatctggcgcatcatttcgatatcatagcgcgtgcgctggcgaagccgcatagcatagagcggctggccctcgtcctccagctccttggcccgcacctccagatcccgttcgatctggtcgatgttttcgttcatcttttcgcggtccatggcataatgtgttgcgggaaagaccaccgcgtgctccagcgtgctcagcacgttgccgctgaccacctcgatctcgcggatgcggtcaatctcgtcgccgaaaaattcaatacgcagggcgtgctcgcgctcattggcggggatgatctccagcacgtcgccatgcacacggaagctgccgcgggtaaattcatagtcattgcgcgtatactgaatttccaccaggcgctcgatcagcttgttccggctgatttgcatgccgggacgcatgctgaccatcatgccctcatactcgctgggatcgcccatggaatagatgcacgacacgctggcaacgatgatcacatcgctgcgctcacgcacggcagcggtggcagagtggcgcagccggtcgatctcctcgttgatggaggcatccttttcgatgtaggtatcggtggaggcgatgtaggcttcgggctggtagtaatcgtaatagctgacgaaatactccactgcgctgtccggaaaaaaggcgcgcagctcgctgcacagctgggccgccagcgtcttgttatgcgccaggaccaaagtgggcttctgcaccttttcaatgacggacgccatggtaaaggtctttccgctgccggtgacacccagcagcacctggtcgcgttttccctccagaacgcctctggccagcgattcaatggccgcgggctggtcgccgctgggcggatagggggctttgagcacaaagcggttcatggcaaaaggtcctttcgtaaactgccttctcattatagcatgtttccccggcgcggtacagtccgcccggcaggtccgaaccgcttcaaaaaaaacttccaccatccgccgtttcttttcgccgcccgccgtccttatgcaagcaaaacccggtttccagcgggctgaaacggcctgaaaaggagggctgaaaaacgtttccacgcgacatgggcagcgcgcgtggcggtcaaaatgagcgcgacaggagggaatggacatggcacagcattggcaaaaggtccaaaagcagcgcgtcgcgcttacagaggtgatgccgccgtggcgacgtatctgatccgccacacgccccgcctgagcggcgaggtggaggtgagcacggccaaaaacgccgtgctgcccattctggccgcggggcttttgaccgaggacccgctcatcatcaaggaggttccgcgcatcaccgatgtggaaacgctggtgagcatcctccgggactgcggcgcggaggtcaaccgcagcggcgcggacctgtccgtatgcgccctgcagccgcaaagcccgcaaaatgaggagcgcatgcgaaagcttcgcgccagcattttgattctggggcccattctggcccgcacaggcagcgcgtgcgtaggcctgccgggcggctgcgccatcggtcagcggcccattgatctgcatttgaagggtttgcaggcgctgggcgcgcaggtgcatccgctcggcggcatgcgccagctcagcggccggctgaccggagcgcgcatctacctggatttgcccagcgtcggcgcgacggaaaacctgatgatggccgcaagtctggcccgcggctgtaccacgctggaaaacgcggccaaggagcctgaaatcgtggatttggccaactgcctgaaccagatgggcgcgcgcatcacgggcgccggcacgggcaccgtcagcatcgtgggcgtggagcgcctgcacggggccatctaccggcccattccggaccgggtggaggccggaacgctgctttgcgccgccgccatcaccgaaggaagcgtgctggtgcggggtgcgtgcgccgagcacctccgttcgcttctgttcaagctggcagaaaccggcgtgggcatccgcgaaacgccggcaggcatccgcctcagcggcacggccgtttcgccctttgagcttcgtaccttagcttacccgggttttcccacggacatgcaggcgcctatgacggtggtggcgctcaaatgccacggcaccagcctgctcaacgaaaccgtgtttgaaaaccgctttatgcatgtatcggaattatgccgcctgggcgggcatatccgggtggaaaacaacgtggcgctggtggagggcggccatccgctgtgcggcggcgtggtgcgcagcaccgatctgcgcgcgggcgcggccatgatgctggcgggtatgatcgcctccggggaaacgatcctgcaggaccccgccgggcacatcgagcgcggctaccaggacctgccgcaaaagctgcgggcgctgggcgccgaaatcgagcagatcgaggattatgccgggccctgaccctccgcccgccctctccggggcgggcggttatgtttccccacgctccagcggcatgcaaaggagctgcgctccgcttgcgtcatgatagctcacagcaagggtttgggggagcggggatgcatccgggacggcccagaccgccgaaaagcgcacaccccagccgtcgccgtctatcggctgaacgcccttctcgccggaaagcagctccgcgtccagcggggcgccttcgccgtcggtcagctcaaaggagccgttaaacagggcctccgccgcctcgcgcgtaccctccgccggctcggccaccagctgcacatacagccccagcggggtcagcacggcgctttcatagcgggccatgaggcggtcgcatgtatatcgctcccgaaccgtcagcggttctcggtacgcattcgcgcaagtcatgtccagcgaaagcgaaatgcgcagttcctgccgctcgaaacgcgcggccagcgcggggtcaagtgctgcgtcgatgcgtccgaagcattgataccacgcatccccctcttgcgccgtcaagccctcaccgcccgcaatgacgaagtagccttgctccgttttgcgcccggcttcctccggatcaaaggaatccatggcatacacgggatcaatgggggtatagacgcccacggccagctccatttgcaaatcgttctcccccttcacttccccgggcagggcgatgacctctccatcctgcatcacgccgtccggcgcatagagacctggcagccattgacaatcaaagctgtcgctgccgtcgctccccacacgaatgccgttgagcgtccattggtcaatctgcacatagacaggcgtctgcggctctctgttttgaatgcgccagtccatggcgagcatttcgccatcggtccatacgccgctgatctccaggctgaccgtcccggcctccgcctccgcattcaccggcgcagccagcggctccagcacctcccgtcgccgcggctgctcatggatgcccagcaggaagtccagcacgccgtattccgcagcggccagcgccgcccccgccaggaggaccagcacggcggtcagcgttagcagcctgcgccgccggaagtgctgcggagtacaccgggatgtgccggcttccgtcaggccctcgagcgtggcatgcacgcggttcacaaagccctggtccggctttccaaaaatctccttccaatccgtgcgtccactcattcagcctcttcctccccttccagcagcttgcgaagcgccgcacgcgcggcgcgcagccggcttttcaccaggcttgcaggccagcccagcgcccttgcgcactcctgctgcgtcattccttccatatagtagagcaccaccggcaggcgaagccggagcgggagcgccatcagtgcctcccggagggcatccgcgccgccggcgggcgcagcctgtggcggcggcaacgccgccctttctgcacggcggcgtttgcggtgaatgccgttgcatacgttgagcaggatccgtatgagccatgtctgcatatagcgctcgtcgcgcagggtgtcgcgcttttcccaggcgcgtacaagcgcctcctgcaccgcgtcctcccggtcctgcggaaggctgaaatgcgcgcggcatacccggtagagcaccggaatcatctcctccacccgcgatacaaagacctctttggtcacaatcttccccccagtcatctttcctcctttaccctgttagatgcctttcgccccacttggcgcgtgctccttccaaaaagaatttttccggtctcccttgacaggtgttgttttcagtgttattatactgccacgttatcgtgctaaagcggttgcgaaaaggagcgtgtttggagtatgaaaaagctgtttgccatcctgctggtcctgatgcttgcggtttccggcctggccatggccgaagaggacacctcggttgaaaacattctggaaaagggcaccttcattctgggcctggatgacagcttcccgccgatgggattccgggacgaaaacaacgacatcgtgggctttgacatcgacgtggccaaggaagtcgccgcacggctgggcgtggagttcatcgcgcagcccatctcctgggatgccaaggagctggagctggcctccggcaccatcgactgcatctggaacggcatgtccattacgcccgaacgggaggaaagcatggccatgaccttcccctacctcaacaaccagatgatcttctacacccgcgccgatgcgggcatcgacagcctggaggcgctggcgggcaagtcggtggcggtgcagaacgggtcctatgccgaggagctgctcagcggcgactatgcggatctggccgcgaccttctcggaggtgctgggctttgacgagtacctgaccgcgttgatggacctgcaaaacggtggctgcgacgcggtgctcatggacctggtggtgggcgactaccgcatcaatggcatgggcgcgaccgatctgaaggctgccgtggccctgacggacgacaactacggcatcggcttccgcaaggaggatatcgccctgcgcgacaaggtcgaagagctgctgatcgaaatgaagaaggacggcacgctggagaagatctccacccagtggttcgggtcggacatcacggtggtgcctgccgaataatgcccatattttccggaagggggaggccctcgcctctccctttcgcgcacgaaaggaaacgccatgaccatcaaattcttcaacgaccctgagcggctatggaagctgttcactctgatgctggatggcgccggggtaacgctgagcatcttttttttgacgctggtgttttccgtgccgctgggcatgctggtggcgcagggccgcatgagccggagacggctggtgcgcgcgccgctttcgttttacatctacatcatgcgttccacgccgctgatgctgcaaatcatgtttatctacttcctgctgccgcaggtgctgcccttccgggtggaccggttctgggcggtgatttttgcgtttgtcatcaattacgccgcctattttgccgagattttccgctccggcatccagtccatcccggcggggcagtacgaagccgccaaggtgctgggctataccggcgggcagacgttcctgcgcatcattctgccgcaggtggtcaagcgcgtgctgctgcccgtggccaacgaggtcatcacgctcatcaaggacacggcgctggcctccaccgtggcggtggtggacctgatgaccgtggccaagaagcaggtatccagttcatcgtccattgaaccgtatgtcgtggcaatcgtactctatctggtgctcaacggcgtggccgagcagctgtgcaagctggccgagcgcaagatgagctattaccgctaggaaggagggcgtccgcatgctgagcgcaaccgggattcacaagggctttgacgggctgggcgtgctccggggcatcgacctgaacgtggaaaaaggcgaggtcgtggcgctgatcggcccgagcggatcggggaaaagcacgcttttgcggtgtctgaaccagttggaaaccgtggacagcggcaccatcgtgctcgacggccttaccctgtgccgcaccttgggcggcaagctcacctatgccgatccggccaatctgcgccgcatcacgctgaagatgggcatggtgtttcaatcctacaacctgttcccgcacatgagcgtgatgcagaacctgaccgacgcgcccatgcgcgtcaagcggctttcccgcgcgcaggccacggaacgggcacgcgagctgcttgccaaggtcggcctctccgacaaggcggaccagtacccttatcagctttccggcggccagcagcagcgggtggccatcgcccgcgcgctgtgcatggacccggagatcctatgctttgacgagcccaccagcgccctggacccggagctgacccaggaggtgctgggcgtgatgcgcgaactggcgagcgagcgcatgaccatgttggtagtcacccatgaaatgagctttgcccgcgatgtggccgaccgtgtggttttcatggaggatggcctgatcgtggaggaaggccccccggagcaggtatttcattccgccaacccccgcacgcggcagtttgtcggtgaaaactgaacagcaaaatccgcccggcagcatgtgccgggcggatttgatttatgcttttataccaggcggaagccgttttccgcctgcttttcgtgataacgggtgatgagcgccttgatgcggtcgtaggggttaagcaggctgctgaggctgcggtcgtggttcaggctggccacgatgtaggagatatacttgctcatatccgcctcaatgaaccagggccgctgcttgagttccggcgtgcggtaggtcaggttggtggagatgatgcggctgatggctccctcttcgtaggcgcggtcgaaagcctccagcccgttggtgaagagcgcgaaggtagcagcggcgaagatgcggttggccttgcgctttttgagctccctggccaggtccagaatgctttcgccggaggagaggatgtcgtcggagacgaacacatccttgccttccacatcgtcgcccaggtattcatgggcgatgatgggattgcgtccgtccaccacggtggtatagtcgcgccgcttgtagaacagacccatgtcgatgcccagcaccgagctgtagaagatgttgcggtcgatcgctccctcatcggggctgacgatcatcagatgatcgcggtcgatctgcaaatcgcactccctgcggaacagcgccttgagaatctgatagctgggctttacgctgtcaaagccgatcagggggacggcgttctgcacgcgcgggtcgtgcgcatcgaaggtgatgatgttgctcacgcccatctgctccagctcctgcagcgccagggcgcagtccaggctttcgcggctggtacggcggtgctgacggccctcgtagagcatgggcatgatgacgttgacgcgcttggcgcggccgccaatggccgcgatgatgcgcttgaggtcctgatagtgatcgtcgggggacatgggcacttcacgcccatacatcttataagtgacgttgtaagctccgatgtcggtcaggatgtagatgtcgtagccgcgcacgctgtttttaatcattcccttgccctcgcccgtgccaaaacgggggcagtgcgcctcaatcaagaaatcgtgccggttggcgcccatcagggaaaagagcggggtgtcctccagggcttcctgctgctcgtaccatttcatgagccagttgttgaccttctgacccagctcctcgcagcccggcatggcgatcagccccaggggcgcgaaaggcacggtcagaaggtcgttgttccacgtgcttacaaagtccgtcacaggcatactccttctcaaacgaacgtatgtagggagagacaaaatcagtataccgcaaattgatgtttctgaaaaggtccttttccgaaaaagcaaacattttgacggtttttgtgaaaaacctccatgccctcatgggttcaaatggagcagatgcgcacataaaatgcctgaaaagggggcgtatgcgatgggtggcatggcggcagggatctgtcttttgctggtgatggccttttcctcccaggcgatggaggccgcatcccaggcggcacgggtatttgcgggcggggtcatgcctgctttgctgcccatgatggtgctgtgtcgcctgttgcccgcccacgccaatcacgaacgttccgcatggcgtggctatgccggcgcggtgtttttttcctttgcctccggctcgccggccagcgcgcagcgggtgcgcgacctttggggcgcgggcgcgttggcgcgaggcgcgctggagccgctcctggccgcctgcggcgtgatgagcccgatgtttttcaccggtaccctggcgcagtggacggggctgcgcgcgggctgctgggtgctgctgctatgccactggacaggggcgctggccgctgccggcgtggtgcggctggcggcgcgaaagcagcc

SEQ ID NO: 2964 - DNA, 32759 bp, Unknown
  16S sequences of unknown bacteria
gaatcgaatcgtccgccggacagactgtcgatatacggtatacaaaggataacacgaacggcaaatatgaaatttacgaagtggcttcgggcgatcatttaaaaacgagagtaaactatgccgccggaaaactgtcaagcgtatatgattattcgactgcgagcgcaataaaacacggcgaggtaacaacgagcggtgatatacagcttgggtatcatacagtcagttataccgaagttacgaccacaataagcaatcaagacggaaataaagcaaaatatttgttcgacgacaatgaattcgtcgtaggcgaaatcgttgaagaaagcggtaaggtcgtaagcgcgaaaatgtatgattatattccgtattcaaaaaataatattcaatacgcaaaaaaagatatcttgaataagtatgcgctgtcaaacttcgattttgttgcgggagacacggagagtactgtgcttaatgcattcaacaacccggttagaagcacgacgaatgcgcggaaactgaatgcagacggtacggttatgcagatggttaccgtggattatacgtataacaacgaccagaaagtaacggaggaaaagacgacgatagccgttacggggaaagaaaatgtttacgggtataaaaagtattactataacgcgcagaaattacctgtaaggacggaaagttttacggaagagaaaaagcagaagagcgatgggacgtatgaatacgcggtaaacgcacatggaacagatatcgaagaagttgtttacgatgaaaaagggaacgttaaaaagtcgtttatgtataacagtctcgacagttcttccaagttctataaagaaagcgaatatatggaaaacgggcaggtgaaagcggagaaagacgagacaggcgaaaacaagacggagtacgaatacatagacggaacgaacctcgtgcgtacggaaaccttaccgaacggaagcaaattctcctacggtcatgacaaagcggacagagtgacgggaatcacgcagagcacggaggcaggagaagaaaacagcaaccaaacctgctatacctgcggagaagtgacggaggtaagaagcggaaataatgtagtggaatatgcttacgattataggcgccggatgacgaaggcgaagctgaacggaacagagtatgtaacgaaaaaatatgtggagggaagcggaacgaataacgacgaggtatattcgcagtatgtaccgcgaggaacagacaataagtcggattatttcaaaatgacgtatagcaaaaagggaaatctcttaagcgtagggtatgcgttgggagagaaaaacgcgcagccgactgtgtttgcaaatttgatgagttacaattatgacaatcaaaatcgcttgataaataaagcagacggaagcatagggaatttgcatacatatgtttatgacgagttagaccggcaaacgcagcatacgtttatgggacatacccatgtgagcgtatacggagatagtggagagaaaacgtcggacgtaatcaaatatgataattcgtcgacagataaagtggaatacgggtatagttatacgacggacagtgagaaggagctctcccaagtaagggtatcgggaatgacggaaagctacgaaagggatgtgttgggccggatgagtaaggtgacgcaggagcttggaagcacgacgttgagcaaacgctatggatactataagcaaggggaccatgcgacgcagcgagtgaatacgatattctacggaaagaacgggttgacgggagacaaagagacctacacatacgacggaatgggaaatatcgtatcggtgaacgaaaacggaaggcaaaagtataaatatggatacgacaaactaagcagactgatatttgaaaaaaatcttgacaaaaatgaagaaatatgttatacttacgacaacaagggaaatatcctgagcaagagcgtaaatggagcgataaaaacgtatcgttatgcggagacaagcgaccaattgatggagtacgacggaagcgcggtgcgatatgacggaatgggcaatccggttgcgtatcggggctcgacgctgacgtgggagaagggcaggtggctttcgtcgttgaaagacgcggaaaacaatctcgtaagttatacgtatgacggagaggggataagaaagagtaagacggtagcgggaaagataacgaactacatatatgaagaagggagactgctgcgggaaataagcggaagcgaagtaatagactacttgtacggagcggaaggaataatcggactgaaggtaaacggttcgaaatacgtataccgaaagaacgtaatgggagacgtaacgcatatttataatgaaagcggagaggtcgtagggaagtacagttacagcgcgtacggagagtgtaaagtagagacggacgtagggggaataggggagcggaacccgatccgttatcggagctattattacgacaacgacacagggctgtattatctgaaaacgagatattacgatgcggaagtgggtagatttattacgatagacgacatttcttatctcgctcccgagacgatcaacggtttgaatctctacgcttattgcgggaataatcctgtgatgtttactgatccgaatggtactacgaaatggtgggaatggctgttaggtgcggttatcattgttggcgctttggcattatcagtagttactgcaggacttgcaactcctatttctgctgcattgggcggaggaatgctcggtgcgatagtaggaggcgctgtagctggggctataggcggagcaatagcaggttttgggataagtgttggattacagggaatatcaaacggctttaataatattgattggatgcaagttggaaaagctactttaagtggagccatctctggatttattgccgggggagtatttggcggtattaaacagatcataagtgttactaaagtagctaaaagtttatctggattaaatgctgcacaagccaatatggacaaagctacattagttttgaaaaatactcccatggcgtttaaggggggtgttatggctacggaacggatcgtagcgcaacttagttataatgcggcaagtgccagtcttggaatggctcaatcgctgtttgatataattaagccaataatatcactaatgtatagcggggctcaatttggcttaaaacaacttattggctatggaattaaggagtggttttaatggaaaattttgagatgaaaaaagtaaagttcaattcgactgaagtcatattgttaagaaaaaatgtcagtattgttatcaatattgacgatatagaggaaatggagtatactaggccaactttttttaattatttttttgcttctggtttatttccaggagggactttccctggctatctgaaaatatctctaaataaaaaaataaataaatcaaaaacatatttcatcaaaatcaaccgcaaacaaatacttcagttacctaaagtttatttaaaaaagattgatccaactaatcaattatgtatgtattaaaatattaaataaaaccttacctcgtcttaaatacaaaaaacttaagacgaggtttgcttttttacttttgttgatatattctctaatttacaaccgaatctcgacgatatgatatggaaataagtttggcgcaaattatatcggttgccgatagattgggaggaatcgaatcgtccgccggacagactgtcgatatacggtatacaaaggataacacgaacggcaaatatgaaatttacgaagtggcttcgggcgatcatttaaaaacgagagtaaactatgccgccggaaaactgtcaagcgtatatgattattcgactgcgagcgcaataaaacacggcgaggtaacaacgagcggtgatatacagcttgggtatcatacagtcagttataccgaagttacgaccacaataagcaatcaagacggaaataaagcaaaatatttgttcgacgacaatgaattcgtcgtaggcgaaatcgttgaagaaagcggtaaggtcgtaagcgcgaaaatgtatgattatattccgtattcaaaaaataatattcaatacgcaaaaaaagatatcttgaataagtatgcgctgtcaaacttcgattttgttgcgggagacacggagagtactgtgcttaatgcattcaacaacccggttagaagcacgacgaatgcgcggaaactgaatgcagacggtacggttatgcagatggttaccgtggattatacgtataacaacgaccagaaagtaacggaggaaaagacgacgatagccgttacggggaaagaaaatgtttacgggtataaaaagtattactataacgcgcagaaattacctgtaaggacggaaagttttacggaagagaaaaagcagaagagcgatgggacgtatgaatacgcggtaaacgcacatggaacagatatcgaagaagttgtttacgatgaaaaagggaacgttaaaaagtcgtttatgtataacagtctcgacagttcttccaagttctataaagaaagcgaatatatggaaaacgggcaggtgaaagcggagaaagacgagacaggcgaaaacaagacggagtacgaatacatagacggaacgaacctcgtgcgtacggaaaccttaccgaacggaagcaaattctcctacggtcatgacaaagcggacagagtgacgggaatcacgcagagcacggaggaaggagaagaaaacagcaattcgacgagctatacatacggtgaagtaacggaagtgcggagcggaaacaacgttgtacaatatgcgtatgaagcgaaacgccacatgagctccgtgaatctgaatgaaacagcaaattacgtgaagtatagttatgcggaaaagacgacagacacggtaaacggggtaagtaaaacggttaataaggtaacggctacctatgcaccgcgggaaggaagtacttcggaagtgtttgtaacgagcaaggatttgcgaggaaacttgttaaagacgagttataacggaagcgcgcagacggaatatacctatacggcagatgataaattggaaagtatcatcgatcgtggctcgggacggaaaacgacatatacatatgacgcattggatagggtaacgaagaagtcggaaacaaaagtatccgatggcgtacaggtgtatcaggaggtatatacgtatggtaaggacggaacgctgacgagtaaaacgataagcggaactgtaacacagacatatgcttatacgtataaaaacaattctacgcagacattggattactttaccgtcggaagtctgaaggtgagcccgcaaacagattgccttggaagaaatacgggcaaggaaatcgctttatcgggaacgaaattgtatgaagagataatcgcgtatagaaaaataggggatcacgcgacgaatatgccctcaacgatccgttatggggacaagacgggcggaacatacggaatccgagagagtttgaagtatgcctatgacgaaatgggtaatatcgccaaagtatatgaaaacggagaattgtcggtgagatatacgtatgataaactcggtcgattgataagggaagataataaggcaatcggagagacgtatcttttcgattacgacaaccaagggaatattctgacaaagcggacactgtcgtttacgctgaaaggaaaggaggaagcagaagaactcttatcgacggtaaaggaatatacatatgagggagacagactgttatcatatagcggagaaacgtttgcgtatgacggcttgggaaatcctaaaacgtaccgaggaaaacctctgacgtggagcaaaggcagacagctcacgaattataacgggataacgttcggctacgacggacggggcagaagaacgtcgaaaggaaatatcggttatacgtatggaagcgacggacaactgttgaagcaaagcgacggctgggaattcctgtacgataacagcggagtaatgggatttatctatggaaataacacagatgataacagatatctgtaccgaaaagacattttgggaaatattacgggaatacttgacaaaaatggaaagattatagtaaaatataagtacgatgcatggggaaattacgcggcggtcagtttaaatctgaaagacggcaaggaaaagttttgcgacataactgacgaaacgataagttttacaggtaaatacgcaacatacaaaacgcttgcggagaagaacccgttccgctatcgttcgtattattacgatacggaaacagagctgtattatctgcatacgagatactatgatccggaagtgggtagatttatcacgatagacgatctttcgtatttggaccctgacacgataaacggcttgaatctgtatgcttattgttgcaataatcccgtgatgaatgttgatccgaacgggactaaatggtggaatcctgcaacttggaactggaaagcgataggtaggtttgtcggaggaagcttacttacaataggaggagctataggaacagtaataacagcaccattggctttagtaccagggctatccattataccacaggctacattttctcttacattatacgggggatttgtagcggcgtcggcttttagcaatggtatttataaggatatgtctgcgattggttggaatccatttaatagtaatgaaagtgccgttatagcagctaatcaagtatctttttataaggggattccagtttttagacatagtattccggggtttatttcggcgtctgctttcggcatgatatttttaaatagaaatgatatgcgcatagatactatccgtcatgaatggggggcatattgtgcaagcaattttattggggcaagcaggatttttaaaatggatcgccattccttctttaattacgaattttgtatcaagatttaatgaggatgtaaataaagcctattattcttttccttgggaaaggagtgcggatttttttggtggggtagatagaggaaattacaaaaaaggatctttattggttgctcttttatatttattagaggttgcattatagctatttttgtggtataatataaacaggaggcgaatggtatgacgattgatacgaatcaagttctgtctataacagaaacgaatcagaatttttcgaaagcggcgagaatagcggaccgccaaggcagcgtagtggttttcaaaaataataaaccaaagtatatgctgataaacttggagaataatccgttgattgatttaacggatgaagaaaaaatcgacgtagtggcaaagcgcgttttggaaaagcatcggaaagcctttgaggaactggcaaaatgataaagttcagccaggacaaagtgttactgttgcaccaattactcatagaacagacaggtggagaagacggggttcgggactttggcttattagattctgcgctggaagcctgttatgctacgtttgacgggaaagagttgtttccaagcaaagaagaaaaagcggcaaggcttggcgtagggcttgtatctaatcatgcattcgtggacggaaacaagcggatagggatgtatgttctgttgacttttttagaggtgaatggaatcacgatagatgtgacggatgaagaagtagtggaagtggggctaaagcttgcagaagggaaaatgaaatatgaagagctgttagcctggattaaagatcgtgaatgaaaggcagacaagagcgaatgaaaagagatactcatgtgtgagtatctcttttcattttaaagggtacgtattaatctctgtaatccgttcgtccgaacaagtagtccgggctgaccttgaaatactctgagatagcttttaaatattccactcgtaaagtttcgtttcgatttgatgaacgagtacgtttcgggcacagccgtttttaatacaatttctggcgtaccattctcttgcggcaggattattgactttatccaaaaggacgatattatgtccccacggaatttgtgcaacaacctgttgcacaaatttcctatcgacatattctgcgacaaatatggaaactaatcattatcttctatatgatcatagggggtgctatcatctgtgcgaccgagcaagtagtccatagatacattgaaatagtcagccaatatttctaaaaactctatagagggaagatggttttcctgttcccattcataaaaagaatttctatggatatggactttattactcaattcgctataattttttattgcttttttttcttttaattcgttaagcctttcaataaaagatattgggttttgagctttatcaaaatactcatcattcgttttataaagtaagtattcaatggatacattgaaaaaatctgcaattctaataagtatagttacttttggtaaaatcccataattatagattttagaaaaagtaacgtagttcacgtccatttgttttgctatagtggctttattagattcttcaagattttcaactaactcaataaatctcttatggaatttagaagaaataggcattatttatcaccgtccaaatcgtcataaggagtatcgtcatctgttcggccgagcaggtaatccaacgaaatgtcaaagaaatctgcgagtatggttaaatcatgcaaagaggggatgtagttatatttatcccactgcaagatacgatttctatgtatatgagtatgacgagtcaaatccgagggagtcaaattttttaaagttcttaaataggttagccgttcttgaaaagttttcggatcttttgatttttcaaaatattcattgtctgtatttccgagtaaatattctacggatatcttaaaaaaatcagctatacgcattaaaacaataggcttaggaacgattccgtagttgtaagcttttgaaaaaatggtataagcgatattcatattgttagcaagctgatgtttatttactttgccttgtaactctacatattctttaaacctattttgaaattcgatggaaaccgccataatacgacctcttttctcttttttcgttaaagttatgcaaagcgatatatagacaatggcactcaacttatgctataatagtttcagtcaataaatgccaaggcataattatactattgcaactttcttttcatgatatattttttttgacgcgttttgccaatggggagctacacaaacaaaaacttttaaatattaaaaatcctttctacttataggacgaggcagaaagatttttttcggagaaaaaagagaatgaacgtaataaaatttaactttttgctaagtcgataccgatatagcaagagcgcggtgaaagagttgtacgaatgctattatcccgtgattgtcctttctatcaatcgtcaattccgcgggagagtggatggggatgacgtcgcgcaagcggtattcctaagactgttcacctgcaaattgaaatggatcagagcgccaaacgcctggatacataccctcgccgcgaatatcgccatagacaaattacggaaagagaaaggacaacgccgggcggaggaactggtggcaagagcggaacgcgtggacacgcccgagatcctggatacggatatcctaaattgtctgaatgtaatcgaacgccgtatcatttatttgcggtattgggaattgtataaactcaacgaaatcggagaactgctgaaactaaaaagcggtgccgtgtactacctacacgaaaccgctaagaaaaaattgaaaaaagaatttataaaggaaaaagataatgaaaacctcaaataaaataatcgcttctgtatttgccgccttattactcgcgccgagcgtgaatgctttaaaagccggtgccgccgtccgttacgacgagctggataacctgttccaagcaaccttaaacgggattttggggtacgagaatgtagaagaagcgagcatatccgcagaaaaagaaatactgtacgacattaacctcgaggaactcggcgttctttacagtttccgctgcgacgagcaagagggctttgcgattctaatcgacgacggggtgttaaaagtcacggagatcacgacggacggcagctctccctattcggacgaggccacgaacgtctatgtatcggaggggctgtattggtacaacgacgacggtgtattttacgattgtatttccgatttgcctatttccgaagaagcgatagaaacggtatcggaaacggcgtactttggcgcgatagaacttaaatatagttcggaacagatcaattatacttaccgctcggagacgccgtacaatattttgtggtcgatacccacctatgactacggcaaactcaacggctgcgtgccgatcgcggggacaaaccttatagcctatttggacaagacgtatccgaacctgattcctgactatgagccgggtacaagttttttaggacgatacagctttaaatcgggaaacgatacgatttatgccgtatcggataccttatacgcggacatgggggctactatcagtagcggagcgacaatttccgattttcgttcggggatgaaaaaatacgtcaaccggcaaggatacaatatcagcttcagcagtttgatgtcgtggggtaagattaagtttgatacggcaaaatcagtcgttcaacagggcaagcctatcgcgttatttttgtcagggcatacctctacgacgataacgacaggcgagggatatgatatgttgaactacgaaacttcaaacggaaatcacgcagtggctgggttcgggtgtctggaagtcaactatacgttttcgaataatagcacgcggacggacagatatatccactgcgctatgggtgtagggatttatcagaatgcgtatctcaacgtcgggagcgcaaaaataaatgaggcgctggcaatcacgatttcgtaaaggcggtaaaaaatgaaagagctgaaagatttggcggataaagaaaaatcggaaatgcttgacgaggactttttagaaactacgctttatccgattgtggacgcgaacaaggcaaaaaggaaagccaatcggaaacgaaaagccgtttctattatcacgggggtgtcggtgggtattgttgcggtatttggtgttggcaccgggatcggaatcatcgttcaccaacgctatgccgaaacgtatgcaacgaaaaaatccgatatttcgtacctaaacaataccctggtctctacgcagctaatcggagatttcaatacgatcactttgacgtatgaaacgcgccgaaacacacccgtgtatttttccgtttattgtgtagaagaaggagagggctggatgcaaagtctttccctgaaagtgatcgtgaaacaggattacaaaatagatgaaatcgcctatcttgatcagttcgagtttttgggttatacagtacattatagcgcaatgaaaaaaacagatgcttccgccgaaccgatgctatatggatataaagctgacgcttttatcgatacgggaacggagcggtatgtgctggaataataaaaaaattaataagcagcataagtttttaacgtgaaacgcctattgaaatttgaacccatgaggtttagatggcaataggtattttcttttatcccttatgaataaaggctttcagtgattgctctttccgtttttatatagacactgaaaacaaaaaagtttaacatagaaaccgaaaaaggcaaaaggattaaatacgaacatctttgtccaatcaaaacacgtgagttcatatacctacttaaaaacacaaaaaaatcttttttgtagtcctttgacataaatcctatatattgtgctttgtttgaattacgacacgatatataggattttttaatattttttacgtttttatgtgcttttgaggggtaaaagctgcccgtaagcctttatttcaaagctcaaataaaaaactttattcatctgctctttcatgaaatcgtcgggaaagtgagtatatacaagttttctcttgacccgcagaattaatccttccgccgagctgtatagaaactcaacgcgaggagaagcggccgtctatgtcgaaagttcgcgtatctcctttctctgaaggatctgaaaatagaggaggcggactgtatcgcctttcgtatcggaatcaagagcatgcgaaaaacgtcggcggaatcaatctcttgggcgaaaaattcgacgattatcccaaggatatcacgatgacgatacggtataaaaagtaagcgcggcgcttcgtcgcttgagggtagtagctacggaacggacaaaaataatcccttgcgggtttgaggagaagatatgatattatcgatcggtgagatccttgcggatatgatcggagaggaacagaacggcgtaacggcgttcaaaatgtacgggggcggcgcgcccttcaacgtggcggtcaacgcgaaaaacgcgggtgcaaaggcaggcttcatcggccgggtcggtcgcgatctcgtggggaaatttttgaaagggttcgccgcgggcgccgggcttgatttctgcgggatacaggaagacgaaacgcgcaatacgacgctggctttcgtaacgcttaaaggcggagaaagagattttgctttttttcgtcacgatacggcggattttcatctcgattcggcgtcggtggctttggagcaatggccggaagtaaatatcgtccacgtcggttccctgatgctaaacgagccgacgggtcgaaaatttgcttcggagacggtggagaagatccgacgggcggggaagctgttcagttttgacgtcaatttccgcgcggatctatacgggaggatagaggacgcaaaaaagtcgtatgctccctatatagcggaagctgacattcttaaattttcagaagacgagctggctgtctttaccggcaaggcggagctgaaagcgggcgcagaggcggtatataaaaaggacagactgttacttgtaacgttgggaagcaaagggtgctattaccgcatcaacggcggatacggctttgtgaagacggaaaaagtaaaaccgatagacacgacgggcgcgggagacgcattttacggcactgccttggcgggcttggacggccgcccgcccgcgtcgcttgcggaaaaggagctgcgggaaattttgaaaaaggcgaatgcagcgggcgccgcggcgactcggcataagggcgcgctgccgttgaaagacggggcgttttgagcggtattataaaagacaaagaaaacatctatggatatctaaatcccgaggggtgaaatatccatagatgttttttatttttcaagcttgataagggcatcagaaaagcgcaatgaataaattttaatcttaacatcgatataattttgaaggcttctttccttttgcgcgtacaaaagggctcccgcccgcataaacaattgcgaaaggaaaattttttaaggctctaaataggtggctgaaattcggatgccctgctgaaaatccccgaaatttcttccgaataaatttaatccgccgacatatttggcgttttttttgactccaagccggaagcgtaaacatttttctttggtaataaaggcgaaatcgtctatcgagatttccgaagaaacgtttacctgattgatccatacgcccatttcgtctattcgtatctgcaccagcattccgtactgtgtagatgccgccggccagctttttggcgtatatttgccgctgcgtccgccgaaatcccccggagaggtgtacgtcccgatctctttgtcgttcagccagaacgtgatgtctgatttgaaagaattgttataattggcgcattccgagcagacttcacaggaaatctgcaacgcttcgagcaccttatttttaatcgcggcgttggaaacgtgatattcgagatatccctgcgtaaaccatatgatttctcctttgatccgcttataattataaaaaatatcgggaagagcctcggcgccgatgagatttccgtccgcatccgcgatcccgcagggaggggcgatgtcgaaaagattaaagctgcctacgggaagctccgtgctgaatgcgtgagaagaggagggaaaagcattttcgctttcgtttataaacaaaatttccaggcaatgcttttccagcgcgacaatcttttcgtttccgcgtttcgagtgattttgcgtaaggttgaccaaccccgctttctgcaaaaatttcacgtgaaaggaagtgtttgacagggacatatccagccgctccgcaatttcctgtatcgtgtaagagtttgccgtcagcagagaaagtatttttctccgcgtggaggcgttgagcgcggtggctacccgttcgagctgcccgtcgttgcaaagcgtgagcgtgagctttttttgaagcaataagtctctgttggcaaaaaagtctttcggcatagcttcctccttctataaaaatatacttcatttcttgcattataaacgatctgttttataaagtcaagaaaatcgctgtaaacttcgataagtatcgaagtataaacaagcgttgcgtatattttgaaaatgtggcttgaaactgtaattatgatatgataaaatgaagttgaaaaaacaaggaggatgataaaatgagaaggacctgcaagctgttgatggcaatatttttaggggtaaatctgatttttgccggaggttgtttctttacgagcagccaggggagcggagacgataatatagaagcgtcggattttacgctggatcccgccaaagagtataagatagagtttatgatgtggggcgcaaaggacgaggtggacaattatacggcgctgatagacaaattcatggatgaaaacgaaaacgtcacggtaagcattaccacacaggattcgacgcagtatatgagcacgctcacggggaggctttcgggcaccatgcccgaccttttctatcttcccgaatacgaattccgtccctgggtggattcgggacggcttctttccatcagcaacgggtttacggaagcggaatattcctccctttggtcaacggcggtggattggtactcgtataaccgcgccgaaaagacgctgggcgtttcggagggctcggatctctattgcctgcccaaagacatcgggccgtggacgctgatgtataacgtcgatatggttgatgaaatggtgaaaaacggaaagctgacgcaaggggaggcggatttgctggcggactcggacaatcctctcacctggaaacagtttacggatatctgcgtgaagatacagggctatttcggcacggaaaaaaacaacgataagttttatgccataccttattacgaattgagcagtgcggtttggtcgaataacgccgattatttcgatgaaaacgccatgcacagcacgatttccagcgacgaattttgcgaaacgatagaatggctttgggatcttatgtacacctataaggttgtgcccaaatccacgggagattccgcgcagaatatgtttcttgcaaaaaattccgcgttttgctgggtgggaccttacctcacgccgatgtaccatcagcagaagatgaattaccgtttgctgcccgtcccgtataacggcgaaaatcccgaggccaggagcaccacttggataggcacgctggggctggcgatcagcaaatcgacgaagtctcccgcggcggcgctcgcgctgatgaaatatctcagcctcaacgaaagcgcgcagaaagatttttatacgcgcggccagctgatccccaatttgaaatcgatggctctggacagggaaagctttttgtcggaaaatgatgggtccgtggcgctctggcctgaaaaccgaagcgtatattgcgatatcgtagatggcttcggcggggatacgaaagcggcgctcggaaaaacgggcggggataagatcggcggaaaggtgcggccgcattatcatacgtttgaaaattcgtggctgaacgctctcaatacagagatatcggatatctatgcgctgaaagataaatccggcatcagggcacgtctgaaagcgtatgaccccactatgcaggcgtatctcgatcagtctaaccgaagcgcgggaattatcgtggattaaggaaaaatacggactatggcaaaaagcagtttgaagacaagagaaaaatttgccgcgctcggcttcgtggcgccgttgtttataggctttgcgctgtttacggcggttcctctggtcgtcgccgtcatttacagccttgtcgattatatgcccctgcaaggcaaaatttcgcccgtgagctttaaggtttatgccgaactgtttaaggggcagctcacgatgctcggcttcggtcaggcgataatcaatacgctgattatcatgctgagcattcccgtcaatcttttgctggggctgttgttttcggctttgatcagccagaaaaattttcggggcggtacttttttccgcgtagtgtattacctgcccgccgtgacgggtgcggtggcgatcacgctggtatggaaattgatgttcaacgaaacgcaggggatcgtcaacgtggcgctgaaagcgttgggcgtaatcgaggaaaatatcaactggctggggattacctcgggcactgtttatccgcgcctggtgcttattctcaaaaacatatggggcggaatcggcggcgtaatccttttatatgtggcgggcgttctgaatatctcttccagctattacgaggccgcggaaatcgacggcgcggggaagatcaggcagtttctggcgattacggtacccatgctgacgcccattaccttctatcatctcatcacttccgtcatcggcggcttgcaggcgtttatggatacccagctgctggcggatacgcgggtgacgcagacgatcgtatattttatctatgacaacgggatcaacaactatcgctacggctacgcgagcgcggcgtccgttctgttggcaatcgcggtgatgattatcaccgtcctgcaatttaagctgtcggataaatgggtctattcggagtaacgccatgagagaaattgtgagacagaaacaaaggaaaacgtcgctctcctctacgggaataaaaattattatctatactattttgggtctggcggcggttacgacgatttttccctatctttggatggtgctggcgtccctgaaaacagggatagaaatttctacttatcccgagcagatattccctaaaaatcccagctttacggcttaccgcagagcctttgaagagctcaatctctgggtggggatcaaaaatacgctcgtactcgtcgtctttgcggtgctttttccgcctgtcgtttcggcaatgggggcgttttcgtttgcaaagctcgtgcttcccgccaagcgggtattgctgcttgtccttctcagcagcatgatggtaccgtatgcggcgttgatgctgccgcagtatcagatctggcagtcgctgggatttgtggggacgctttggccgctgattattccgaattttttcggcggggcgttgatgacgtttttctttatccaatatatgcaaggcgttcccaccgatttatttgaggcggcaaaaatcgacggcgcgggatatctcaaccaatttttcgcaattatgcttccgctggtgaagcctgccctcagcgcacagatcgtatttgccttcgtcggtacctggaacgattattttattccgtctatctatctcaataaaaccgaggtaaagacgcttcagcttcaattgctttccctgcagcaacagcagaacaatttgatggacatgaacatggtgatggcgggctcggtgatttcgagcattcccatgctgatcgtatttacgacctgtcaaaaattttttgtcgaatcacttgccatttcgggcataaagggttaatgaaaagatttataaggaggaaaagaatgaaaaagagaactttgctgcttacggcggggatactcttgtcggcaggtatgtttgcggcgggctgcgccgtggacgccaacggagggtattcggcttttcggccggataaatcggagggaaattccgatttcgatttcccgtccaattccttttcggcggacgtgaagctcgacggctatctcgacgacgaacgctgggcacgggaggacgtcctttcgttgggaagctgggacgactccgacgccgaaagcggggaatacggcgcaatcgtttccgataccgccgattacgcgcactcgaagcgggcgatcatcaaaatgttccgcggaaacgtcggctttcatttcggctttgaggtgaaggatgacgacgtggcctatctgagcctcgaagacggcgatcccgccatctggactgacaatattctcgtcaatctctgtacggcgatcgacggcggcgtcgtccccatgtcggacgattactattttatcgtcacggcgttcggcaacaactgtttccgccgcggcgccaacgtcgcgggtacctggggcgcatggagcggcgtgctcgattacgaggcttctctgcactatgcggacgacggagagaccgtgacgggtttcggcgtggagctcgtcgttccctatacccagatcggcttgaaaaaagacagccccgtcggcgtcaccttccgttcgtgcgacagagtgagcgccggcaattccatgatcgagcgggaatggtggtataagggcggcacgcatcatttcaatacgccgaatacgtacattatctggggcggcgacaatcggctttacgagtattacgattataaaatgcccgacgtcaccgtcaaggggactgcggtggattacgtcacgggcgacgcgcttgcgggcgtgacgctcgccgaaggggtaacgaccgacgaaaacggaaatttcgttatggaaaacgtagatcccaataccgatctgatcctgacggcgcggggcgagggtttgctcggcgagcaggaattttccgttccgcgcgataaaatgcgggttttgaacggcggaacgctcaccgtcaccccgaaatttttgaccaagaaaaacaagattacgcagacggtgaagggcgtgattacctcgctgggaaaagtcgagggggccacggtgaaaatagggaaagaggaaacgacgctttccgcggacgggcgttattcgctcgattgtgtattcgaccagcccgttttgaaaatgtcggtgagcgcggccgggtccgacgcggtttatgaaacggagatcgctatcggagacgccgtgaagggagaggtggaaaagaacctcgagttgcccgtcatgagccgtttgtcgcaaaaattcgggacaaacaaaaccgcggagggctatctcggctggacgaaggaagggctgtttgtgcggattatcggtacggagccgaccaacggctatggcgtggcgttttcggcggacggcaaaaagggaacggtggtgctgtatcattccttcgggacgatgtgcgttaccgattttatgacgcaaagctgggagtacgcgccgccttcctcttacggcatagacgcggaaaagctgacggattcgcgggggcgcaatatatatacctttgtcgtgccttatgaaaagctcggtatcgggtacggggaggcgcttaaaatcgcgccgttcgaatacacgtcggcgggaccgttcgcctggtacgaggacgaaaacggcgtttcctatcctttcggcgacgcggaatttttaacgaaatatcccactctttccgccgacggagctatctccttgatattccccgaaacggtgctttccggctaccgtatcggcgcatttggaaagacaaacgcgacggccttattcgaaaaggtagagggacagacggacggcattcgggtaacgatcgactatacgccggcggacgggttctggggctttggcgtgatgtttttcgatttttcgtccggaaaggggatcacccagctctatgtgccgggatacggaacgatagatcatagagaatatggaaattgggcctggaacggcaattatgtgcccgcttcctccctgggcgtactctcgagcgaaaagactgccgacggcaaggtgtcgatcgagctgttttacggctatgccgttttgcagggcgagaagtacggattgggaatttcggcggatacgctcgatatcggtattcagatgttcgaatacgtgctcgacggctccggcaatctttatacggtctataactgcatcaacggcgaggacggaacgccgcttccgtttgacggaggagccgcttcttttatcaaatggagaacgacggaggatgtcccccaaagcacctatacctacgaacacctgggcgcccacgatatttccgtgacgctggaaaagcttgcggacggaatacgtttgacgtatgcggcgcgggagacgtcacagcttttcggctatgggatatgccttgatctgcccgacggagcgcaggatatcagtctgctttatgcgacgacggggaatctttccctgctcgcgtacggaacatgggcgtgggaatataagcttccgtcggaattcggcgtttcggcaaagcgctcggaggcggacggcacgacggtctccaccctctttttaagctatgaaatgctggggatcgacgcggattttcaatcggtagggctgtgtctttttgaagtcgtcaaccaaggcggagcgcaattcggcatttacaattgtatgaaaaacggggacgcagaaatcgccatagacggcggcacggaaaactttgccagatgggacacggccgaaggataaggagaaaaaatgaaaaaattttggaagggaatactttttatggctttggcgggaacgacggcgcttacgggctgttcgtccaaagaatcgggaaggccgatctccaccgctcccgtcgaggggtggacggcgcccgactataagacggaatactacgacaactatcagtataatgcctactacaatcccgaggaagcggccgagcatttgcccgatcaggggatgtacggctcgggaaatgcgtttatcctgcgctataacggcctgtactatatgtatatgggctcctcgaatttcggttcttcttcgcttccctgctggaagtcggaagatctgatgacctgggaaaaagcggataacggtgtaaacgctcagggctttatcgcggaagacccgcgcctgagcaacacctatcccccctgcgtcagacagtacaataacgttttttacatgtacgtgtatatcaaaaacgacgtaatcgagcagggaaactatatcctgaaagcggattcgcccgtcggtccgtttgaatttgtgacaggcacggacggcgcgcccgtctgctacacgatcgatgcgacgacgctgaatatcgactgcgatattttcatcgacgacaacgaagacgtgtattttatgagcggtcatcaggacaattattttacgggaatccgcgcctttcagatgccgaccatggacagcgtcgcctatgacgaaaacagttatatcaatatcgcggaaagctcggtgggcggctggacggagggtaacggaatcttcaaacgcaacggaaattattacctgatgtttacgggctccaatattctcagccccggatatctcacccactattccacggcgcggggggacggctggaagcgggcgtttgggacggaaaacaaggtaaacgccgaaggctttgagcagggaatcgactggcccatgggctgcgaaacggagcctactttttattcgctcggtcacgccacctccgtgctcgggccggatatggacgggttgtactatcattatttcagcgtcaattcgtcggggccgaattgctcgttcgccatcgatcgccttaccttcaacggaacgggaatggattcggcgcagacgcagtttcattcggtaaagccgaagcgtccgaagatttacagttattcccccgaagcggacgaaaactttgtcaaaagcggggaggtactcctttcgaaagaaaagacggcttcggcgttcaccgcggaatataattttacgggaagcggcgtaaagtgtatcttcggatatatagacgaaaacaactactcgtacgtcgaaacggatctcgcggcgaaaaaggtacgggttttcagcgtggcggacggtgtggccgcggaaaagggaagcggagatatcgtacgcgcctacgacgcgcccgaccttttgcagacggtgcgcgtggcgtatcgggacggaaaggcggacgtttatttcgacgaccttttgaagattgaaaacctcggattggacgtcggggcgggaaaattcggctacggcggctcggacgcgacctttggctatacggcggcgtcgtctgtggcaaagggactcagcgacgcggtggagccaaagctctcttacgtcaatatcggtgcggagagttatctcccccaaggcgtttacgagggacacgggtcttcgtttggcgcgggcggcggatatgcggaaacggacgggaaagagtacggcggagcgcatgcggggcttggaaaaatgcgcttgaaaaacagcggcgacaaagcggtgtatctcgtcgatttcgccgcggacaggacgggcgcagatacgggctattatgcgcttcagatgactctgaataaaaatcaggcgggaaaaaagctgggcgtgcgcgtggacgggggtgagatgttcgtcgtggaaatccccaaggtgctcccgacaagcggcgaagcgctcgtcaagacgacggttgcggaaattcccgtcggaaagggcgtaaggcagatcgaatttacctgcctgggcgaagccgtggaatttcattcgttcacctttacggaaagcacgggcaatgttttttcctacgagcaatcgctggaaagcgcgcctgccacgggtatggagcagctttcgctgtggcggttcgaaaaacgcgagggggacgaaacggcttctctggtatcgagagagggcgctcgctcgctggcgtatttcgggggcaagggcctgctcgattatacggtggaatgtgaattccgtatcaatgaagagagcatttacaccgcgggatttatcattcacggcgcgaggtattccaattctgcctatgtgaccgaggattataagtatatgcagggctattacatcgccttcaacaaacgcatggtaaaaatcgagaagctcaattacacgcacacggacagcaatgcggcggcagagaggctttctctcgacgtcgggacatggaatcgggtaaaaatcgaggtgaagggcaactcgatagaagttttggtgactaacgcaaagggagtatccgaaaaattgtcgtttacggacgatatcgtattcggcggcggacggttcggtttctattcgggcggagcctccatgtcctataaaaatttgaaaatcacggggtaaatcgattggaaaagggacttgtactgttgtatgaagattttggcgaagcctggctttcgccgctgaaaaaatcgggaataaagctgttggggctgcatgccgacccgcgtcgcgcgggcgtcggggaatttctcgatttcgtcgaagggaacagggccctgatcggacgttttgagaaatcgggcatacgggtggaatataagctgcatacgcttaactatcttttgccgcgggagctgtttgcttcggatagcgcgctgttccgaatgaatcaacgaggggaacggacggacgattacaatgcctgtccctcgtcggcagaggctttggcgctcattgaaaggggcgccgaacggcttgcccgcctattacggcaaagctcccgccgctatcatttttggctcgatgacgatttgggcggggatatccgatgccgttgtccaaaatgccgaggcctgagcgcggcggaacaaaatatccgcttctgcgaagccatgcttcggggacttcggaggtacgacgcaaaggcaacgctctcgtttctcgtctatggagaagaggccgtcgggagggagcttcccgagggacttttccccgaatacgcgccctttaagaggcggcacgatatttcccttgcggaggaagaaaatgcggcgtatcgcgctcgctgcgaaagcttgatcaatcgatgcggcggagaagagagcgaaattttagagtattttttgagctatgattacgcggcgttttgcaaagacggaaagcggaccgccgaagatattgcctattaccgctcgctgggcgtgggctttttgactacctttacggtgtttcccgaaaagaattacgtggagaaacacggatacgaaggcattatgaaatacgctttgttataggactcaggacatgaagaaaaaaggaattattatactcaacaaggatttttcacgggagtggctgcccattctcaaagagagcggtatcaatacgattggctttcattctctctatcaattcggcgggatggaggggcatctcgattggctgttgaatgaggacacgcagaagctgatagccgaatttgaagcaaacggcttcgaaatagaacatcagctgcacgccgtggactggctgcttccccgcagttttttcaaactacatcccgaatggtttcgcgtaaacgacaagggagaacgggtaaacgactggaatttatgcgtcagcaatcgggaggcgctttcctttctcgaaacctcggcttataagctggcgctgctgctcagacaaaagtcgcactattattacatctggagcgacgactgcgtcaacagcgtctgctattgcgaccggtgtcggcgttatggcggggcggatcagaatatgatcattatgaagcacgtgctgaaggggctgaaaagatacgaccaagaggctaaactgagcttcctttcctatcaggattcttcggacgttctcaccattcaaccggaccgggatatgtttttggaatttgcacccatcgggcgcaatcatgcaaaggcgctcgacgggaacgatgaagccaacgtaaaggcgagaaaaactctggaagagctgttgaaaattttccccgccgaaaccacgcagatactcgaatattttctggacgtttcgctgttttgtcaatggaagagagaaaacgccaaagcgttggatctcgacgcggagaagcttggcagggacatctcctattacgcctccttgggcgtaggaggaattacgacgttttcgggctttatggacggcgaatggcgggcaaaatacggggacggggatatccggctctacggaaaagcgctggatgagttttttgtccggaaaaatggcaagccttggcagaattgtataacagccgcttccatggggagtgccggtgatgaagccaactccctgacggggcgttatgatacaatcgaaaaaacgtttcggtaaaagatcatgtcggtttatcgtaccgcagattgcacgcacaaatgagaatacggatagtaaaaacggctttatctgacaatcgtgaccgcaaaaggtatatacagttataacgggataacagccttttacccgcactagtaaaccggctttcctgtcgcattaatatcgttttatatagctcctatatatcgcgtctctccttcaaaacggaggcgatatataggttttttatgttgagaaaaaatagggctgaaagcttttatatcaaggcttcggcaatacttttttcttttacttttttcgtgcttacggcgaagcgggcgtaaactctgcagtgtccttcagagaccgacaatatcgcctcgtcgtatggcgcgcgtaaggcgattgataatgattcggagatcatagaaaaaaatttttcaattaaatcgcaacaatttttttcaaacctattgacagatagaaaaaatcatgatataattaaaatacgatcaaggaaacacgagtttctaaaaaacaacgataaatgagggggaaggatgaaagaaaagctgtctttgttttttcaattaggtaaaagcatggccaaggcaaaaaggacgataacgtcgtgcttcatagcattgagcgttatattttgttgcgcttgttcgggcgggccgataaacagttcgataagttcttctacggatgcaagttcttcttcggacaaggaaacgattccggaaaaggatccggagacggaggatattgcaatgtcatcattaaaaacgcttcgttctttgagcggaacggacgctttgggcagagaagtgacgccggtggcgtctttaagcgagtcgagacaagtcggcatgttctattttttatggacaggtgaacacggaagtacgggcgcttccaaggacggacatatactcgatatttcaaaactaaacgtttcggaaattaaatcgtcatcggatatagggcgtcatcattactgggacgaacctttgtacggttattatcgctccgacgatccgtgggtgttcagaaagcatctggaattgtttgcgttggcgggcgtcgattatctggttttcgattacacaaattcctggggctcggatacgcagcgtcccaacaactattataaagacgtcacggacattttgttccccgtggccttggaaatgcaaaatcagggctgggatattccgaaatttgcgtttatgctcaacaatacttcggataaaacggttaagtggctgtataacgattattatacgaaagaggaatataacgggctttggtatcgcgcgacggacggcttggcaagggataaaaacgtcgaaggcaagccttgggtggtatgcggggattccgtggaaaatctcgaggaaaacataaaagataagttttacataaaacggacgcaatggccgaatgagaaaccctcctcggacaaaacgtgggactatgagtataaagacgacggatttccctggatgagctgggagcggacgaaagacggcgctcgcaagcagtacagccataacggaatcatgtccgtatccatagcgcagcatgtttcgggcgcgttttccgattcggtgcttatcgaaaataattataacgccgtttacggccgcggctggtcgtcgctcgacaataacgggtacggcggcaataataaggagcgcgtcgccgcgggcagtaattttcaggaacagtgggattatgccgtcggggaagcgcggaaggggaacgtcaacaatattttcgtgacgggctggaacgaatgggtggcgcagaagcaacccgccggaaacggaagaaaaacgagctatttcgtagatctttacgacgacgaattttcgcgggacgcagaaatgagccgcggacctttaggcgacaatttctatatgcagctgacggaaaatattcgggcgtttaagggcgttcccgccgcgtcaaaatctttggcgatgcagaaaaagagcatcgacttaaacggcagtctgggtcagtgggacggcgtttcgggctttgaggacttcaaaggggacactgccgtgcgcaaccacgcaagctcgaatacctccctgcccgcctacaccgacgacacgggaagaaacgatatagtcaatacgcgcgtggtttacgacgaacaaagcattacttttctcgttacctgcgcgaaagatatcaccgactatgaaaacggcgataaaacgtggatgaatatttttctcgacgtatccgcctcgtcggaaacgggttggaacggctatcagtacgtcgtaaaccgtacttttgaaaacggcaggtcaaccgtgcagaagcttggtgcggacggcgaagggactgcctcggcaggaacggcacagatccgtaaaaagggaagatacctcgtcgtgcagattccccgcgcggcggtgggtgccgctgcggacggctttaccctccgttttaaggtgagcgatcatgttgtggaatataaagatattctcaattattatgtccaaggcgacgcggcccctatcggcagatttaattataccgtaaagggataaccccaacccgaaaaataggaaaggacgtcctttccttatcagttctataagaactgatataaaatcttatcggaaaaagcgtgtaagcgtttttatatcaattaataacaggaggaaatgttatgaaaaagaaaaaactcgccgcgggtctgctctgtctcaccctggcaatttcggcattcggcgcgggcgcgatgtttgcaggcgttccgtctatgcccggttccgcagtggaggcttacgccgaaaccgttacgggaaaacaggcggccgcctccgcaagcgcgtttgactcaaacgggtggtttacgcaggacgcctataacgctatggcggataagaccaatacggtcagtaccgatcctaacgtcgcttatctcgcctatttgaaacccgaagtgataggcggttactcgatgttggcgagctttgcaaacggaaagatcatcaacaataagcagctttccgtcgcagacgaaatttctttcgaaatagggatagtggaaggcacgggacacggcaatcgttttattcattttatggattccgcttccatcggcgaatatctgggcgtgaaagaaacaaatacgaaattcggtattatgttcgattgcgacggtgccaaggcggaaatttacgtcaacggagaaaaacagactttgacgggcggcgtaaacgtaaaaacgctggaaaaaaacaaaaaggcaatttgggagaagatgcccgtcgtacatttcgtcagcgtcaaattcggaagcgatacggaaaagacgaaagtttatatcgacagcgaattggtggccgagctcgatatcaagcaatcggattttgagtcgggtaaggtgcagcttgtatccgatttctggggcggaggcggcgatccgtgggtgtttttcagcgcctttgatccttttacggtgataaaggctcccgtagcgcaaaatcctatcatcgccaacggatttgataaggatatcgtggtagagcttacaaagcccgttacggaaatcagcgtcgaaaacgcggcggataccaaggtgactttggaaaaagatatcgattatacggtaagcggcaacatggttacgatcaaaaaagaatttatcgcgggcaaaccgataaattacttcaaagcggatacgcagttgattttcgaaacggcggacagccgcacggcttctctggcgttgaatattctctattacgatccccccgtctatacgcagagcggcggctcggctgtggttgcggaagcgttgacaaaggatctcactttcgaggtgggttatacgcacgaagaagcctatacgatgaaggtaaacggcgcggcgctcgcggcggaaaactttacggcgacctgggcaaataacaaaattaccgtcgccctcaaaaaagagtatatcaacgctcttactcaaggcgcttacacgtttgagctgacgacgctggcgggaaaagtggaatactccgtttaccgcaagaccgcggctaacgagtgggtgcttgtggacgcggagaaacccgtcgtcgaggaaaaggtggaaaagaacgcgaacggctctacgaaaatcacgctgagcacgctcggccgcgcgtattattcggaaaaaatcgacgtcacgaaacccatatatttcgaaatggacatagagacggcgaaaacgggcgctgcggactggctggcggtatccttgctcaacaacgagacgttgctttcttctttcaacgaagcgaacggcaaggacaggtttactttcctttacggacataataaaggtgaatttcagtccccgagcattcttcccaacgcgcttttcaagcccgaatatataaataaaaatggccctcagttgttcaaattggtgattgcggaagcaaacgaggacggcacgacgaaagcggggcagatgactgcgctctatttcaacgggtataagattttcgaaacggataagcaaaatcaggccgccttcaaaaacggcgcctatctcggatttttctcttcgcttgcgcagtttactttcactacccgtacggacgttacgtcgcccgtcgcaaatacttacgggctggaatataccctgggaacggacgaaaatctttccgtgcccatgtataacgcgacgtcggtcagcgcggtcaaatacggagatacggttcttgccgcgaaggattatacgtttgccgagggcactttgacgatcaaaggctccttcctcaaaaccatcgcttacgacgacatgatgacgtttgtcgtgacggcggacggcgtggaggtgaaaataaacgtcaaggcgctttcggaggtagatcccgaaaaatcgtttgtcgcttacacgggcgcggacggcgcgaagtttgacaagaagttcgcggggaaaaccgtggaaaaagtgctggatacgaaaacttccgccgcacttacgcaagagcagtattccttctccgccgacggcactttaacgatcgctaaagcgtatttcacgacgacgggaacctattccttcgcggtggtgacggacgacgggctttatttcgccgtggcagtcaattacgaatacgacgcaaacggacttgcaaaccgaatggaagcaaacaacggctcctgggcggacaacacgcttaccgtgtccggcgaaagcgattatctgtttaaggatttcgtcgatctgacgcaggaaggcggcgtgtcctatacgcttgacatctcgaaaattaacggttattataaatccggactggacggctcgaaaaacgcctatatcgctttgtctttctacgatatgttcagcggcaatacgattatgctgaagctgtacgccaacgatacggaggaaagcggcgcgcagatggcttacgtcgaactgcttatccgcgataaaaacaataagcccgtttatatgggcaatacggccatcgaggacgagaaaaattatttcgacgaaagcataatgacgaaaaacgtgcttacgttctctgtggaaaacaatgcgttatgcgtcgagttaaacggagattacagcatgtatctcgatctgggcgatacggtgctgacgacgcttcagctctccgtcgcttccacggccgacatcgagggcgtgaagaacgaatttgccttttcgacgaaagcggaggctcccgtcgagcccgagaagcccggcacctccgaaaattcaagcggctccgaaaagacggaaagcggcgcttcgaaaggctgcggcagcacggtggcgagttccgccatacttgcggcgggtactctcctcgcttccgcggcagtcgtttgcaaaaagaaaaaatccgataaataaattgcctcggtttcggcgggcgggagcgtccgccgaaacgaaaggataatgaaaaggacaaagagtttatgctgaataaagaaaaacggatccgtccgctttgggccgtattgtctgccgtcgctttggccgtcgccgttttattttccgtccttacgggatacgcggcgggcatatcgaaaaaagacagcggactgtccgtgactttagcgggcggggcacccgtgacggccatggccgaaaatggcgcatatctggcggcggccgacgaatcgggcgtggtttcctgttacgataaaccgaccgatcggctcctttggcagacgtccaaaaagctttcggacggcgaaacgaatgccgtcgtaaaatcgctggcgattcgcgacggctgcgtttacgcggcgttcgaggataaaagcgtcatgcgtttcgccgcggcggacggaatcgtgcaaggcgtcgtttcgaccaattatattcccgaaaatatgattttttcttccggaagcagttcgctgtttgccgtttacggcaagacgggcacaaagcgggaggtttatcttttccgaacggattttgcgggcagcgaggcttctcccgtaagctggagggaatatccgaagctggacgcgggggaatacgcggtcagctcgggcggcgtggaaacgggcgtgcaggggattttcgtttccgacgagtacgtttacgtcgcttcggacatgtacacggtacgtcggttttcgcatgaaggaatggcggagccgtacgaggaattttcgacgaaagcggaaaagctggtctgcttttacgaggtggccgacggctttgcgggcgtcgatctcagaggcaatttttatcgtatggacgcttcgttttccacgcggttttccctttcgtcgggacgctctttcgatacggtgcgccgtgcgggcgatatgttttacggcgtttcaaacggcgtggtgacggggatttcttcgtcgggcgaaaagctttataccctttcggccaaagggagcgagcttgtcctggcaaaagcggaaggcttcgccgtttcgggcgataagggagtaaagtattacgccaacgactttgccgcctcgatggaaggctggtcttcaaaaacggggatttttgccgtcgcgcttgccgtctctcttctctttctcgtctatgcggggctgtccgtttatcgccccgtgcaaaaacgggtcaatcatgcgttcgtctgcgtgggaaaaacctttgtaaaacaccgttttgcctatctgggcctgatccccgcgtttgcgcttttggcggtattttactattggcccatcatacagggctttgcgctgtcctttttcaactacaacggcgtaacgaaagtgtttgtggggcttcagaatttcaaagacgttttgcacaatacgatattttggagctcg

SEQ ID NO: 2965 - DNA, 23159 bp, Unknown
  16S sequences of unknown bacteria
ttgcatacttctctaccataggggtttttatatatcccggacacataatattcgatgtaattccatttttaacatattccatagcaatactctttccaaatcctattaatgcagcttttgtcattgcatatgcagtatcctcaccatcagtaacaaatccacccgttaccgaagccaacgtaataattcttccgtaattatttttaagcatctcaggtattacacactgtgtaacattccatggtccttttatatttacgtcaatatgaaagtctctgttttcttcatcagcttctaaaaacggcacacaggccattaccccagcattatttacaagaatatcaatttttccatatttttttaccgtctcatttactgcagttttgatttgtgaaatatttcttatatcaacatgaaaacctgctgcatcataacctttatcagtcaattctttaacaacattatcaagattcttatcaaaatcaaaaattactattttagcaccgcctgctgccaatgcattgactattccccgaccattaccttttgctcctcctgtaactattgccactctatttttgactgtcattttattctcctttcattttctaattaactcgaccaattttctccgataatttctatctcaatccctacttcctcaaagcaatttttaattttatacaatctttctctatccggtggtctgaacttgatataatctgcacctatatgagttgcttttgtatttccaagctcgtgataacaaataagcgataatttttttaagccacattcaacaaaaagtgctcttgcctgcataatgtttatatcatcatcattaacacttgaaattaaaggcattctaagccatatcttttttctgatttcaggcacagctgaaagctttttcagatttaaaattatcaagttattgctcacaccggtatattgtttatgctgcttatcattaatatgtttgatatcatacaagatatctgtaacattttcatagctacataatttacttataacctcatattgtgcaaaacctgatgtatctaaacatacttttatattttctaaggcgcacgcctttattaattcttctgcaaattcatgatgtataaaaacttctcctccacttaatgtaacacctcctccagtattttcataaaaaactttatcctgttcaattatttccataatttctcgaactgtcatttcttttgcaactggcataatagcatttgcataacatacttcagtgcatgcatagcaattactgcataagctccaatcaacagcaagctcttctctgttttcataaatagcactatcaggacatattttaatacattcatagcatttaatgcatttactaggatttacaattatttgatttctaatctcaataagttccggattgtgacaccacttgcattttaatgggcatcctttaaaaaacaccgtacttcttattccatccccatcttcagtagagaacttttgtatcgttccaattaaagctgtttttttatacgacatacctactccttttaacatcctccaagatgagcagttctatcaatcaaagcatcctgtacctgtttgtcaagttccgtaaaataagccatataacctgcaactcttaccaccagtcctctatagctttccggatcttcctgagcctttcgaagtgttttattatctacaacatttatctgtatatgctgcccaccttcattaaaaaaggctcttattataccttttatagtttctatacccttttccccttgaacgcctcttggatcaaatctcaaattaaacaatgcaccgtcataaaaatgtaccggctctaatgaagctacagatttgatagttgctgtaggtccactaatatcccttcccatcataggtgatgcattgtcattaagaggttgccccgcaagccttccgtctggagttgctcctactacctgtccatgcggtacattcatcgactgtgacatgagtgtaaagtcaaatatcccacctctggaatcatgcttcttttgcacatattctgccgcataagttacaatctctttgtttactttatctacctttgagttatcattaccaaatttcggaggtttatttaaaagcagctgtctgattctttcctctccttcaaaatttttatcaagaatgtcaataagctcatccattgtcaaaattttatcgttaaaaataatttcgtcaatagcaattattgaatctgcaagatttgcggttcccgtactgaacagtcctgcagaattatgccttgttcctccttcctgaacagattttccattttcaatacacccatccataaccaatgatgcaaatatagccggcagtcttaacgcctgctgaacttgcagaatattaaatccctcaataatcttgtcatacaggtatactatctgttttttagaagcttctatgatttcttctttacatttgaaatctgaagggtctcctgttttaattcctacttgctttcctgttgcaggatcaaccccattatgtaacaccagttcaagaacctttccgaaattcacatatcctgcatctggagttccatctgtaccacctcctccaaattgcggctgtgtacaacctactattacccaatctctagcttcagcctctgtgcctcctttagctctaataatatctgagcaaattctttcattaaaaaatcccggattcgccatacctgattgtatcatttctgcggcttgtttaaataaggcatcaggggttttatcgcttatcctcattgcaagtacaggctgtgcagtctgtacatctgcccctgccgtaaggcacatatatgaaagtttattagtcgcatcatttccatctaaatccagtcctccaatcatcacaattgcccacattggaaagcccgcaaatgctaaagaataatatttatcacgaacttctattacttccccgcatttaagaaagaaacattccagaatttcctgttctaagtcctcgttaaaaattccagcttccatgtccattttcatataaggaaacaatacttggtcaaacctgccaaaactgcacgctgttgtcggtccttcaatatggaacacaagatgtataaaccacacaaattgcaatgcttcatagaatcctgaaggcgaatttgctggtacttttctacagtttgctgcaattgtaaggagttctgattttcgttttaaatccatttcattcattgcaagttcttctgctttgtctgcatatcttcctgcaaatcttataactgcttcacatgcaataatacacgctttccaaaagtcaattttagaatgagcctccaaagtacctgtcggttccttcataattttagctctgcagtcatctatatagccttgcagtccttttgacataagagatttataatccggaacagtttctcccgatgttgtatttgtaagccctaaatctactattccatttgtaaataattcatatacatcatcaggtaaaacttctggaagtaaatcttcaattgcttttcccttccagtattcatccagacattttaaaatagtttccttatctttatccgtaacatctatctgatccataggtctggttggaaattcagggatttcttcaattaaccaatcaacagacgtgtattcgggaaacaggcttgcgcctcgcagtgtatatgttggagcaccaacaattaactcctcatcatgaattgtcacactaagattatctaaaacatacgcaagcacttttgctctaaataatggaaccgcatcacctgcatactttttatatgcttcagtcgcaagtaaaagtctttcgggcgtaatattaggtctggtatttaaaaattttgactttagtctttgtactcttcctgtcatcatattcatcaactcccttcacaaattgatataaaaaaacgacccttttcactaataatactgttgaaaaaagtcgttatctacaattgacttgttataaaatctaatcgacatgctatttagttgttatttttttataattctgataaatttaaaacctaatccttttaggtttactttgaattccattttattatctacataatgctctttacatattgtcttaggtgaagatatatttattatgtttatgacatcactatcaattatatcttttctcccaaaattatccctgctagccaaataaaacaaactgttttcataattctgtatcatttcaacaacctgatatacacctgctgcaagcccttgtatatcgacttttatttccattgaattcttaaattccattattttatcatttatttcacggattgaagaatttgtatattcacacaattgttttagctcatctgaacaattatagaacaacagatttagctgttcctcttcgctattattaatggattttgttacaatatagcaatttgtaaattctaaaatatcaccttgcattaaattcaatattttatatgcaaaatatgctggtttaggtattccttctgctgtaaacaaacctgtattgccacttatgagccggctattcttatccctttcatcaataatactatttaaaaaaacttcactgttttcaagagcataactcattaagtatggtacaaaaatgagtgaatcccatgcatagatttttgtatttattttctctttgttatttcccctacatttttctatattcaatatctgcatcagtaaatctatattatatatcatctctttggactcaaaataattattatgcagtttaatattatgtacaaaacttccaacaggtttcttgtcactatctatatggatatatatatattggaatttccgatatatatcttcttcaaaatcaaatgaaaggaaactaattgcatcgattatcaatggtatcgtttcagtattatctatttcacttacttcttcaatatctgcaccttttatatgatttgcatacatttctctgtactcttccggataacatctataccatttcttaaagaattttttataatactgtgtagtagaaaatcccaccgcctttgcaatgttgctcactttagtttcactttctagtaaaattttctccgaacattccactcttgcgaaagataataattccctaaaattcaatcccgttcctgctgtaataagatgtgaaagataaaactcgcttaaaaattccatatcggcaagttctttaagagttattttttcattatagtgcgcataaatatatgttataacccggcttactctttcattaagctcaggttgattatacttcttatgcattacaattttgccttcaaaataaaaagatgaaaaatgagcttccaaataatgcaatatatctatcataatattaacattttcaagtttatatccaggtgcttttgaaaaaaaattatagcctatctgcaaaaaattgttccgtagaaaaacaattccttcactgctcctttccttacccatggttctataagctctactaggaagtgttggaaacagctttacaaaatacttcatttctatccgaattaaaagaattgcattgtccttcgaacaatcaaatattccatgaacctcactctcatttacagtaaaaatgtctccctgttgcattttgtatatactcgatccacatttaagtgtcacaaagcctcttagaacataaataaattcaatgtctgtatgataatgtaaaggataattttttatgtttactagctttatattcattggaaaatcccttaaatagccaaccttctcttctaacatactgatatcagctccttttagagttatacttatttcaacctatttattatatccctgcctttaaaaacaacccgtccctgggttattattgtatctatatctatatacttacaacaaagacattatactatacttttataaatttatgctctttaaattttaagttttatctttactatcatcactatactatttttaccagaaaagcaggcagcccaccttaataaggtgaattgcctgtagcattaattcctgtcacacatatttcctcatatatttaagggcgtttttttcaagccttgatacctgcgcctgacttatagcaatttcctctgcaacttccatttgtgttttaccctcaaaaaatctcatctcaagtatatgacgctctctcggattgagctttttcattgcttctgacagtgacaggttctctatccattttgcatctgtattcttgaggtccctgacctgatccattacatatatggcatcaccgtcatcgtgaaatacaggttcaaacagtgacaccggctcctgtatggaatcaagcgccagcaccacatcctcctgcggaagctcaagctccttcgatatttcagctatggtaggttccctctgcagcttcctgcccagtgtttctttagcggtcagcgccttgtaggccgtatccctcagcgaccttgaaactctgatagaattattatctctcagatatcttcttatctcccctataatcataggtacggcataggtggaaaacctgactccgtggcttgtgtcgaaattgtccagtgccttgataagccctatgcagcccacctgaaacagatcgtcggggttttcacccctgtttccgaacctctgaattatacttagaacaagacggagatttcctttgataaactcctctcttgtttccatatccccctgctttattttttccatcatagctttcatctgctcatctttatataccggaagcttagatgtgttcacaccgcatatttctactttattagccattgcccaatacctgccttacagtcaattatctctatataaaaggttgctcaattgacaggctttttattctgactaaagccaaaagtatcttccaaaaaatgcgaaactgccatatcgccacaatatgacagctctgtatattatattatttatttaaaggcagggccactctgatttctgtcccgtttcccggctcgctcttcatacttacagtgccgttatgatacgaaacagcatgctttactatcgaaagaccaagccccgtaccgccggattccttggagtgacttttgtccacgcgataaaatctttcaaatacgcgttcctgctgatcctgcggaatacctattccgctgtccctgacggttatataggcatttttctcatcagcacttatatctatatccgtaataccgccctcattattgtatttaaccgcattgtcgcacagattgtatattatctcataaagcagacgtttcacaccgtctacgcatacatgctcgcccataagcttcatattgatattctttgcctcgcatgctccctcaagcacactcttaacctcatctgcaagctcgaaaaggtcaacctgctcacttggcatctgtctgccctcatcaagctgtgaaagcctgattatatcttctataagggttacaagtcttgaggcttcctttcgtatatgtcctataaatctaggcatatcctcaggctttaccataccgttttcgataagctctgcgctgcctatgatgccctgaagcggtgtttttaattcgtgggatacatttgcggtaaattccctgcggtttctctgagcattctgctgctctgtaatatcaaatgccagaagcacagctcccactgtttctccgcctgactctatcctgcttatatccacctgatattccctgctgccgtactgggcataaatctcgctgtgtccttcctcgaaagcgctctgaattgcattattgatattgcggcttctttctatactgagaaagctctgacctatgcagtcgctgtcggtttcaaggatattctgcgcagcctcgtttatgcttaatacatttcccttgttatcaagaagtatcagcccctctttcatactttcggtaatctgagtaaactcatctgtcctctgcttcagatatctcatctgcatttcaatttctttgtgttgctgatttattctgttaagcagcggtgaaagctcctcatatgtatcgttttcgagaggtctgtcaaggtcaatgctgttcataggctcaactatgcgctttgaaatcctgcgggcaagtattcccgaaagtaccagcgcagctataaggactacaagtataggctgaagcattccgagaaccagaagtcccgcagtcgcataggtggttgaaactctaagcacgctgccgtcatcaagaagccttgcatagtatgaggtcttttccataagggtgtctgaatatctgctgctgcttccctcgccctctgctagagcctgctttacctcctgacggtccgcgtgattttccatgctgtccgctcccgcctgggtgtcatagattaccttgccgtctgcctgtatccatgtgatacggtatctttcggagtctatgtttttgagataatccgtaccgtaaagctccactgccgatgccgctatatcaagctcatccgccagtttatccttttgtatattgctgaaatactcatacaggcagctcataataattacaatgcttgccagaagcaccgtacctgcaacgatgagtattgatttgaaaattttctttgtcataatgcagcctccaatctgtatcctacattacggactgttttaatcatgctgccgcagcttcccagcttgcggcgaagcgtccttatatgcatatccacagttcttgtttctccgcagtaatccataccccatacttcattaaaaagctgatctcttgtaaacgccataccctggtgtgaaagaaacagcctcagaagctcaaattccttgtaggtgagagtaatgcgctctccccctgcgctcaccgtatgctcgtcgacgttcataacaatatcccccgcctttaaaagctgggactctgtcttaggtccgcatcttctgagcaccgccttgatacatgatacaaattccataactccaaagggcttggtaaggtaatagtccgctcctaaatcaagtccctgtatcttatcgtattcctcaccctttgcggtggccataacaaccggtatgtcacaaagctcaggtgaggccttgagctgacgcagaagctgtatgccgtctgttcccggaagcattacatcaagcactataaggtcgggcttttcgtgccttatagcctcgcaaaaagatgcagagtcctcaaatcctctcgcctcaaagcctgtggatttaagcgcatatatctctatatctcttatgctcgcatcatcttctacacaccagatcatatctatacctccttgtgctctcccgtaacagagaaaatcacccattcggcaatgtttacagcgtgatctcctattcgctcaaaatatttggctataatcagtatgtctattgcaaattcaccattgtccgggtcctctgctatgcttgctatgagcttttgctttatctgatcgaaatagctgtctacaatgtcgtcgtcctctataactttttttgctataattatatcattttttacgaaagcatcaacactttctgttaccatttttattgtcgcatcagccatttcctgaagcagtctgctgtttcccgcaggatacacgtcaattgagcatatgatttcggctatgtcctccgcctgatctcctatacgctccatatcggtaatcattttaagggccgccgatatctgtcttaaatcccttgcaaccggctgctgctgtaataaaagcttaaggcacagtgactcaatagtgcgttcctttctgtctatttccgaatcaagaggcgcaacctttgccgcaagctgtttatcgttagcaagaagtgattccgaagccaccgaaatagcctcttcacacagcgcacccatttcaataagctctctgttaagctgcataagctgctcgtcgaatctgtttctcattatccgaacctccctgtaatatagtcttctgttcttttatcctcaggctgtgaaaacagcttgtctgtactgtcacattctataagctcgcccagcaggaagaaagctgttctgtctgaaatacgcactgcctgctgcatattatgggtaaccattatgattgtgtatttttccttgagctcgctgcacagatcctcaatctttgaggttgatatagggtcaagggcgcttgtaggctcatccataagaattatttcaggctctaccgcaagtgctcttgctatgcacagtctctgctgctgtccgccggaaagtcccagcgcgttttttttgagtctgtcctttacctcatcccatatggccgcatctcttaacgaacgctcaacaatgtcatcaagctttgccttgtttttaattccgtgagtacgcggtccgtaagctatattgtcgtaaacgctcataggaaacggatttggtttctgaaacaccattccgatttctcttctaagctcgtttacatcaactgccggttcgaatatattgtttcccttgtatctgatttctcctgtgattttcacatccggaattaaatcattcatacggttaagtgtttttataaaggttgatttgccgcagcctgacggtccgataagagccgtaatgcttttaggcggaatatctatatttatatctttcagcgccttatggcttccgtaccacaggcacagatcctttacggtaatgatattgtccatacgctcctccttataatttatctatatatgtgtaactgaaaattctattatgttaaatgctttttttctttctgaaatgtctgccgacaaggtctgctgacagatttatgataagggtaagtatcataagtattgccgctatcgcaaaggcaactccgaactctccctgctccttggcgtatacatataaggcaaccgtaagtgtcgcgcctgcactgccaagtccttcgaatataccgtacagcgcatgggcaaagcctgccgtaaacagaagcgccgcagactctccgagtattcttcccaccgaaagtatgcagccggttacaacgccgtcaacgcagccgggaagcactaccgtacggattacacgccatttgccggcgccaagtccgaaggctccttctctatagctttgcggcactgtcttaaggctttcctgagtggtacgcatcaccgtaggcagattcattataaccagggtcagtgctcctgccatcagtgatgtctgcatattaagaaactggcagaaaaacagcattcccacaagaccgtatatgattgacggtattcccgacagggtttcggccgcatattctattgcggaaacaagtttcctgtttcccgcatactctgtcagataaatggctgcgcccacacccagaggcagtacgattaccagtgttgcaagcacaatgtatattgtgtttaatatatccggcagaataccaattctttctgaaaggtagcttggctctgtcgaaagcagctcccacgaaatattcggaatacccttaacaaatacatatactatcagaaagagtaccagtgatgaggtaagcaccgccgctatacccatcagagtcttcatcacgcctatgtatatttttctttttcgggatatgtttttgcctgacataatcagccctccttttctcttttgaggaagtagttaagtgtggcatttataagcattataaacaggaagagcaccagcgctatcgaaaacagagcctgtctctgaagtcctgccgaatatgacatttcgcttgccaccgccgttgtaagaaatctgacgctttcaaacagccccggcatattgggagcatttcccgataccatcattaccgccatagcctctcctatggctctgccgactcccaggaccaccgctgccgcaatgccgcttttggctgccggtaccgataccttgaaataggtttccacaggtgttgccccaagcgccagcgaagcgtcctcgtattcctttggtactgcttcaagggctgacattgaaaccttgataatcgacggaagtatcataaccgcaagtacgattatcgctgccagaagtcctgctccgtcgggaatgttaaatacctttcttattcccggtacaagcaccagcatacctacaaggccgtatactacagacggtattcccgccagcagacttactgccgactctattaccgcctttacctttgcaggcgctattttggcaagatatactgatgtgagaaatcctattggaactcccaccagtatcgctcccgctgtaccgtatatgcttgtcagtataaacggcagtattccgtatgacggctctgctgcggtagatgcccacgtctttccaaacagaaaatctataatccctattttgccgatagcaggtattcccgaaattatcagatatactgatataagcagtacaaaacctacagttataaggcccaggacaagaaaaattccatgtataatattttcaaataaacgtttcctgttattcatatcgttttcctctcaatggcaaaattgacggctttgtgcaagccgtctgctttgctttgttactgcggtacaactgcgccggcctgttcaattatgcctgctgcgtcaggtgatgtaacgaagtcgaagaacttctgcgctgtttctgataagtctgttccctcttttgttaccagtacgaaaggtctctgtacaacatagcttccgtctttaactgcagcctctgtaggttctactccgtctactgcaactgccttaacgctgtcctgaagtgctgccagtgaagcatatcctattgcatcagggttctgtcctactgtagtgattacatcgcctgttgatgtaagctcctgattgtatttgcatttgtcttcagttcctgtgatgctttcaaagccgtctcttgtgccgcttcctgcctcacgaccgataagtacgatttccgcatcatttccgccgacatctttccagtttgtgatttcgcctgtgtaaatcttagcgatgtcctcagttgaaaggtctgtaacagggttgtcaggatttactactactgcgataccgtcaattgccaggattgtttccttaagtccgcctgctttttcttcatctgtaaggcttctgcttgaaagtcctatgtcgcagcgaccctctgaaactgctgtgatacctgagcctgagcctgtagggttgtatgtgaatgttactccgtcatttgcttccataaaggactcgcctaaagctccgattaccttttccattgatgttgaaccgtctgttgaaactgttcctcctgcgctgctgtttccgcagcctgtaaaaattgctgctgcaagtgcaattacaagtgcaatgcttaaaatcttcttcataataaactctcctttcagttactttgtttttttctcttttcatcttacagttattatgataaacatctaatgtaaaatgaaaaagaaacctaatgtaaaatgtatgtcaaatttcaaaaagacaaaaaaagaccctgcccggctgttttccacccggacagagccatactgtcacttctatattacctgttcttcaaattcctctctcattcgcgccagcacccgtttttctattctggacacctgcacctgcgacactcctatgacctttgccgtctggtcctgtgtcatatccctgaaataccttaaaacaattacctgcctttctctaaggggcaggctgccgattatacccttgagctgaataatgtctatgttcttttcttcctcatgcgcataggcctcgcatatgtcctcaggtctgttttcattgtcaaggctctctatgtttacaagcgcatcctctgcctcctgcatttgcagaatatattcacagcttgtccccatacgctccgcaagctctgtaattttaggcgacctgccctcacttcggtaaaactcctcctcttcaagcttcattctgcgtatgtcctgcttaatctgccttgaaaccttgatgcgtccgtcatctcttatgtacttccttatttcgcccataatcatcggtaccgcataggttgaaaacattacatcaaactctgtgttaaacctctccacagcctttataaggcctatgaagcctatctgcacaagatcctcagcctcatagcccattgatgcaaatttaaaggccgcttttctgacaaggcctgtgttgtcaagtattatctgctcctttgcctgttcgtttcctttctgtgcttcttctataagtgcgtatatatcctctttagctctgggtatgtatttatcgcccaacagagtatgccaggcttttggtcataacaacttctgtcccctcaccgggctgtgaaacaacatcaatgctgtccataaagctttccataaccgtaaagcccatacctgacctttcttcaaaatctccggttgtaaacagcggtcttctggcctgctcaatgttttcaatgcctctgcccttatctgcaacctttatgtacagttttctgtcataagatattttacattcaagagttattatgcctttgggattttcttcatagccgtgcactatgcagttggttacagcctccgatactgccgtttttatctcggcaagttcttccacctccgggtccagatacagtataaaggccgcaactgcatttcttgccagcatttcatttacaggtactgatctgaagcttatttccatctcattttcataattcatatcacaccctccactctctgtataattttaaaaatgcctgccatatcaagtatttttctcatatattcactctcaccggttatatatactctgccgcccttttcgcttgctctgttgtatctgccgagtatgactcctattccggagctgtccataaactcaactctgttcatatcaaatacaatatctgtgcagcggctttcctcataggcatcatctatctgttttcttactgccgccgcgctgtgatgatctatctctccagccggcgctgcaataagggtgtttttgttcaccgtaatttttacttccataaaaaagccccctttcctctcaattatataccctgaaaaagagtatgtccctgaaagaaaaaggggtaaatcttctagttttgccgattatcaaggttttatgtcgataatctccattttttcaactgccgcctcaaccagcgcgtccacatcaagctttgactccgactcaagaattttttcaagcttaggcttggtcgccgggtgctttggtaaaaatacggtgcagcagtcctcataaggcataattgaagtttcaaatgtacctatgtccttggctttctgaatgatgtccaccttatcaagcgcgataagaggtctcattacaggcattttgactgtcgcatcggtaaccaccagagcctctgcggtctggcttgcaacctgtcctaaattctcacctgttataagcattgtgcagcctgatttctgcgcaaccttttcggctattctcatcataaatcttcttacaagaattgtggtttcctcctcaggacagttctcgactatctgctcctgtataggcagaagatttattacgttcattttaaatctgccgcagtactgggcaataatacgcgcaagatcctcaaccttttcctgcgctctctggcttgtataaggatatgaatgaaaatgcacagcctctataagcataccgcgctttgccatcatccacgcagctacaggtgagtctatgccacctgaaagcaataccatgcccttaccgttggttcccagaggaagtcctccaaatcccgatattttctgttcaaatacataggatttgtctttgcggagatcaacaaacagaacgcagtcgggattgtgcacatccactttgagcaccttgcagcccacaagcacctttgcgcctataattctggcaatctccggtgatttgacagggaagttcttgtccgctctcttggcgtcaaccttgaaagttttaattccttttttctctatgagatccatcataagggcaactgccgcatctcctattgagttaagctccgactcacattcaagagcagggcttattgatgcaacgccgaacacctttgaaatctcccctataatcatttcggggtcgtgttttttgtcggctcttacgaatataagtccctcgtgtctgtaggcttcaacattgtcaaatttcttcagcagctttttaattctgtttacaagcattttttcaaagtacggcttgttcattcccttgagggcaacctcaccgcatcttacaataaatatgttctgttcattcatcttgaaattctcctatctgaaagttcccagtctgcgaaaacgcttaactatagccgtaaggttttcgagaacatagtccatttcctctatggtattaaactcactgaagctaaatctcagtgttccctcgatttctctgtctgtaagacctattgccttgagcacatggctctgtccgtgtttgtttgaggagcaggctgagcctgtcgatacatatatgccgcagtcctcaagcatatgaagaagcacttctcctctggtgcccggaaaagaaatattaagcactgacggacagccgtcctccggactgtttaccttaatatcggaaatgctgcctctgatgccctcaagcagatgcgctcttgcggctttcatattatcggtccttgttttcatattggtatatgaaatatccgccgccactccaaaacccgcaatagcaggaacattttcggtgcctgacctcatatttttttcctgtccgccacccattatatacggactgacatttacgcctttgcagacatatatcgctcctatgcctttaggaccgtgtattttgtggccgcttacggaaatcatatcaatatccgtaccgcctgcattgatatccaccttgccgtatgactgaaccgcatcggaatgaaaaagcgcattgcccttgagctttgatatttcggctatggggttgatgctgccaagctcattgttgacatgcataacggatataaggattgtgttgtcgtttatctcacttcttaactgctcaaggtctatgcagcccttgctgtcaacatcaatatataccacttcaaatccctgtttctccatgtaggcgcagggctcaagcaccgcagggtgctctgtctttgtggttataattctgtttcccgctctccttctggcctgcgccccttttataattgccatattgtcggcttccgtaccgcctgatgtaaaatatatttcaccggcaggcgctccgaggccttttgcaaccgctgctcttgcttccttgacagctttctctgcattaagaccaagcccgtgtagcgatgacgggttgccataatcctctgtcatataaagaactgccctgtccactgcctcacgatacggtttggttgtggaactgttatctaaatatactatcatactttcctctttaaaaacttaaagggcagtcttgctgcccctagtctgttattttgcatagtctgtagctcttgtttctctcagaacatttactttaatctgtcccggatattcaagctctgattcgatttttttggaaatctctcttgctaagaatacgatttcctcgtcattaacctcgtcaggtttggcgataactctgatttctctgccggcctgtatagcaaatgacttgtcaactcccggagttgtatttgcaatatcctcaagcttttcgagtctctgaatatatgtttcaagagtttctcttcttgctcccggtcttgcagctgataatgcgtctgctgccgctactaaaacagcttccatagtctttggctcataatcgccgtgatgagctgccatgccgtctattaccgcctgtgactccttgtacttcttgagaagctccataccgagatctacgtgagtaccttctttttcgtggtctacggctttgcctatgtcgtgaagaagtcctgcgcgtttggcaagccttgtgtcaagaccaagctctcctgccataagtccggcaaggtgcgcaacctcgattgaatgtttcagtacattctgtccgtatgaagttctgtatttgagtctgcccagcatttttacaagctcagggtgaagattgtgtataccaacctcgaatgtagcctgctcgccggcgtccttgataatagcgtttacttctttttgcgccttttcgactgtttcttctattcttgcagggtgaattctaccgtcaacaatcagcttggaaagagtaattcttgcgacctctcttctgacagggtcaaaacctgaaagaataactgcctcaggtgtatcatcaataatgaggtctatacctgtcagagtttcgattgctctgatgttacgtccctctctgcctataattctgcccttcatctcatcgttaggcagcggcactaccgataccgtactctctgcaacgtggtccgccgcgcatctctgtatggcacctgtaatgatttccttggctttcttgtcagcctcctcttttgctttggcctctatgtccttaatcatcacagaagcctcgtgtctgatttctttttcggtattggcaagaagtatctcctttgcctcatctacagagtagccggagattttttcaagctcggccatttctctctcaatgactttatcaagttccttgcccttttcgataaggttgttttccttattagtaatgctttcttcttttctttcgatgttttcaacctttttgtcgatgtagtcttccttctgatttaatctcttttcctgacgctgaagctcccctcttctttcgcgaacgtccctttctgcttcgctacgcattctgtggatttcttcctttgcctcaagggtcatttcttttttaattgtttctgccttattctcggcatctaatactagatttctggcttttgtttcagcacttcctattgtcttttcagcaatgttttttcttagtatataaccaactaataaaccaatggcaagggcaagaataccaacgatgatagcgacaataatcactgtcttcattgaagccctcctcttatctttatgttctaatataatcaattaatctctgtaaatcgctatactatttacagaaaaagtcgcattacaataattaaatcttgatatatattgacaatgtatattataatggttaagttaatagtagtcaagcaagaaggggataaggaatgaattattttcgcacgcttttaaaaaatgcagacaaaacgctgcttatactgccggttatattcgcagtaataagtatactgatgataagcagcacatattatgacaacggctttgtactttcaaagtcggtaattgtacaggcggcggcatatgttctgggattcatatgcatgtttttcctgatgtatatagactatcagttctttacaactattgagaagcctctatatataggctccatactgtttctgcttacggtatatattccggggctgggctatgagcagttcggagcgaggtcatggattaatctggggttcacaactttccagccgtccgagatagtcaagattacatttgtgcttctgtttgcaatgtatctggcaagaaacaggcagtccatgcagtatttcaagggcttcatcaaggcgtttctgtatgcggcgccgtttattgcaatcattgccaaggaggatatgggttcaggacttgtattctgttccatatggatactgatggtgttcttcggaggcatagattacaaaatcctgtacaggacagctctcgcatttatagtttcgctgccgatactgttcaggttccttgacgattatcagaaacagagaattacggctttcctgcatcctgatgatacaagcatagaggcgacctatcaggtattgcaggcaaagacggcaataggctccggcggatttttcggcaagggtctgtttcagggcgatctcaaaaccctcgacttcctgccggttcagacatctgatttcatatatgctgtaatatgtgaggaattcggtttcctcggaggctttgcagtgatatgtctttatgccgtatttatctacagaacagctctgacctgtcatctggcgggagatttgtacagcggacttatcgttgcgggatttctcggaatgttcgtattccagatatttgagaacataggtatgacaatgggcgtaatgcctgtaacaggcatcacacttccgtttatatcctacggaggctcgtccattgtgtcaaatatgatggctctggggctgatactcaatgtaaatgtcagaagcaatttatataactattaaaaaatcgcccttgcggcgattttactttggaggtaattatgtacgatacagtaatatttgatatggacggcacacttttagatactctcgacgatctgacttctgccgtaaatcatactctggagcagtataactacccggttcacacaaaggaagaagttcgctcgtttataggaaacggcatcagcagacttatgaagaatgccacaccggacgacatagacgatgaaacctttgacagagtgtttcactcattcaaggaatactacacagcccacccggttatacacacagagcctttttcaggtattttgcctatgctcaaaaccctgcagcagaagggcataaaaacagccatagtatcaaacaagaatattgaagccgtaaaggctcttaataaccactttttcagtgactatatcagaatcgccataggtgaaaaggacggcataagaagaaagccttacccggacactctgtttgaggctatgaggcttttagacgcaggtaaaactctctatgttggggactctgttgtagacaagcagacagcagacaatgcagacgttgactgcgtacttgtacgctggggctacggcattgacatcgacagcctgcacccggccgctataatagatagacccgatgagcttttagatatactgtaagaaatcaaaaaccacggtgatgattttctctttcactgtggtttctttataagtttcaatttctattgtttcattaattacaactataaaacatacttaacaattatcttttattagtcagtcccaaaatatagtctgttgatgtgttgtaaaatattgcaagttttatcaaaatatcagtcggtatatctaaatccccgcgttcataattgctatatacccgctgcgaacatgaaagaatttcacccatttctcgttgagttaagtccttatcttcacgcaaatctctaatcctaggatacataatcggcactcctcttattatatataggtcgagtttatcacgagaaaatctttcttattgacttttagcggattttccgctaaactttaactgcatatatccactttaaatttaggaggttttcataatggataaaacatatcaaagctatttttttaatttaatagacgtgcttatagactggaagaacaactataaaggactcgaacaatcgtctatttctgtttcctttattccacaagaacaaataaaaagcatcttagtaattggctatattcgtgatagtgaaagagagactaaagaaacaattgcacttgcgaaacaattccctgatagtaaagatggaaagtatataaacaaccttttggattggtttgatttaggtgatccatataggccatatgataatagctcaaatgctttttatcaaaaatgtggtgctttcgcttctgataacgacctgttatccgcaatgaccgaattggaaatgagatgtaaagaaaaatacccgaatgtaaatatagattttcatatgccacaaaaaacttctaaaggctgttatattgccactgcggtatatggttcatataattgtcctcaattgtgggttcttagaagatttagagatgagaaactatcaaaaaattatttaggaaagctatttataagattctattataagacaagcccatatcttgtcaagcgtttcggaaactgcaaaatttttaataccatattcaaaactattcttgataaatatgtggtgtttttaaagaaaaacggaatcaacgattcttattatactgattagtaactgactattgcttaataaaatttatatcaatttttaataggaggagtataaaatgtctagaaaatgcaccgactgtgtttattgtgataatgattggaaagacggaaaaacatactgtaaaaaatggagatgctgggttaaattatctgaagcggaatcatgcaaagattttgaagttgatgagggcaattccggttgctatcttaccactgcctgtgtaaaatcaaaaggattatctgatgattgtattgaattatcaacgctccgtaagttcagagatgaatatattttaaatttggaaaacggagaaaaagatataaaagaatactatgatacggctccttatattgttaatgcaataaatagcagcgataactgtaatgatgtgtacaacaaattatattcagaagtaatactgccttgcgtaaaccttattaacaataaaaattataaagaagcatatataaaatataagaatatggttagattattagaaaagaaatactgttaataccatacgccataaaattactctaaaaaacaattaaaaaatagagtagaaattttttaactggaagattattgacaacctgcacccgaccgctataatagatacgcccgatgagcttctggatctgctgtaaattttaaatatatcacaaaaatttaatatatatgttttccattttgtcaagccctctaaaatattggaattttaataggtaaatcattacaaatttattttataaaaggaattgacggtaaaaacagggtgtagtaaaatagtatcatagaaaaattctaaaaacgcacagataagccgtttaggctgaattaagtttcagcttaagcggttttttattgtgcgttttttgctttcagcaaatcaaaaaataggaggtaaaacagatggaagcagaaaaagcaaaagtaaacagagaatttaaagacggtatgttcagaactctctttaacgacaaagagaaaatgctggagctctacaacgcggtaagtgag

SEQ ID NO: 2966 - DNA, 5566 bp, Unknown
  16S sequences of unknown bacteria
tccagccgatcttgtccggcatcctgacgatgaccgcgctgtattcggtcaacctgcggatccagggcggcctgcccaatgtctcgctgtttggcagagagacgatcttcactcaggcgcaggagatcttcggcagagaggctgcttcgatgatcgtcatcgtgggcatgctcaccgccgtggccgtgatcctctatctgttcttgcatacgcagctgggcatgggcatgcgggcgaccggctctaatgaagcaatggttcgtgcgtccagcatcagcgcggaccggatgaagatcctggggctggcactggcaaacggcatcatcgccttggccggcggcttgctcgcacaatatcagtcgtttgcggatgtgaacagctccaccggcaagatggtgctcggtctggcatccatcatcgtgggagaagccttcttcggacaccgcacgatcctgcgcagcttcatcagcgtgatcgtcggctccatcatctaccgctttctgcttacgtttgcgctgcagttcggcctgagcgcaagcgatctgaatttgttttcggccgcattggtcgctatcgcgatctcgctgccgttcttgaagaaacggaggaaaccttatgctcgatcttaatgatgtcagtgtgacgttccatgcggggacggtcaatgaacgcaaggcgctcgatcatgtgtcgctgcatcttgatcggggcgagtttgtctgtgtgctgggcaccaacggcgcgggaaagagcacgctgctcaatgccgtcagcggcacgctgagcgcagacagcggcacgatcacgctggatggcatggatctgacgcgtcagccggagcacaaacgtgcccgctatatcggccgcctctttcaggatccgatgaaggggaccgccccggacatgagcatcgtggaaaacctcggcctggcttattcccgggggaagcggatgacgctgagccgcgccattcagaagaaggaccgccagctgttccatgatcgcctcagccagcttggcctgggcctggaggatcgcatgaaccagccggtcggcttgctttccggcggacagcgccaggcgctgacgctgctgatggccaccatcgtgacgccgaagcttctgcttctggatgagcatacggctgcattggatcccaataccgctgcgcaggtgatgaagctcaccgatcagatcattcacgagaatcagatcacgacgctgatgatcacccataacctgcgtcaggcgctggaatatgggacaaagacgctgatcatgaacgagggcaagatcgtcagggtgctggaaggcgaagaaaaaaagcagacctcggtggaggaactgcttcagatgtatgactttgtatgaggaccgggatgcggaaatatgtcccggtctttttaaatgacgcccaagtgctgtaagccaagcaggatgccgtcttcatccgtggccgtggtcacgtgatcggccatcgccttgatctctggcacggcattgcccatcgcgacgcggaagccgcatgactccatcatctcgatgtcgttgtaattgtccccgaagcaggcgcactgcgatttgggaagatccagcagagagagcagcctgcggatgccgctgcccttgttcacgccctgtggagcaacatcgaacccatattcagaaaactggcggaacgacagcgtgctgtgctgagcgaacgccttgatcctttcaggatcggcatggatgctggcgcactgaggcagctccaggtaatggcggtcttgttccgggtgaaagatgaacggctcgctgccgatgtcagagttcatctgtccctgcagccagtctaccttctcagggtgctggtaaatgtacatatgctggggaaacttgaagacgagaccagcttcctcttgccgagcaaactcgagcagctggcagcattccgcaaagggcatgtcctcatgatagagcatattgccctcgctgtccacgatgacgccgccgctgtcggcgatgatgtaatctgcgcgcagatcgttgagcgccttgcccatcccataatgtgcccgtccgcttgcgatggcaaagcggatcttgttgcgtttcagctgacggatcgcctttgtgcagctctgcgggatgcagtggctcttcaggtcatacagcgtgccgtccacatcgaaaataatcagtttcagctccatgtcgtcacttcctttgctaacatcatatcagaaattaccggaaagaaaagagcgagcagtgggaattgtgcagatcatgatgacggatgtcatacgaaaaatcagaagatcacgacgtttttttctgcttctgcatcaggatgatgaaaaaaatgatgacatttgtcatgagacaactgacgatggtcaagaaaagcactgacagatttcagtttcactgagcgcagtgcttttttataatgtaaccgtattcagaaagggtgagagagatgagcgcatatgtattgatggtttctcatggcggatttgcggaagggctgtgcgacacgctgcacatgtttgcgggaaacagtgagggaatcatgagcatcggactgcgtgatggcgagtcagtggaacgattcaggctgcgtgcacagaccctgatcgctcagcttgatcaacaagatgagctgctcgtgctggctgatctgatcggcggttctccgttgacgacggtgctggatgtgctgcaggaaaaaggaatgctcacaaataccgctgtgttgggcggaatgaacctgccgatggcgctgaacgccgtcctgtgcaaggatcagggcattcgggagatgaagcagatgatcctgcaggaagcaacagcgtcgatcactgagatgacattgcaaaacgaagaagaggaagacatttgatcaaaggaggaaaagaacatgtcaatatcatttatccgcgtggatgaccgtatgatccacggacagacttgtacgagatgggcattggagtacccgtgtgacggcatcgtggctgtcaatgatgccgctgcaaacaatagcgtgctgaaggcggcatataagagcgcaagcggcaaaaagacattcgtctggacgatggcggattgggagaaaaagtgtcaaaaggtgctggattctgatactcgttatttcctgatcacgaagaatccgatcgatatgaagaagatcctggtcgatcagcgttttacctgcggggtgaagaaagtgatcatcggtccgtgcaatgatcgccctgatgcggtcaagctgggcaataatcagtccattacgcaagcagaagctgatgcattagaggaaattgccaaggctggctatgaaatagagttccgtttgatcccagatgaaggcatcggcagctggaataagttcaaagagcagttcggctactgagagaagaagggggaatgatcatggagatcaatgtgttgcaggcagctctgctagggttctttgcctgcctggccagcatgcccggcatgggcggctcggccatcggaaactatacgctgggacggccgctggtcggcgggctcatctgtgggctgatccttggcgatgtacgtaccggtatcctggtcggggcagcgatgcagctgctgtatatcgcgctggttaccccgggcggaacggtcagcgctgatgtgcgcgcggtcagttacatcggcatcccgctggcgatgctggcgctgaacagctatggcatggatgcggccaatgcggatggcatcggcttagctacttcttttggggccatggtcggtacattaggcacagtgctgttctatggcacggcaacgatgaatctgatctggcagcacatcggctggaaggctgtcgatgaaggtaagttccataagctgtatctggtcgatatgggactgccttggatctcacacctggtttgttctttcttgccgacctttatcatctgcctggtcggcgcagatatggtcgaactgatcaagacagctttgccgatggatggtatcccgatgaagaccatcttcacggtcggttcgctcctgccatgtgtgggaatcgcgatcctgcttaagcagatcattgccaaaggaacagatttcatcccgttttttgtcggctttgccttagctgccgcgctgggcatcaatttggtcgtgaccacgatcatcgctgcgatgttcgcttatcttagctatcagatcaagcttgcacagatgaacagggtgagcatatctagtgatgccgatgacgaggaggatatctaagatgaagaaattgtcaaaaaagacgctgaacaaagcgttccgtaactggtattatggacatctgacatgtttctcgcaggagcatatgcagacattcggatatctgtgtgcgatgctgccggtcattgaggaactgtatgatacgaaagaggaacagaaagaagcgctggaaacgtataaggcctttttcaataccgaaccgcagctggggacgatcattgtaggcgtaacggtcggcctggaagaagcccgcgctaatcaggagggtgtggacagcgatacgatcaacggtctgcgtgccgggctgatgggaccgatcgcaggtatcggcgactcactggtggtcggcgtgctcattccgctgctgctgggcattgcgcttggtctgtctaccggcggctctccggtaggtgcggtcttctatatcatcgcttggaatgtgatcatcaccctgggcatgcggctgttgtttttcaagggatatgagctcggcggcaaagcggtcgagttcctgaccggagaaaagtcgcaggcactcagagaaagcatcatgatgctgggaagcatggtcatcggcgctgtggcagcgacctgggtgagcgtgaagaccgtattcgagatgagcaatccggataccggcgaagtattcctgaatttgaatgatcagatcaactcagtgttgccgcaaggactgaccgccatcttcgtcctattatgctggtttctgatcgccaagaagaagatgtctccgctgaaagtgatgcttctgcttgtcgtgatcgcctttgtcggcgtattgatcggattcttcgatccgcagctcacgtattgagatcatgaacaggcagcagctcagacaggaagcgcagatgcagaagatcctgtggaacaggctgaagcagtggctgcgcatgtccatggcgctctcctccctgctggtagccggcatctatgcggcatttcagacagcgtttcccggcgttgccgcggtgcgtgtccttctgttcgtgctgctggctgcggactgtatctggatgctggcagtgacacgatcgctgcggcatgggagagagaatatcgaaaagctcttgaagctggcagaacaaagctgaagcggtcttttcgtaaatcaaacgatttgcgaaaagaccttttcccattgaaaagctttgatataatgaaagaaagaaatggagtgcgaaaaggatgaaaagatacccggtcgaactgtcgatcctggcgttgaccctgctgctggggctgatcggatgtttatggctgcaccattatacggctgcaggactggtctgcg

SEQ ID NO: 2967 - DNA, 9058 bp, Unknown
  16S sequences of unknown bacteria
aagaagtcctctgtgagcagcgcgcgcgtcgtgagctcctcgtagcagcgcggggacccgatacccgggcggtccttgttgttctcgtagaagcgctcgagattgcgcgcctcgatgcgaaaatcgagctcgtcgcgcgacgtgcgcacaagctcgtcgacgagctgcttgaacgagatcttgccctcgctgggcgaaagcagatcatagagctcgacgatgcgttccatgatcgagaggtcgtctgtgacttgctcgaccacgccgggacgttgcaccttgacggccacgacctgcttcgagtccttgataacagcgcggtgcacctgggcaatggaggcggaaccgacgggcgtgtcgtcgaattcgtcgaacagctcgtcgacgggcttgcccagctcgccttcaatctgctttttgacgatcgcggcatcgagcggctttgcatgtgccctgagctggccgaaggcatcgcagtactcgcgaggcaagacgtcggggtgcgtcgaggcgatctggccgagcttgacgaaggtggtgccgaggtcctcgaggagcgccaccgcctcgtcgggtgtgatgccatctcggacgtggtacttcctgagcacctcgagaatctcgagaaagcgcttgctcgtatgctcgtccttgtcgcggttgcgagcgcgtgccagacgcatgagcgtttcgaacgacggcatggtttcctcccctgcatgcgtgtttggctcgattgtactcgcgcctggacattcgcggcgccgaaggtatcaaaatgaacacgaaaaccaggcggccgcgacacccgcggcggcatactatgatgcaaagcgagtaacctgaatattgtgccgacaaaggaggttgccatgggttcctacgagcacgagatgcagctcatagccgcaggtcaggcgacacgcggatacactgccaaacagtacttcgcagagctcgacgcggggctgtccgaagaggcgagcgcgctcaagcaccgccccgactacacgaagacgcttttcgcgcctgaaaacgacgacatctaccaggagttctgcaggtacgtcgacctgcctgcgccgcgctacttcgacgcggtcgagaaccccctgaacatcgacggctacacggcagccgacgtctaccgcaagatgaaaggcggaaacgaccgcatcgtcgaaatcgacggtgccgccgtctacaacatgctcgtcaagctgcgccgtcagcccgagattgcccaccgcgtgctcgacttcaagccgacctgctatcagggcggttgcggcatgaaggacgccgccttcgaccgcggctattacgacgacaaggaatccgcgctcgacatcgcccgcgcacggtagccgcacgggcagccacacgcaaagaaaggcaaagcatgcaaggaaaacgcaccggtaggcaaatcgccctgctcgtcttcggaatcgtgatgatcgtctactccctcatcacggcggcaagctcgtttgcactgcttggcacgaacggactcgtcctcaccttcggcatcatggaccccacgaccatcgtcctcatgaaggcggggcatgcggggctcgtcagggcggcgggcatcctgctgctcgtttcgggggtcgccggcatcgcgcagggcaccctcggcatcatcgcctccaaagagccatccaggctcgacgcgttcgcgaaagtcgccatcgcgatgatcgtgctgctggctgcctcgctcgtgtgcacggcgctcgtgagcggcgaccttaccttgccaatcatcggcatcgtgctgagcgcctttgggatctggctctcgagagagctcaagaaagacgctgccagcgcgcagcagcactagcgtgagaaagaagggtcgatgagcaagaagcttcgcgagtacctgcgcgaccagatcgtggtcttcgatatcgacggcgtactctccgtctacgaattcggcgagctgtcccatacggcagacgtgtgggaggaggccttcgtctccgagcacgacaacccctattgcggcatcgctcccctgccggcgctgcaggaattcgtcgccagcatgccatcggaacacgtctacgtctgctcggtggcagacgactacgaggcgcaggcgaaacgcgacttcgtcgcacgcaactatcccagcatccccgcagaccatgtcttccttgtggctaccaagcccggcaagctcgaggtgctcacctcgcttgccgcacagcaccccgcgatgcgcgtcgcgattgtcgacgacacggtcaagacgctcgacgcgatacacgcgcaagaacccagccttctcacggtgcacgtgacctcgtttttcgactagcacaagcaagaggggctccggtatcctgaacccctctggtgaatcgggaggaattgcagctcgcgggccctacagctcgaccgtgtactccgcgacggcgtcttcgttgagcgtgacgcccaaccctggcttgtcggacggatacacgcgcccgtcgtgcatgtcgatcttctcgttgatgagcgaggcgcgcgggttgtcgaagtccatgaactcgcacgggtagctgatggtcttgaagccgcaccccatgtggatgatggccatggcgccaagtgcgctttcggactgagagccgatcatcatgggacggtgaaacgcctcgcacagcgcggcgatcttgcgcccgtaggtaaagccgctgcgggggatcttgatcatgaggatcgagcaggcgtcgatgtcgatctgatgcgcgatgtcgtagatggtgaagttgctctcgtcgcccgtgatggggatgtcgatggaatgcgcgaagcggacgcgatcgcgctcgttcgtgtcggcaatgggctcctcaaagtagtcgagcttgccggcgagcgcgtctgccactttcttgccgccaaagtacgtgtagctcatgttgccgtctatgtagagcttggtgtcgggcgtcaccacctcgcgcagggcctccacgcgcgcgatgtcctcgtccggattgaggccccctttgaccttgaacgccttgtagccgcgttcgttgagctctttcgcctgctcgagcatctcgtccatcgcgcccatccacaagatcctgctcggctcgatcgagtcgcggtagccgccaaacagcttgtaaagcggcatgccgagcttcttgccgatcgcatcccagatggcgacgtcaatacccccttttgccgccaggttctgtttgatgtaggccatcttctcgtggatcttctcgagatcgaagcagtcgagcccctcgatgagcggggcgagcatcgtgttgatgacgaacaccatgcccggctgcgtctcgccgtagatgtgctcgcgcgggatggcctcggcaatgccctcgatgccctcatcggtctgcacgcgcactagcacgtgcgcctggcaggtcatgttgcccgttgcccatttgaccggtttggcaagcggcaggctcaccggcgttgcatgcactctctcgatcttcatgtgaatcacactccctgttctttcctgcgttgctcccctgcgcccgcgcgacgcgtcagctctgctcccacatatgcacgctcatgtcgagcggcttggcgaaatgcagacacgtcgtggcaagaccgtccactcccgtggccgcataggctgccgcattctccagattgacgccgccggcagcgatgagcgtgacctgcgggttgattcccttcagctccggcacgaggcgctcgacctcggcaacgggcaccttgtcgagctgtatgccgtccacgcctgcacgaaccagccgagcggcatcttgcgcctccgcctcgacaaagaccttcttctcgcagcagcgcgccttgatttcgggaagtcgctccacgagaccgtcgatcccgcccatgaactcgaggtggtggtcgaagacgagcaccgtttccgacaggccgagacggtgcgggaaggcaccgcccgtcaagatggccttgaggtcgaggggcttggtgcccggcatgctcttgcgcgtggtgagcacttcgcaacgcgggtttgccgcgtgtaccgcatcgaccatctttcgcgtcttggtcgaaagcgcgcagtagtactcgaagatgttcaggcacaccttccaccccatgtgcagcaccgacgcgggcgccgtcacccacatgaagctctggccagccgcaagccgcgtgcccgagggctcgaactcgatgtcgtctgccccgagcatccggtagatccgagccgcctcctcggtaccgaccagcacggcatcgtcgcgcgtgtagtactcgatcttgccgagcttgtcccctatccccaagacgtgcgtcgtcaaatcgacgctgggcacgtcatcacggatgagctgttcgagatagctgtcgggaatgaacatataccgttcctccaaaggtcttcgtcacgctcgattgcacctgtgttccagtgtattcctctcacgagcacgcgcgggcaagtccgggaaattggctcgcatcagaatcgtgatgatgctcgagaagcctatcgacgtcagaagaacaaagcgtgacctgtagcgtattcagggctttaaactgctgtttcatgatgtatgacacctgtgcacagcgtcgaaactactgaacagttcttaacttgtgttcttttatcgtcatatgtatgcgattgggtatgttaattgcccactaaattggatgtaatctgttcaagagaactcatatggtcaaggagcgtctatgcagatatcacagaagaccatcttggaaatgctcgagcgtgagcatgtgcgctacgcaatccccctctaccagaggagctacgcctggagacggacccaggcagccgacctgcttgatgaccttgcccgggcgggagcacttggcaaggcgcacttcctcggcacgtttttgtacaactcggagcccactgaagctggagctgagcttcgcgtcgtcattgacggacagcaacgcatcaccacagtctcgctgctcgtggcagcgcttgcaaaccacctcgacggacagggtggccacccctcctcaacgctgccatccgctcagcagctgcgcacccgcttcctgcaggtgcacgacccgaatacgccccttcagccaaagctgcggtcgggcgaagccgacaatgcgaccttctccgcgctcgcgctgcaagaacccctgcccagcaatccttccgagaagatcctcgaggtgtatcggtatttcgaacagcgcctgaaggacacggggctcgacctcgcgcaggtctgggcaggcctttctgcggcgtacctgatatgcgcccaggcagacgccgtagaccacacgcagctcatcttcgaaagcctcaactcgaagggcaagcccctcacgcttgcagacctcgtgcgaaactacctgctcatcgccaagtcgcatgacgagcaggcgcgcctctaccacgagtactgggctccaatcacagggatgttccagcccgacccgggtacgaaaaagctcgacaacgcgatctgggcgtggaccaacctgcgcttcaggaaggcgaacgcgcacacgcccggtgccgcgtactccctgctcaagcgctatgcagaagacgagtacacgggcacgctcgaagacctgctcgaagagctgcggggtttctgcctcatgtgggccgagaactaccgctatcacgctgtgaaaaagttcaagtcgtcgttcgattgggcgaaaaacgggcccaagaccctcgtgagcgacagggccgtcaagcctgcatcgcatgaggggtcaatgtctgccgcagatatcgcagaccaagtcgacgagagatggtaggaggcagattcatatgaaggcaacgcaaaccaggctcatcgagttcgtctcccagccagacacgcgcttctccatccccgtgttccagcgcgcctacgtctgggacggaaaagactgcgataccctttggcatgatgtcatcaccgcaggccaaaacgatgccgagcattttatcggaaccatcttgtacctgcaggacgagcaggctgcccaacaggcacgggcagcaggcgtcgaggccgcgccgcaggtgctggacgtcatcgacgggcagcagcgcctcaccacggtcacgctcatgctcgctgccctgcgcaacacgctcgttcaggagacgggcccggacgaggcgacggcagggaagatcgaggcgaagtacctccgcgtgaacggagactaccggctggcgctctctgagtacgaccggcagacgctcttcgacatcgtagacggcatcactcccccgcttcccgtgaaagacgaggacgccggggcagatgccttcgaagactacgaggggtcggtcgccgttgccgcgaactaccattacttcgcgagcaagatggccgcggacggctttgacgcgcagacgctgctgcgcggactggaaaacctcgtcatcatctcggcagaactcgaggagggcgacgccgcccagcaggtcttcgagagcctcaatgcaaagggcatgccgctcacgacgggcgacctcgtcaagaactgcctgatggcagacgtccccttcgcgatgcagtccaggttcttctccgaatactggaagcccattcaaaccgcctttggcgatgacgacacggggcttgccgcggcgctgcacggctggctcgccctccatgcgcgccacctcaagatccactcgaaagacgaggtctacggcgcgttcaggacctatgcggcaacagtcgcaccgggcgagcgcgagcagatgctcggcagcctcaagacgtttaccctggccttccacgaccggggaggcggagcgcccgcgcaatgggagcgcaagatcgaagacgggaagaccgtggggagcaagcgcctgttcgggcgcgcgtaaagatcgaccggacacgacggcggcttcccagcgccgaatcccgttcacaagacacgacgaggggccagcacctgtgcaagtgctggcccctcgcgattgtctgaagtcctacttaccgaacatcgcgctcagtgccggaatcagtgcctccgcgtcactgccagacggcgcaaagccgccagcagcacctatgagccccaaaaggcccatgaccacaaacagagccgctgccacggcgccgattatcgcgatgagaatcacgataatgaagacgacgggcgaatcctccattcttgctccttgtcgttatccctatagagagacgtgccatcgcatcttccccaagacgcgatggcatgaattataccgttatcgatatagagcaaggtcgaggaaattgaaaatcaccgattattacaaccgttcggcgaggtcgtagatcagccgcaccgtcttgttccatccgatgcaggcatcggtgatcgacttgccgtacacgcctccgtcaacgggttggttgccgtcctcgagatagctctccaccatgaagccgcgaatgatcttggcaatggagctattgcgacggcagctctccaagacgtccttgcagatgcgaggctgctcgaaggggcgcttgcccgaattgtcgtggttgcagtcgatgatgacggcagggttctcgtacacgccgttcaggtagacctcggccagacgctccaggtactcgtagtggtagttggggtacatgatgttgtcgagcccccgatagccgcgcaggaccgcgtgcgcaagcggatttcccgtcgaggtgacgtcccagttgcggtagatgaagtcctggctttgctgcgccgcgtagatggcgttgagcatgacggcagtagagccgcccgtcgggttcttcatgccgacgggcacctcgacgccgctggctacttgccggtggtcttggttctcgaccgagcgcgcgccgatggcgacgtaggcgagcaggtcgaacaagaagcgatagttgtcgggatagagcatctcgtcggccgtgaacatgcccgtctcctcgatgacgcgcaggtgcatatggcgaatcgccttgatgcccgcgagcaggtcggtaccgccctcggggttgggctgatgcagcagccccttgtagcccgtgcccttggtgcgcggcttgttcgtgtaaacgcgcgggatgatgatgagcttctcgctgacctcgtcgcgcacctttgcaagacgcgtgacgtattcgaggaccgagtcttccctgtctgccgagcacggcccgatgatgagcagcttcttgctactcgctcccgtgatgaccgccgcgacctcggcgtcgaaggcctgcttggcctcggcgagctccggggcaagcggcatctcctcccgtatctcctggggtatgggcaaacggcgcttgaagttcatagttggcatgatctgttctcctacatgcggtgttttagatatttggcacatcaatatagcagtcgagttggactgcgcccattccgttatcagatagctggccatcgataacgcgtacggagcaaagcggtgtcggaagaccgcaagccgctccgtgtcgagcctctatcctcggctttttctattccgcaagtagatgatgaatttcctcttgacaacatgcattgcagcaggaggtgcgttagaatgcgccaagttatcacaagattagataaagaaaaggtgaaccatgtcgaagcagaccaagacgctcaagcagctgaagaaggcgggcaatctcgcaaaccgcgcattccacaagaacgggcccaagagctacaagaagggccagggcgcgctgctcaaggtcctccacgtgcacaacggcgacatgacctcgcgcgagctcgtggacgtgctcggctacagccgcgggcagctcaaggacgtggtccgcaaggcacagcgcaacgagtacgtcacgatcaccgaccacgaggacaagcgcacctacacggtgaagatcaccgagcagggcgacaaaattgccgaaaagcgctgcgccgcgcacgaaaagaccgccgcagcaatcctgtcctccctgagcgacgaggagatcgaccagctcaacgccttgaccgagaaggtcatcgtgagctgcaaggacctcggcgccca

SEQ ID NO: 2968 - DNA, 7431 bp, Unknown
  16S sequences of unknown bacteria
ggctcgctgacggctctgccgatcatcgagacccagggtggcgacgtctccgcatacatcccgacgaacgtcatttccattaccgatggccagatcttcttgcagaccgacctgttcctgcagggccagcgccccgcagtcaacgtcggcatctccgtctcccgagtcggtggctctgcacaggtcaaggctatgaagcaggttgctggtacgctgcgtctggacctcgcgtcctaccgcgagctgcaggcgttctcccagttcggttccgatctggacaaggccacccagcaagagctcaaccgcggcgctcgcatgaccgagctgctcaagcagggccgttacgcggctatggacgtcgaagaccaggtcgtcgccatcttcgcaggtgacaacggcttcctcgacgacatgccggttcgtgacacgctccgcttccgcgacggtctcgtggagtacatgcacaccgttcgtgcagacctcaagcagcgcatcgctaccgagggtgctctcaacgacgccatcaagaacgagctcatggaggccatcaccgcctttaagtcctccttcatcatcgggaagaaatagaggtagtcgatgccaaatctccgcgacattaaacgacgcatcagctcggtccaaaacaccaagcagatcacgcgcacaatggaaatggtcgcaacggcaaagatcaggcatgccactgagcgcatcgtcgccgcgacgccttacgcagaaaccatgcgcaagacgctcgccgacgttgcgtcccagtcaacctacatcgacaatccgttgcttatggagcatgaagtcaagaagaacgctcttgccattgtcatcgtgtctgatcgcgggctcgccggaggtttcaacagcaacgtgtttcgcatggttgagcactacatcgctgcgaactcgaaggctgacatcaagactgacgtgattatctgcggcaagaaggcgaacgggtatttccgttaccgccacatcgagccagtgctggcctattcggacctgtccgctgacccgactcttgcccaggcacgtgagatttcgtcttatgtccgtgcccggtatcttgagggcactgccgacgaggtaaaggttttctataaccacgcacgcaatgctgctgaccaagacctgcgtgaagagcagatcctccccatcgaggcaactgctcttgactctgagtcgagctcgcagcaggaggcagagctttccgaggaagagcagaaggttaccgctaccacggacttcgagccctcggccgaggaggttttgaaccacctgcttccgacctacgtcgggactatgatttaccacgcgttgattgattcggctgctgcagagcagggcgcccgtcgcaaggccatgaagtctgcaacggataacgcatcggacatgatcaccatgctcgaccgactctacaaccgtgtacgccagggtgccatcaccaccgagatcaccgagatcgtcggcggcgcggctgccttggaggattagatatgacagaagataaggacacatctatggcaaacgttggacgcatcgttcgcatcgttggtgctgtcgtggactgcgagtttgcggctgattccatccctgcgatctacaacgcgctgacggtggaggctgatactccagtcggtcatatttcgaccgtcctcgaggttcagatgcacctccccggcaacatggtccgtaccgttgctatgtctagcacggacggcctgcagcgcggcaccgaggtcgttgacaccggtgcacccatccagatgcctgtcggcgaggagaccctcggccgcatctggaacgtcatcggccaaccggtcgatggcaagcctgcgggcgacatcaagcagacctacccgattcaccgttcggctccgtcgttcgatgagcttatcaccaagaccgaggtcttcgagaccggcatcaaggtcatcgacctcctcgagccttacatccgcggtggtaagacgggtctgttcggcggcgcaggcgtcggcaagaccgttctgattcaggagctcatcaacaacctcgcccaggagcacaacggcacgtccgtgttcaccggcgtaggcgagcgcacccgtgagggtacggacctcttcttggagatgagcgagtctggcgttatcaacaagacctgccttgtctacggccagatgaacgagccgccaggagcacgtatgcgtgtcggcctggcaggcctgaccgtcgctgagtacttccgtgaccagggccaggacgttctgctgttcatcgacaacatcttccgcttcacccaggcgggctccgaggtttccgcactgctcggccgtatgccgtctgcagtaggctaccagcccaccctggcaacggagatgggcgacctgcaggagcgcattacctcgacctccacgggcgccattacgtccgttcaggccgtctacgttcccgctgacgacatgaccgaccctgcacctgcgacgacgttcatccacctggatgcaacgaccgttctgaaccgttccatcgccgagctgggcatctacccggcagtcgacccgctggcttccacgagccgcgcgctcgacccgatggttgtcggccaggagcactacgatgtcgccatcaaggttcaggagattctccaggcctatcaagacctgcaggacatcatcgccatccttggtatggacgagctttccgaggagcagaagctcacggtttcccgcgcgcgtaaggttcagcagttcctgggccagccgttccacgtcgcaaagcagttcaccggtgtcgatggcgtctacgtcaaggtcgaggacacggttcgctcctttaagatgatcatcgatggcgagctcgacagcgttcccgagcaggcattccgtaacaagggtgctatcgaggacgttctcgaggcagccaaggaacttgcttagaggtaggtcgatatggcactgcaatgtgaaatcgtgacccctgagagcaggatcttttccgctgaggcaaacttcgtcgtcatccccgcctccgaaggcgagatgggcgtgtacgaacagcacgagcccgtcgtgacgacgttgaaggccggcagtgtccgtgtgaccgagcacgatggcaaagagcccctgcgctacatcattgctgggggttacgcacaggtcggcgccgatcatgtcaccgttttggctgatcgtgcagctgctgccgaggagcttgacagcaccgagattcgtatccacatcgacgagatgaaggaacagcttgcagaccttaaggatgacgatccgaatgcggcgttcctgaagtcggaaatcgagtggttcgaacttgtcgtcgaactgtccgatacgatcaaataagctctacgcttccacttgattcgaaaggggccacccgtgagggtggtcccttttcatttgatttcgtgtatcgctgttccccccacgtcgaatggcgcaatccacagcggcaggggagtttggatgcagcaaaaaggcaggaggtctaagacttcctgcccttatctaatctcttgcgagctgtatgcgtggatgtgcgctgtgctacagcacgcgcgcggaaaaggcgtgttggccctcgtcgatatctgcgagctccatcggcagcagaagtcccggtgcaaggtctgtcggcacgaggaccttgtggtatgactcggaggttccgatgccgggacgctcgacgatcacctgctcgacggtacctaggcgcttgtgcatgtcctcgagcgcgagcttggcgccgagttcgcgcagcgtcttcgcgcgttcggccatgacctgcgggggaatctgatcggggcgtgcggcagcgggcgttccggcgcgcttcgagtagcggaagacgtgcaggcgcatgaagcgcgcttgctcgatgaccttgcaggtttgggcaaagtcctcgtccgtctcgcccgggaacccgacgatgacgtcggtcgagagcgcgatcgagggcacctgagccctgagctctgcgatgaggtcgagaaattcatcagcggtgtaattgcgcgccatctcgtcgagcaccttcgtggaacccgattgcaggcacaggtggagatgccggcagatgcggccatccgaggtggcaagcgccgtgatcagcgacggtttcaggctctgcggctcgattgaggagatgcgcagacgcccgattcccgtgcgctgcagcaagatctccatcaggtcggccaaatcgagcccgttgtcgtcgtaggcgcctaagtcgatgcccacgagcacgacctcgcgcgtgccggcgttggcgatgcttccgacctcgccgatgacctggcttgccggaatcgagcgtgccctgccgcgtgcgacgtgcacgatgcagtacgtgcacgcgttgttgcagccatcttggatcttgacgtccacgcgcgtgcggaagccctctcccgtgcggttgagcatcctcatggactcggcatcggtgctgagccggggtgcctgctcgaagttgagctctacgggttctgctgcgctcgtggtatctggcgcttcggtgcgcggggctggtgcatctgctgcatgcagctgctcgccctggacgagcagctgcgcggtgcggggcaacgcggtcttgtcgggctcgcagacgactgcctcgccaagctctgcgtagtggtcggaggcgatgttgatggcgcagccggtcacgatgacgtgcgcggcccccgccttgagcagtccgcggatgatcttgcggtttttcgtgtccgcctcgccggtgaccgtgcaggtgttgacgatggcgacgtcggcagactccgccgcgcactgcgtccacccggcgtcgatgagggcggcggctatggtctcggattctgcacggttaaccttgcagccgagcgtgtggatgtgaaactgcggcacgggtatgaggcgctgctatttcgcgtggttgccgagcccgccgagctcgtacatgcacagggcggtggcgacggtaccggcggtctcggtgcgcaagatcagatcgccgagcgtgacgaccttcacgtgctcgccgagcgccttgaacgcctcgacctcgttgacggaaagcccgccttcggggccgatgatgagcgcgacgcggttgtccttgcccatgtccgcgagcgcgtccgaaacggacagcgggttgttgtcggggtccttgtcggcttcttcccaggcgatgacgacgcggtcgaaatcagcgagctccctgcagatgtcttcgaggggcgtcgggtcatcgacgatgggcaggatgctgcggccggactgctttgccgcggaaagcgcgatgcggcgccagcgcgagcccttgcggccgcgctcgtcgacggcgaggcgcacgacggtgcgctccgacaagaacgggatgatgcgctgaatgccgagctcggtggtctgcctgatggtctgccccatgcgatcgcccttggagatgccctgcaccagcgtgaggttggggaggtgctcgacgggcatcttgccgagcgggcggccgacgatgccctcgttgctcacggatacgacctcgacttcccagcagttgccgcctgcggcgcacgcggcgatgtgctcgcccggctcgatgcggcggacgacgatatggtgtgcctctttatcggagaaggggagggtgacaacatcgccctgtggcatgttgctctccatgaaaaagcgcggtatcgacatacggactcccattcagcaggttcaattcgggcctattgtagcgcgattaacgtcgtgttatagtgaaaccaccaatgaagacctgctcagcgggtctttgctattcctttcatatgcaaatcccctctcgaacgtctggttcgcacatggcgtgttttcaatcggataactcggatgatgaagcatatgggcatcaatcgttgagaaagaaggaacaatgaaattcttcctggataccgccgatctttccgagatcgaagaggtcgcttcgtggggtgcgcttgccggcgtcaccacgaacccgagcctgtatgcgcgtacgggtggcaagctcgaggacttcgaggggcacctcaagaagatctgcgacttggtcgacgggccggtcagcggcgaggtcacggcggaagaccgtgacggtatggtcgagcaagggcgcaagctcgcggcgctggcagacaacatggtcgtcaagatccccgtctgcgtcgagggccttgccgcgacccgcacgctttcgagcgagggcatcgacgtcaacatgacgctcgtcttcagcgtcccgcaggcgctgctcgccgcacgcgccggcgcgcgctacatcagcccgttcatcggccgcttcgacgacatcgcggaagacggcctcggccagctcgaggacatcgtcacggccgtcaagaactacgacttcggtcatgaggtcgagatcatcgccgcatcggtccgctcggcaaaccacgtcacgcaggccgccctcatgggtgccgacatcgcgaccgtcccgtacgctgccatgaagaagtgcatcaagcatccgctgaccgaccaggggcttgccaagttcaaggccgattgggagaaggttaaataacgatgagcgaaactgtagagcctacggtcgagcaggccgtagacaacgcagcaccctcgcaggaggctcccgaggcggctccgaagaggacccgcaggacgcgcgcgaaaagcgacgcggatgcggcgacgggagtgactgagaacgcggcacctgccgagcaggatgcgccggcagacgaggcggctcccgcggccaagaagaccacagccgcaaagaagaccacggcaaagcgcacgacgacgagaaagacgacgacgcgcaagaccgcggcaaagaagaccgcagccgacgaggcggcgtggatcgtgcggaagatccgctttctcgcagcgcaggggacagagctttcccggatcggcgtgctgtatcgcgcgcactatgtctcacgcgccgttgaagaggcgctgatccgggagaaggtgccgtatgtgctctacagcggcgtggagttctacaagcgcaaggagatcaaggacattctctgctatctgcgcatgatctacagcggcgacgatatttccttcctgcgtacggtcaacgagccgcgccgcggcgtcggacggacgcgcatcgcgtttttgaaggaatatgccgccgcgcggaatacgagcctctatacggcgcttctggagaacgtggaatcgccgctgttccggcagagccgtgccaaggagtatgtgcgcctgatcgaaaggtaccgcgccatctatgcacagatggatctgaccgacctggtcgcggaggtgctgaatcagagcggctatgaggcgatgctccgcctgtgcggcgaggaggatcggctcgacaatctggccgagctgaagcaggccgtctatgactatgcccgaa

SEQ ID NO: 2969 - DNA, 3330 bp, Unknown
  16S sequences of unknown bacteria
gttataaaggaacagattacgactggctttctgctatttttgaaatcgagcttttgaatcttgccgagattttcgaggaaacggcaaaggacgggcagtcggctcaaagatgccgtaccctttcggccgagataagacagggaattaaaaatttcggctgtgttgttcacgaaaaacagggcaaaatgtatgcctatgaaaccgacggcctcggaaattacattctgtccgacgacgccaacgtgccgagcctgctttcggctccctacctcggattttgcggcaaaaacgaccccgtttatgaggccacgagagcttttgtgctgtcaaaggacaatcctttctattttgaaggaaagtgtgcaaagggcgtgggcagtccccacacccccaaaggctatgtttggcacatcgccctttccatgcaggggctgacggcaaaggacaaggaagaaaagctttcgcttctcaagatgcttgtctccaccaccgacggcacaaatctgatgcacgagggctttgacgttgatgacccgtcaaaatacacccgcccgtggtttgcctggtcttgctcgcttttttgcgaattcgtcatgcattgccttgacgaggggataatataaaagaacaaaataacgcccgtcggaaaaacccttccgacgggcgtttgtgctgttctgttactttgccgaggacgtttgttcaagggttgaaagtgcctctttaagagcgtttacgggggtctgggtgttaagcagtttgaccgaaatatagggcttgtttccggcgttcagaagtattctgcccttcataatgtcggccgctttaagtaccgccgtaacatcgggactgttctgataaagcagcagacagccgttttgctgagacacctcgtaaattccgagctttgccgcccgtccccgcagcagcgccacgttaacaagccccacaacgggtttcggcggctcgccgaatcggtcgataagctcgtcgaaaacatcctcgctgtcggcctcgctccttatatctgcaatgcggcggtaaatcgaaaggcgggtgggcaggtcctcaatataatcctcgggaatgtgagcgggaatttgaatgtcaacggtgcattcgggcgcgtcctccaccttttcgcccttttcctccttgacggcgtcggcaagaagctttaaatacatatcatatcccaccgccgacatctgcccgtgctgctcggcgccgagcagatttcccgcgcctcttatttcaagatcgcgcatggcgattttaagtcccgagccgaattcggtgaattcccgtatggccgaaagccgtcggtcggcgacgtcggaaagctcttttcctctgcggaaggtgagataggcataagcccgtctggacgagcggccgactcggccccttatctgatgaagctgtgcaagacccattttgtcggcgtcctcgattataagggtgttggcgttgggaacgtcgacgccggtttctattatggtggtgcagacaagcaggtcgatctcgttttcgatgagcgctttccacacctccgacagctgttcctcgttcatctttccgtgggcgactccgatttttgcctcgggaacccgctccttgagagaaagggccacccgctcgatgttgtccacacggttgtgaagataatatacctgcccgcctctgcggagctctctccttatggcgtcggctataatgccgctgtcgtattcgcagacataggtctgtacggggtgtcggtccatgggagcctcctctatgaccgacatatctctgagccccgacattgccatgttaagggttcggggaatgggggtggccgacagggtgagcacgtccaccgccttgaatttctctttaagccgctccttttgcgccacaccgaaacgctgctcctcgtccacgataagcagtccaaggtcgcggaattttacatcgtcggaaatgagtcggtgggtgccgatgaccatgtcggtttcgcctcttgcaaggcgctttattgtttcgttttgctgggaggcggtgcggaagcgggacaaaagctcgatgttaaccggcatgccgtccattcggcgcagcacggtttgatagtgctgccaggcgagaatggtggtgggaacaagcagagcgcattgtttgccctcggcaatacatttaaaggcggctctcagcgccacctcggtcttgccgaatcccacgtcgccgcaaagcagcctgtccatgggaacgggacgcatcatgtcgtattttatttcgtcgatacaccgcagctgatcgtcggtttcctcaaattcaaaacgtcgttcaaaatcgttttgcatatcgatgtcgggagaaaaggcatagccctttgtgttcatgcgcctggaatagagggagataagatcctttgcaatgtcctttaccgccgccttgacctttgaacgggtcttttgccagtcggttccgcccagcttgttgagcttgaccttcacctcgtcgcccccggcgccgatatatttggaaacaaggtcaagctgggtcacggggacgtaaagcacgtccttgccggcatagcttatggtgatataatccttgattatgccgttggactcgattttacgtattccctcaaaaacgccgattccgtgaacggcatgaaccacataatcccccttgttaagctcgtcgagggagttgaaggcgttggggttcttttttcgtttgacggttttggccgccgtgcgtttactttcggttatcaaaacgaatttcgagggcaggtattcaaatccccccgaaagcccgccctcggtcacggcgattttgccgtagggaacggtgtcgaaatccgcctgataatcggccttaaagcccttgttccgcaaatcctcggccaaaatttcggcgccttttttgtttcccgcgagaatggccacggcaaagccccttgacatgaccggctcgaggtcgtcgcaaagctgggatatattccccgaaaagggtgtggaggtcttgaccgtgaaggagcaaagctcctttattggcacgtcaaagctgcctcgggcaaaggaatcgagaaaaatcgctccctgctcggtgtatttttcgcatatttcgtcgaatgtcagggcatatttttcaagccccttgcaaagcagcccttcctcaaacagcgatttaatgccctcggacagctgccaatgaaagactctcgccttttccttgaccttggcggtgtcgctcacaaagagcaacgcgtcggccgtataatcgaaaacggtggaggcgcagccctcgataaaggggataaaacggtcataaatcttc

SEQ ID NO: 2970 - DNA, 14772 bp, Unknown
  16S sequences of unknown bacteria
attttcctacatcagggggtcttttgtcactgtccgtttttactggacctgttcaggctggggagggcttcttttgggcttaatgtaaacctaagttaaaaatatagttgacaataagctggaggctggtatactggaaacagaacggagggaatggaatggaaagcacgaaggaaaagctgctggccttgctggaagaaaaccgggggcggagtttgtcagggcaggaactggctctgaggttggggatttcccgggcggcagtatggaaggctatggatggactgaaaaaagaagggcatcagattcagggaattaacaacaagggctatcagctgctggaggggagcgatgtgctcactctggcttccatggagccctggcttcccaaagagtatgaccgaagcctgctccatgtgtatgatacggtggaatccaccaacatcaccgcccgggagctggcggccaaaggggcgccggagggcacagcggtggtagcagcccggcaggagggaggcaaaggccgtcggggccgctccttcttttctcccaagggaggcgtttatgtaagcatggtgctgcggccccagcttcccgccgaggaaagtgcccgggtgaccaccacagcggcggtgcagatctgccgggtgctggaggaagtctgcggctttcaggcccagatcaagtgggtcaacgatgtgatgttccggggaaagaagatctgcggtattctgaccgaaggggccattgatctggaaagcggaatgccggaatacatcatcgtgggcatcggggtcaacctgttggaaggggtcgaaggctttccgccggagctacggcagatcgccggtgcgctctaccgggagaatctgccccaggggctgacccggggccgctttgccgccgctatggtggaaaaaatgggagccatttcggctttgtgcacggccaaagagactctggaggaataccgccgccgctgtcctttggtggggcatcgggtgatggtgatggagaatgagccctgggagggaaaggtgatcgccatctccgacagctgcggcctggtggtggaaaaggaggacggcagccagcggcatctccagtccggagaggtgagcatccgtccgggacaagaagtttggaggaaagaatcgtgagcgaaaaaacgaagaagctgacaacctgtgctttgatggccgccctgatggcggtgtgttcccagattgccattcccttgccgggaggggtgccgttgaccctgtctctggtgggggtctatctcaccggtatttttctggagccgggatgggccttggccagccagtgtgtctatctggctctggggctttgcggcctgccggtctatgccgggtttgccagcggcgccggggtgcttttcggactcaccggtgggttcttgtttattttcccggtgatggcttgggtgacttcgctgtcctgccgccggttccgggggattatccccttggccctggggcttttgctgtccctgcttttgtgctatggggcgggttcgctgtggtatatggccttgggaaaggtgggactaagggaaaccctggtttcctgtgtgctgccctttgtgcctctcgatgtctgcaaggcggtttttgctctggtgctggcgcagcggatgaagaaaccgttggccctggggaaattttaaaagtgtcaaaaactattgacatttttccggagattccttatactcaaagtgtaaaaagaatttgacactttgaaagcgaaaggggcgtctctatggaacaggctatgttgattgcatttgttgtatttttgctggtactgatttttttggatctggctatggtgatttctatgctcagacccggagatgagcgcaagcaaatgatcgtctggaaaaccagtgcttccactttgctggtcaccgtattgatgctggttttcaatgttgtggaggctttgatcaaaaaagagccggctcttgtcaatccctttattcatctcagtgtggtggcgatggtgtattttgtcacactgctggtggagaagaaaaggtatggcggttaatatggagaatgtgattcggaataagcgaaaagaaaagggcatctctcaggaggaattggccaaacggtgcggagtatcccgccagaccatcaacgctattgaaaatgacaaatatgaccccactttgtcattggcattccgcctggcccgagagctggggctgacggtggatgaattgtttatgcccaaggaatcctgaacggtttccatataaaaatggcgtgacctcagtcacgccatttttgcatatatccggttattgctgcccggcatccgactcagaagagacgggggaagaagcggcgggagcagcgggagtgacgctttccagcacctgaagggtgggagccacattgtgctgcttataggtgctccagatcaccgaaaatccgccggcggccatgaagaggtagccgtaggccatgtcggcgatgactgcccggcggaattcatcgtattccataaaggtggggatggactgatatgcttggaagaaggtgacagaaaaatcggtgcggaaggtgtcgtagatctcccaggcgatagccacctgttcgcccacatagagcataccagccgacagcaccacacagaaaaggatgcccggcacattcagtttgccgccaaagagggagaagcctttgaaggtgcagacgatcatgatcagtcccacaatagcggcgatgtatcccagacggtagaccagcacccaggcggccacgcccagaagggagcccagaatggcacccacggcgccggagaggaaattgccccggcgctttttcatttcacctgctttttcagcgatctgctgggctgcagtttcccggcagttttggcacagaaggaggggattgctgtttgcaagacaggaggacacgccctccggactgccgcatttctggcagcaattcacaagctgggcgctttgcaggctcatgcacagggcatcgataaattcgtccatctgctgcatataggttttcacttgaggggcaaaacggcactggaaggaaattttcgcttggtagccgtccacagagaaattggtcaggtatttataatcgggctgcaaattccccagaatgctggacagagccggggccggccgtccatcggtttgcccgacagacagtgtgatgatgtgcgtagggcggccggaaggattctgggcaatggtgaaatagtagccctgccagctgccgtaaagcaggttggctttggcgtcccaggtaaaattgtgcttttgggcaaaatcccgcaggggttttggcagtttcatgttggatacctctctttttccttttcgttgcttatttttattatccttttgtccctttcaccttttgccaataggcttccgtttgctgctccatcttgttggggccaggggtgtaataatgggcgtttttcagcaggtcggggagatattgctgaggtacatagtggttgggataatcatgggggaagcggtagcctgtgccgtgccccagcttttgcgctccctggtaatgggcgtcccgcaggtgttccggcggatcataggcattcttttcggcatcgttccatgcggcggcgatgcccgaagagaccgagttggatttgggggcggtggcaatgaccagagcggcttgagccagaggcagtttggcttccggaagccccagctgcaaagccgaatccacacaggccttgacgatcaccgccgcctggggataggcaagccccacatcctcgctggcgcaggccagaagccgccgggctgctgaggggatatcccctgccagaagcaatcgggagagatagtaaagggcggcgtcgggatcgcttccccgcagggatttgtggaacgcggaaaggatgtcgtaatggctgtccccgtccctgtcgtatttgaccgcagaggcctgggtcacttgccgggcatcctccaggctgacaaacaggctttcactttcttcatcctcctgggcggcggagaacagaagctccacagcattgatggatttgcgcacatccccgccgcaggcccgggcgatgtggccgatcaccccttcttccagggagatcttaatgtggctttcccgggcgcagagggaaaaggcccggcgcaccgcctgttccacatcctctaccgtcaccggctggaactcaaagacggtgcttcggctcagaatggcgttgtatacataaaaatagggattttccgtggtggaagcaatgagggtgatcttcccgttttccatgaactccaacagggattgctgctgttttttattgaaatactggatctcgtccagatagagcagcactccttggggagccaggaaggtgtccagctcatccacaatggctttgatatcgctgagggaagcggtggtggcattgagccggtagagcttccggttggtctgccgggcgatgataccggccagagtggttttgcccacgccggaggggccgtagaagatcatgttgggaatatgcccgttttcgatcaggcggcgaagaatgccgtcagggccgatcagatggcgctggcccaccacatcgtccagggattgggggcgcagccggtctgccagaggtttgtccatgtttcacctgtgccgccgcgcagcggccgaaggggagaagcccggcggcgcgatgatttgccggatgcttcacaacagaaaaattatatcttgttttcccatgttgcgcaatggagaagaggaaaacaaagacaggaatcggcaaaatagtcttttcttgttcacatttatctgatatgatggtaaaagatttcatggacggcgcaggtaaagccgccggtttccccggagcggggatgatgaggagtgacccatactatgaaaagaatgttgctgctgtataaccccaaagcgggacgggcccatattgcccggaatctggatatgatcatccagcgattttcccgaggcgggtatgaggtgatcgtctatcccacccaggagggcctgggcgcccgggaaatccttcggggccggggcgtggaggggatcgatatggtggtctgctgcggtggggacggcactcttcatcacaccaccaacggtcttctggcctgggacaacccgccggaactgggatatctgccggtgggcagcaccaacgattacgcaaactccctgggccttcccaagaccctggaagggggcctagatgtgatcatggagggcgaaaccaaggtgctggatgtgggagatttcggcggcgagtattttaattatgtagcggccttcggcgcttttgccgccgtgtcctacagcacgccccagagcaccaaaaactccatgggacatctggcctatattatggaagggctgaaaaaccttcccattggccagacttacccggcccgggtggaggtcaacgggaaagtgctggaggaggactatattttcggcaccgtgtgcaacaccaattatatcggcggattttccatggcgggtaaggtggacaccatgctggacgatggccagtttgaggtgctgctcatcaaagcgccccagtcggtgctggagctgaacgccctggccggcaagctgctggcccgggattttgacaacgagtttatgaccatgacccaagccagccaggtgcgtttcaccttccccaaaaagaccgcctggactttggatggggaatttggcggggatatcaccgaggtggagattgccgtgcgtccccaggctttgcggatgcgggtatgatagacaaataaaaaagccgccctttgggcggcttttttgctgtgcagggatcaggccatggcgtgagggccgtagaccacgccgtcgatgatggtgtgggtgcaatgggtgaaattgcagaagggatggccgtcaaagatggcgatgtcggcatccttgcccacttccagagagccgatccggtccgccatccccagcagctgggccgggaggatggtgacgctgcggaaggcatcggcttccggcagaccggcggccatgcactgaacgatgtgcaccggcagatatttggtcagaacgccgttgtcggcggtcatgcacaccttgacgccggcccgggccagtttgccgggggtggtcaggctccggttccacacctcttctttgtaggggccggtcatcatggggccgatggtgcagaatacatcttcttccttcagaagttcagggatcaggtatccttcggtcacatgctccagcgcgtagtccagatggaattctctggcgatgcggatggctgtggcgatgtcatccacccgatggcagtggatgcggcatttcattttcccttccactaccggcaccagaggctccagccggaaatcggaacggggcatcttggcgggatcgccatgggccgcggccttggcctgagcgtattcctgtgcgtgaaacagcgtctcccgcagaagggcggcgctgcccatgcgggttttgggcattttgtccttttggccaaaggcccggcggggattttcgcccagggcgaacttcatcacatcatggccgggaacttgcagctgttccaccacttgcccttcccgggttttgaatacaaaaccggtgccgccgatgaggttggccgagccgggcagggtgcagcaggtggagaagcccgcctgccgggtggcggccacgcccatattccgggcattgaaggaatccatcacccgcacctggggcgtgatgggggaggaagtttcgttgaaatccccggtactgccggaggaagagggctcgttgccggtgccgatatgggtgtgggcatcgatcaggccgggagtgacccagcaacccttggcgtcgataacctgggccgattcgggcacagggatattttctccgatctggacgattttcccttcgtcaatgaggatgaccccgttttccaggatgccctgggtgatggtgaccagtttgccgccggtgatagccagcatgatgcatttcccctttctttgttgccgctctttcaaaaggcggtaaaatcttatatttatagtagtggtttccttctttttcgtcaagagcgccattgcaccggagaaaagggcgtggtatcatcagggcaaagggggcgtgaagatgaaaatcgctattttcggccatagcggcagcggaaaatccaccttgggcgcctttttaggggagctgtatggtgcgccggtgctgcatttggatgtgattgcttttgaagaagggtggaagcggagagagatggcagagagccgggacttggcccagcagttcatggaacaggacagctggatcatcgaaggaaactatcgggggatggcctgggaaacaagggtggaggaagccgatcagttgatttatatgaatttcccccgcctcacttgcctgaaaagggcctggaagcggtaccgcacttaccggggccgcacccgggagagcatcgcccccggctgcccggaaaagctggatctggagtttgttttctggattttgtggcagggccgcacgccccgccgtctggcccggtttcagcaaacggtgaagcaataccagggtaaaaccgttgtgctgaaaaaccagcgtcagctggatgcctttatggaacaggcgaagaaagaaaggatgcagcaggagctggcataaaagtggccgcatattttataacaagcgataaaaaagggcgccttctgtatggaaggcgccctgaaattttttagtttttctggttatccggggagagaggcatctcccaggcggtgtgatcggtgtgaagcagatgatgggctttctccgaaaggggacggaccaggaagtctttgtacagccgctgcaccgaaggattttcatgggagaagcgcagatcggcaatggcgtccagaccgtagagcttttcgctccggctttctgccagctcctggccgtcgtggatgggctgcccaccgccgccggagcagccgccaggacaggccattacttccacaaagtcatactgcacctcaccccggcgcagcgcctgaatcaaccgccgggcattgcccaggccgctgaccacagccacccgaatgggggtgtcggcaatgtggaaggtggcttctttccagccatccataccccgtacatcccggaaggcatcgggggaagggttcttgccggtgaccaggtaataagccgaacggagggccgcttccatgacgccgccggtggcgccgaaaatgatccctgcgccggaagctacgcccaagggctcgtcgaactcttcttctttcagctcggcggggaggatgtgttcggagcggatcatccggctcagctctctggtggtcagcaccgcatccacatccggcccggctccggcgctgtccatggtgggaagggcagcttcctgctttttggccaggcagggcatgatggacaccgaatagatctttttggggtcaactcccagaagctgggcataatagctcttggctaccgcgccgaacatctgctggggggatttggcggtggacagctgggagaccatgtcgggatactgggacttgaggaaccgcacccagccgggacagcaggaggtgaacatgggggctttgaaagcgccagggtttttcagccgctggaggaactcgctgccctcttccataatggtgagatcggcggcaaagttggtgtcgaagatgtagtcgaagccgatgcgccgcagagcggccaccatgcgctttactgtggcctgttccgcagacaggtccataaactcgccccaggcagtgcgcaccgcaggggccacctgcaccacagtgatcttctccgggtcggccagagcctcaaagacctggcgggtatcatcccgctcccgcagagcgcccaccgggcaatgggtgatgcactggccgcacagggagcagtcggcctgagcgatcttccggttgagggatacatccactgtggtacgggaaccggtggcggccacatcccagatattcagggtctgcaccttgtcgcagatctggatgcagcgcatacatttgatgcacttggaggcgtcacggaacagggggaaggaacgatcccagcgggtttccggtacctttttttcaaagggcaggtccagaatgttcaaatcgtttgcgatggtctgcaaagagcagtttccgctgcgcacacaggtggcgcagtggcagtcgtgctgggacaaaagcagctctacattgatccgccgggtttcccgcactttggggctggaggtgagaacttccatcccctcctccaccacattgttgcaggcgggcaccagccggtccatgccgaccagctccaccacgcacacccggcaggcgccgatttcattgaccccccggagatagcacaggctggggatgtggatgcccgcagagcgggctgcgtccagaatggtggtgccttcgggcactgtcaccggaatatggtcgatggtgagatttaccattgtttgattctccctcctttgaatacgccgtagccaaagtggtcgcaccgcaggcagcggtgggattcctgcatggcttcctcttcggtcatgccgcattccaaaagttcaaagtccttctgccgttcctgggccacccgctcggtgaggttgactcttccggtggcaggccggtcggaaaggctgggggcagggatctccacatcacaggtgataacatgatggaagcccaggtattcgtcgatgttggcagcggccaccttgccggcggcaatggcgcggatgacggtagccgggccggtgacacagtcgccgccggcgaaaatgccgttgaaattctcaatgtcgctggagctgagagcttcgatgacgccccgtttgatgggcacgccgtactcttcgaaaggctgggtttcaatgccctggccgatggccaccaccacgatgtcgcaggggatgcgcacttcgggagcatcggcttttcggggccggggccggccggaggaatccataggaccgacgatctggggctgggcccacagagcggtgacattgtcctcttcgtcggcttcgatgcgaaccggagccatcagggtagccagctcgcagccttcggcgatggctccttcggcctcttccggcagagcggtcatatcggcctggcggcggcgatagacgcaggtgacgctttccgcccccagacgcttggccgagcgagtgcagtccatggccacattgccgccgccgatgactaccacttttttgccggcgaaatcgggacgcaggccgtcgccgatgttccgcagcatttccacagcgctcattacgccccgtttgtcctcgccttcgatgcccatctttttgtcggtctgggcgccgatggcgatgtacatggcatcataattttcccgcagatccttgaggggaagctcggtgcccacttctgtgtgcactacttccacgccggtggacaggatgtgctgaatgtcctcctccagccgtccggcggggagacggtaactgggaatgccgtaggccagcatgccgcccagccgcttgcgcttttcaaataccgtcaccttatgccccatgagggagaggaagtaggcggcactcaatccaccagggccgccgcctaccacagccacctttttgccggtgctgggagcgcaggggggcgcgggaacttcgccgcagtgatccactgcatagcgcttgagggcccggatgttgatgctgtcgtcgatcatattccgacggcagcgggcttcacagggatgctcgcacaccagggcacaggccaccgggaaaggattgtccttgcggatcaggcgcacggcatcggcatagcgtttttcgccgatgagggccacatagccggggatatccacaccggcggggcacagggccacgcagggaaccggctggttcagctgcaacagacagcggcggttgacgatgtgctccacatagtcatcccggaagccaatgacgccccgcagcaccatgtcggcggcctcaaagcctatggcgcagtcggccgagtttttgatggcccgggcggtgcgctcgatcaggtcgatggtatccagggtggctttgccatccagaacatcttccagcagctggccaagagctcccaggcccacacggcagggcacgcatttgccgcaggtctgggcatggcacattttcagaaaggatgcggaaaggtccaccgggcacagtcccggcgggctggcgatgatgcgccgctccacatcccggtaaagcccctctaccacctgctgggcagcgttgggggtgttgatattcaatctgctcacaatgtttcctcctttgcggccagggccgctttcctgtgatgcgtctatgagtattataacggtaattctttcaaagggaaagcattgattactttttcacaatatcacggaaagatattgacatatgtttaaaacaggagtaggatatatctgacataagtcagaaaaaaggagggagcggggatgccgaggcctcagaaatgccgtcgggtatgtgccatgccccagcgctgccggtttgcaccggaggagggcgggggagaggtactgcggatgacggtggatgaatttgaagccattcgtctcatggatcacatgggctatactcaggagcaatgtgcccagcagatgggcatttcccggcccactgtcaccggtatttacgaaagtgcccggcggaagctggcggcctttctggtggaaggccggcggttggtcattgaaggcgggccggtggaagtgtgcccccacggagggggctgcggccattcctgccgccgggcccattgcaaaaaggaggagatttgccatgaaaatcgcagtaacctatgaaaacggccaggtgttccagcactttggcaaaacccagcagttcaagatgtatcaggtggaaaacggtcagacggatgaaggaaccgtggtggatgccggcggcgccggtcacagcgctctggcggtttttctcaaagagcatcaggtggagactctgatctgcggcggcattggcggcggagctcaggtggccctggcccaggcaggcatccaggtctatcccggtattcaaggggatgcagatcaggcagcccaggcttttgccaaaggagagctgaagcagaatacccaggccacttgcaaccaccaccatgaaggggagcatcatcattgcggccatcatcaccatggagagggagagcaccactgtggtcatcaccatgaaagctgcggccaccactgtgaaaaataaatgttctgcaagaaaaaaggagccggatggctcctttttagactgtcgaaaaccctctgtcgtgtaagaggccctttcgccctactcctcatccatccgcaaaaagccgcgacctgtgcgtggctttttgcacctatcaagggcagggtgaccctgcaagcaaacattctttgcccgggcgtatacaacctaccggagcaaagaaaaaatgggagcggcggctcgccgtcagccccttgcaaagactcgaaaaagtggccgagggccactttttcgacacgcaaaaaaggagccgatcggctccttttttgcgtatagggatttttatgctccgcccagagggaactcatagatcagaggatcgccagaggcatagcgcaggtcaaaggtaattctggcggtggtgagtcccagtgtgtccagagcggcactttcgcccatccactcatcggccagttcctgagccagggcctccagcttttgggcgaaggcctgggcgtcttctccattggattcctggatgcggacttcacattccagcaccggggattcctgggtcacgccgaagcggctgagggtcatgttggcatatggtaagccctgaaattgttccccggaaaattcctggtcattgaaggcgacgatcttttcataggccagggtttgcagggtctgctcttccggagagatgggagatgcgggatcatcctcaccggtcagacccacgctcacattgtccacggtgtagttgggataatcggtgtcttggtcggtgaaggccaaccaagcggaattcagcttgagggaataggggctttgacggacgatctgctgggcctcttccaaaagcggctccatcacttgcttttcttccccatccaccgaggtggggtcatagaaaagctggatattcgctgtgatgttccgatattgccgcttgtcagtaccatcctgtaccagcagcgggtcctgatagacttccatggacacatcggcaaaggtgacgccttccacctgggcgctccaggtttccagctcttttttcaggccgtcctgaatgtcctgggaggaacattcattgagcaaagtgtagatctgatcgttataggccttacgcccttcttctgaaaggctttgcagcgcttccatccgctccgttgcagtaggaagagcggtgagggtggggacttcattttcctggttgttttttccgtctgtctgttcttgctgcacttcttctttttgtttattgggagtcttttcttctttctcctggcggcagcctggggccaaaaggagcagaagacaaagaaggcaaagaagccctgtgcgttttttcatcatcaaaccctcctttgttcacattgctgcaaattgacagagaatggagctttgtgttatcataatatcacaacaaaaaggagaggtcaagaaaagtgaccgatgcaaagtaagattcagtcgcttataatattggaaggaggggcttgaatgttatccagcagtatgatgcgctcccgacggttttttcccggcagtttggtttttgtgcttttgtggggagcagtttccttgtttttgtgggaagtgacccgttcttttagtatgattcagccggttcacggtccttttgttgcgctgctgctgtttttgtcggcggcctctgccgtatacttcctcctgagcctggggttttattttcaggacagggaagtgatggaggtgcccggacggtggatcgtcttcgcgttgctgtgtctggtgatcctggcctatctggccgtatcgttgctggtgattcaggtagggctgcgggaagcccgatgggatgaaagctggagcgtgattcctcatcgctattttggttttgagcaaagggcgggagaggccgaagcctggaactggggaccgctgcttctggttggaggggttctccttgtttcattggtgtgcaatgtgctctatctgcctgcccggctgcggctggcccaggaaaagggttatgacatgagcagtgtatggaatatggcagccagtgtggcagagctgcttttgatccttttgggtctggcgcgccccatgctttatggtttgctgggggccatgcttttgtggctgttctgtttccgcatttccaggctgggagtgttgcacgcctttttgttcaccctgtttcagccatttatgctgctggacagcagcctgggccggatgaaatgggtggccaccgccatgcctaccacggaccttaccccggtggaattccgttcccgggttgccggcctgcggcaaaccgtgcagcaggaaaccaaagaagaattccagcaggagatcgatgggcaaaacagcctgaaaaataggaaagaggaaaaataagaaatgccctcaagggattttgaacaggtccagtaaaaacggacagtgacaaaagaccccctgatgtaggaaaat

SEQ ID NO: 2971 - DNA, 2557 bp, Unknown
  16S sequences of unknown bacteria
accgaagactcttcgtcggccccggtcccaaggcggccccgccctggggatcagtctacaccgaccacgaccgggtgatgttcggcgcgtcggcgctcgagctgcacgattggctcagcgcaaacggcatctccgtggcggcgcacgacaacatgcccgacgattccatcgggcgcatgctcaagctcatggcgtggatcgcgcggatgcgcccggagcttctgcgcgagtacctcgagcaccacctgctcacctgggcgcctcatttcctcgagctgatggggcgcgaggcccagcagccggcgttttccgcgctcgcgcgcttgacggcgctgagcttgcggggtattcaagatacgctcgaattggacgtgatcgagccgcggttctatcgataggaggtgcatatgggcgttgagctcgcgttttccaacgcgctgtccgaggtgacgctcgtcttgttcacgacgttggggccagcctccgcgctcgcgtacctcatcatgctcgtgccgctgttcggcgataacctcgcgcccgagctgcgccacaagattcgcaagtatctctgggtcccgctcgtcgcgtgcatgttcggactcatcgcgtccgcgacgcatctgggcaatcccggaaacgcgctctacgttctgtcgcgcgtcggggcaagcccgctttccaacgaggtgttcgccgccggcttcttcctcgccgcgtgcgcgatcttctggctgctcgggttttccctgcgcgaggaccggcgcttcgagagggtggcaatcgtcatcatcgccgtgctgggtgtcgtgttcatcgcgcgcgtggcgtttgcctacaacgtcgagaccatcgtcacctggcatacgcccgtggttccggcggccatcgcgacgagcgcgtttgtcgcaggtccgctgttcgccgcctgcgtgctgcgtgccgtggggtatcgcgagggcgcgcagcgtctgtgccgcgcgcttggggtgttgactgttgtcgcaggagtcgcgtggctcgcgctgcaggttgcgtacgggttcgtgctctcgtcgagctcgaatgcgctcatgccggcgtccgcgctcgtcccgcagtactggcccacctttgccgtggcggtcgtgctggttgtggttggcgtggtgatgggggcgtggccgctcgtgcgcgggcacgaggcgctgatggggcgtctggtcatctcaaccgcgttgctgttcctcgcgattttcctcatgcgatttgccttttacatggcgcatatgacggttggtgtcgccctctagacgacgtgtggcaccgcgggggtcccgatggcaccgcggggcgcgtatggtcgttttcgcgccaccgcgaacggccaatggtcatccggcatgccaacccgccgatggcgggaccccgtggcgcggaatcaaccaatggccacccggcatgccaacccgccaatggccacccgtcacaccatgtcaccaaccacaccacgccgttatccccgcaattcacaaccccaagaacaactcgtggatgcgcgtgtcgccatcgagctcggggtgaaacgcgcaggcgacctgggcgcccgcgcgtaccgcgacgatcgccccgtcgacacgtgccagtggctcgacaccatcgcccacctcgacgatccgcggtgcgcggatgaagctcatcggaacctcgcccagacccgcgaactccgcatgcgtatggaagctcgcgagttgccttccgtaggcgtttcgctccacggtcacgtccagcgtcgcaaaatgctgcgcgaacctcggcgcatgcgtgtcttccggccccgacgccccgctctcgacgatgcgctttgcgaggaggatgagccccgcgcaggtcgccagcacgggcatgccgtcttcgatacgggccttgagcggctcgagcattccctcgtcgcggagcaggcgcccctgcgtggtcgactcgcccccgggcagcacgagcctgtcgaacggtctcttgaggtcgttgccgcagcgcagctcgaaccagggctcgccgagcgcgtcgagcatcgcctcgtgctcggcaaacgcgccctgtaacgcgagcaccgctgtcgtcatcacttgcccctttcggccatgagcagctcgatttcgtctttgttgatgccgaccatcgcctcgccgaggttttccgaaacatgtgcgatgtagtccgcatcgtcgaagttcgtgacggctccgacgattgcgcgcgcacgtttggcggggtcgccgcttttgaagatgccgctgccgacgaacacgccctcggcgccgagctgcatcatgagcgcggcatctgcgggcgtcgccacgccgcccgcggcaaagttgacgacgggaagtctgcccgaatcgtgcacctcgcgcacgagctcgacgggtacctcgagctgcttggcggcttcgaacagctcgtcgtccctcaggcttgccacccgtgcgatctcggagttgatgagccgcatgtgactgacggcctgcacgacgtcgcccgtccccggctcgcctttcgtgcggatcatcgacgcgccctc

SEQ ID NO: 2972 - DNA, 32759 bp, Unknown
  16S sequences of unknown bacteria
gtgtctgcgcgcgtcatagcttacggcacggcgtgtgagtactgcatcatttcgggcatgacggacgaagcggttttgtgggataagcgctataaggacgcattgcatcttgcggcaattcagaaaagcgaaaagcgcgtggcaaaaaggcggtggctctgatgcgcgacaattacatagcattcgcaggcgcagccaagtcccgccttgtcatacccgatttttcgtccggtgtggattttttctcggatgaaagcgtaaccgccgttaacagggcgaaagactgttacaatttctgtttttcggacggcgcgcttaaagagggatacggacttgtcgattacgaaagattcaagggtatcaggccgtcatacgtttggctgtataagcgttacgacatcgaaaaagaaatgcaggacgacagattcgtgatagtatctgaagaaggcgaactgtattcctgtacggctaacggcagtgagctggcagtaaaatttaccggaattacttttacttcgccgccatcgtttgtaaattacaggctttacggtacggacgtggtgcttatttgttcggccagggagggaatgtacgtttacgacggagaaaatactccttaccacgttgacaacgctcccaacattacatccatggcccttcattacgagcgtctgttcgttacggtcgacggcgaaaaaaacgcagtatggttttcggacgaccttgaccctacaaactgggactcgtcgcttgcgggcggcggctttatccagatgatcgacgaaagaggcgccttaaacagggtaataagctaccttaactacgtttacgtattccgcgattacggaatttcacgcattaccgctttcggggcgcaaacggatttttcagtaagcaatcttttcgtttccagcggaaagatttatcccgggtcggtcgctttatgcggtgactccgtcatttttcttgcggcggacgggctttatatgtttgacggagtttccaccaaaaaaatacttaaaggattggacactattatagaaagcggagaaaatgcgtgcgcgttttatgccgaaggcaaatattatctttccttcaggcgtaaaaaagacgaggatacggtgggctgcgaagatagcagttacctcaataacgcgttgcttgtgcttgatattaacggcggtgactactcgatggcgcgagggcttgacatcacttgtttctgccacaccgccgacggcagcattatagccgtcacaagcaactgcgatgtgggaacgattgaaaaatgcggcaggtttttcggccgttatcttaagaagaaatggcgtgtcccgaaaacagatttgggagacgacaaaactaaattcgtaagaaaaatctgccttacaatcgatggaaacgtatcaatagttttgcgctccgatacgcgcgaaaaggaagttgctttcagaggatttaatgaagtaaagaagaaacgcgtatcgttcagcgggcgaagaatcggatttgacatcgtttcaacggacgattcggtttatgtgtcgcgtccgtcgctgataatcacgaaaagcggtaactgacgggaggaacaaaaaatggattacggcaaaattgcatatttaaaagtcgacgagctggaaaacagaattgccgtgtcgacgaaatcaaaccgcgtattgtgcggaagttatacggttaaccccattttcgattttagaagaggcgactgttttatttccgagcttcgcgcaaaaggaggcgtgactgtttttgtccgtgcctttgttcgcgccgacgaatccttatttggcgccgaattaagcgtgaaaatcaacggacttaaagccggctccgtcagattttccgccgcggaaggagaagtaagcgactgtttcgtaatgtgcgccgcaatgatagacggcacggcggttttgtcggtaggagccgataaacaaaactgcacgctggtttcctgccagatagtggtaaacggcgccgacgctgatttggcgagaacgggcggcgacgcagcggcggataaatgcggcgacttgtgggcgcttgtgttttcgcgggacgacaacgtttatgcctgcttgtttaccgagcccgatttttcggcggctaaccctgtttacatcgctacgggaagccgctgcgacgtcaccgcgacgcaagacggttttgccgtagcttatgtcgacgttgcgggaaatactttcgtggtgtttaccgatacctcgcttaacgtaacaagcagattgttcgtaaactgcggggcggaggctgttgccattgcccgttacagggacggctttgccttgtcggagttgattgaaggtaaagcgcagtgccgttacgtgacaaaaaacagctgttctcagccgttttggttggacgtgggagaaaaagtcgagggcataagctttgtgaaaaacgctttgcctcccgtacttgtcataagcactgaggagcgtaatctcataaaaagctgcgaaacggaatacggcggcagcgacaaaataaacgtttcagcagacgtggtttatactgcagttacggtataaggagagaaaaaatgaaagaacttaagcaaaaaatttcgctgagaaacacttttaccgttgcgggctctcatataatccgcgtttcgcacaataccgtcgtagaccttgcgtcggcgttaaacgcatggatagaatacgcccgttacatcgctgtgggtacgggcaccgcggcggacggtacaagattggggaattatctgtgtcaaaagcaaacccagcttgacgagtacaattcggacccgtcgaaaggcgaacttttcgcggcgtattccataaggcttacggataaagacgtcgcgacaggcacaataatttccgaagcgggacttactccgtttgatatgggatggccgcttgttaattacgcctatttcggaggagtgacaaagcgggagggcgaagacatagtgataagggctgaagtgaggtttgaatttatttcggacaaggttcgtttagtaagcggaaacaacctgcttgcggaaatctttttgggaataaattctttttcgggacacaaatacgaaatggctcacggaaccaattatcacaaaacggccgtcatgccgcgttcggcaggcgattttaccgaacaatacgataccggagcaagatctgcggacaataaactgattatgaatgggcgtttcacttcttcgccttacgaattagtgattatgatggacgataagcccgttttgcgcggattttttacagagtctgcgcacgtggaatctttaagcggatggataagaacaaattccagtgtggaaatcaagaaccgtcatgtgcttgacgtctataacgttaaacatcaaagccaggcgatttcagacgtgtattgtactccttacgtaagcagggtcaccaaagattgtcctcagctgtttccttataagttgcctaaaaactcggctttagttaccgagccttcaggcgcttttacggctgttacggacgacaaggagataaacgtttatacgtttgccgataatcaagcccgattcgtttacaaaatccggggaacttatcctgcggtagacgtgtgttcggacggcagcgtttttacgggcggcgactgtcttattgcttactttaaaaacggagaggcaatcaccaaaaaagaatttcccgagtattcttccgtcagtagagttttagccgttacagaaggcggaatatatcaaatcgcggtgcttgcggaaaatacgttttatcttctcgattattccgaagggactttaagcgtaagggagtctattgcaaacgtgcctgacgattttatgatggttaaacatgacgtcaggttcatcgattactggaccgaaacaaacgctttgtataaatccgcaggcataggcggcaataatgccaacaatgaaacacgactcaagtacttttgcgaacatgtcaaccttcaagttcttgaggttaaggaaagatggatgttacttaaacttctttcttccggaaggcgggctttatgcaatcgagaaaataccttgattatgtatcttgaagagggtgacgaaattgtcttctgcggagaattagtgttcattttttcgggtgggcaggttagaaaggttgtcaaatggggaacctctgtccttgctgttgaggaaataccgttcgacgggcaggcggctaagcccaaatcgacagcctttctcggcgggtatctgctttttctttacgaagacggttcggtcaaaacgttttatcccgtggaatacggtaaagtattgttttgcccatacgctaacttgacgggcagtatcactttcgacgcggttattgcggacgaccctatgacaggcggaaatgccgtggacgtaaagtttacgattgattacggaggtaactcacagtgagattttctgattcttcggtcatactgggtaaaggcaggttaagcagcgcaagaagggaagataacggcgataccggatttatattggatacgggcggcgcgctggtgtataaaaaaataccggcgggatcccgtcagccgcttttttccggagcgcagattatcagctacgccgacgactgctttaaactgacccaaggcaggcttgaacgccgcggaggttttacctatgtgcccgattgacgtaaagcgccttaaatcattggtggcgcgaaacagacgaaggtgctattattacgcacaaaatttaaaaggagagaaagacaatgaatatttcaacatatatccgcggtcttgtgaaaaaaacaagcggggaagcgaatgacgatacggattacgcggatattctggataaaataaacgagataaattccgcgaacaagcttcccgaaaagcccgatttgggcgacgggataacttatgaccgtatagaatatgacgcccccaccgacgaggagatagaaaaaaacgctcagaattctctgaaggagtatcagcaatccggtatttcgtccatcgaaaacgaaattgccgctttgctcgaaaaatacacttcggataaaaccgtcaatactcaggcttacgaaaacacgcttaaaagccttaacgaagcttacgaaagcgctatcgaggcggcaaacaacgacgcgattaagcgcggattggcgcgttcttccattgcgcttaacacaaacgccgccataaacagcgaaaaagccgaaaaggccgccgcggcgtcagcggaatacaaccgcctcgacgcggacctcacaagcaaaatcaacggtctggaagtcgagcgtcaaaaagccatggacgaattcaatatttcatacacggcaaaacttaccgaggagataaacaagcttaaggaacagcgcgaagaactgaaaaacgaggcgataaaatacaataattcgcttgccgaaaaagaagaaagcgagcgtatcgagcgcgaaaaggcggagtccgacctctattcggaagcgctttcccaggctaaagccgaacgcgaccttaaggacaatcccggcgtggcggagcaggaagcgagatatcagcagatttacggtatcttaagggataaactgcttaccatgagcgcacaggaagcgcagaacgaaataagaaacaacagcatttatcgaacttatctttccgacgcgtacttttacaagctttacgacgaattcggcagataatatttctttcatcaggggcgggcggcgggaataaaaatcgggaggataaagaatggaaggaattataaactctgtaagtaagctgttcgggacatacggattcaggtccgcgactatcgtgattgcaacggtggtaatagtcaatctgatcaaaaagcccattgtaaaaaaggcggagcgtcttgctgccgactgcgggctggacaaatcgatcgtgaccaaatacataaccgttctgcccgttggcgtagcgttcgtgctggaacttttaaccgaacttgttttgaacaaattcgcggttttcaacatcgattacgccgcagtggcgacgtccgcagttctttacggcgggcttgcgatagccacttacgaaagcgtaaaaaagcaactcgaagcttatgcggccaagcacaattcaaccgcttccgctgtcggaaaaaaggaaaaggaatctgaccccgcggaggacgggtccgcagaaacggattccgtttcgcccgagaaaaattccgattcttcagttgctttttcggcaaacggacctatggacctgtaaaagcggataaccgaagctgacaaaaaaagctcttaccccgtatcttatttcggggtaggggcttttttcggtttgtcttaaaatcatctgctgttttccgttttttaatcgtccgagttttttgacgttttgtgactataattattccgtttttatttgcggttaaaaaactttattcgcacacttcaaacatttttttaaggcgcagcgcggattccttatgcgttctttccgtgcgcgacgtgcggggcagaaaagcgggattttcctttttttcgttttcctttaaactgctttcggcagattcaattaccttgttttctttttcctgcgcggaatccgtttgactttttgaaacttcgttgccgaaatcttgttgaaagaatttctttttaagcgcgtcgggcgttattctgtgtttcagtgaggtgtcgcggcgcataaacgcggcggacgtgcgtttggttatttttactgcattcaggttttctccgatgttttccgcatcgaccgtttttgttttttccgcattagtttccgtcttgtcgggtgacctgaaagcctttgcgtttacggattcaaatgcattttcgcggcgcggctttgtagtttcgtcggagtaagcgttttttaaatcgtcccgtttgtcggttacgttaaagccgtgtccgattgcgtcgtcggttttttcctgcgagcggtttaaaaattcctcgctcgtaaaagtttcctgttcttcggcgtagtctgtgcttttagttttatcttcgcttgttccgtcaaaagtttgtaccgcggttaagtcatcggctgtttgtgtattggacgtcttttcttcggaagggcggacgtaattgcttttgcttaaaactgtcttaaggtcggaaaaatcttcgttttcttcgcccttgtatatgtccgcggcaaaatccttgattgtacggtacctgtcctttgcgaaaacagccaaagccttcataagcgctttttcgcggaaagaatcgatttttacgtttaactgcgacggagggattatcgtgtcgtcgtacattctttgtatgctttcgggcggaagctgccccgttatgcagtagtatatcgtcacgcccagcgcgtaaatatccgtccacggaccttgctcgccgtgaagacggtactgttcctcgggcgcgaacccctgtttcagaactatcgatacggattgaccgtcgggattggcggctttggacgcgccgaagtcaatgagtttcacttcgttgtttttggtaatcagaatgttatcgggggagatgtcgcgatgtataagtcccgtggcgtgcacttctcccagcgacagaataacgggtttaagtatggcgagagtggcgtctatgtcaagttttcctttgcgccttacgtattttttaagcgagatgccgtcaagatactccatgacgatataggcggtattgttggccgaaaaaaagtcgtaaacgcttactattcccgccagattgttgatggaggagaggttttttgcttcgtctatgaaacgctttaatcctcggttggaggcggcgtaattctgtttcgcgttgatgattatgcggttggacctggggtcacgcgatacgtatccgctgggatagtactcctttattgccactttgattccgcgcacgacgtcccacgccgcataagttatcccgaatccgccttcgcctattgctttgtctataagatagcgcttctgcagcatcgaccgcttcccgagctgatgcggaagattaggctcgtcgtccgctttctttttgcaagccttgcaaacgcggcgctcgtcaaggtcgccgaaacagtaaagacatatatttcgattgttccttatttttggcatgttttcaccgtcagtcagttgagtttttcgtcgccgtcattttcgggcgcgtcagtacaggacgaagtggttgcttcttcactttccgtttcggcgttttttgaaacaggtgccgaatcgtcaggcgtaagtctgttttcttctttgtcggctgagtcgccggcatcgtttttggcgttttcggtatctgaaaccgcgtcttcggagtttgcgttttgtacttcggtttcctcgtcgccgtcgttttgtataaggtttccgattaagccttcgttgttctctgtttcggttaagtctttccgttcggcttcatcaatcggtttagtatcggtaaaacgcaataataccgccgaataattgtcgttgcccttaggcgcgcggcttaaaataagcccgacaagacagtcaagcgcgctttcagagtccgcgcaggttgacaaaaccttttccatgtcgcgttcgtatacgtattcccagaatccgtccgtacaaacgattaaggagtcttccgcgctgcaatcgcggtaaattttgaaatcgggctgaatgaagtaatccgaccccagaacgcgcgtaagcttgttctggtctttatgcgtgcggattgcggaatattcgatttctccgcgttcggcggcaagccgcgccagggagtggtcttttgaataaaattcaagcgagttggatttaaagaaataaatgcgcgtgtcgcccgcatgcgccgcaataagattttttccgtcggtaatcgctaccgacagggtggtgcagccgttgcgcatttcagccagctcgttttttcttttatgaatggcgttgtgggcgtgtttgaaaagcctgttcatagtcgaacccgagaagatttcctcttcttttctcacggcttttataaatccgcgcaatacgctttttaccgcagtttcgcccgcgatttcgctgccttcgtatgcgccaagtccgtccgcaaccgcaacgcagacaaagttgtcttctatcgcgaagtcggcatagtcctgattatgcggtcttccgcctttatcggttatttttgcgatgttgaaatacacgttttacccctgtggattactttcttataagactattatatattatcgcattaaaattatcaagtgtttgagtttttttaaaatcaacgctcggtcggaagcgtgttttttatttatatcggattttacctgctcttcgcatacgctgtcgaaattaaaattacgcaggggaaaggagtactgtaaaaaattcagcgcagtcggtttttaagattttttttatgattggataaggcatgaaaatcaagacttaaaccgaccttttgacgtcgcgcaaattttatagccttgtttaagcgataattttgcgataaaaacggcaaaaaaaaagagtagggcacaggatttaaagcctgcaggaaataatttcttgcaaaatttgtcgaaataaagtgttttatatttgacagaattgtgtaaatagtgttaaaatacattcacaatcgaatttcgtatgcgccgatataatatgaagtacagggtttcgtagtttctaccaaacagccggatgtttgactatcggcggcattctcctttttttgcaaagtgcagaatcgggagagtttgccgtttccataggtcacggaaccttatgccgaattatttatcgccgctttatacggcgttttttttgtttaggatacaatcggacaagctgtccgcggtattaagaacatataggagaggttttttatgagtgaagaaacgaacaacaacgttcagcccgaagttcagactcaagagcctgaacagccgcccgtaaaggaaaagaagactttcgggaaaaagctggacaactatttcggcatcagcaaggcgggcagctccatcggtaccgaaatcgtcgcgggtattgtgaccttccttgcgatggcttacatactcgttgttaaccccaatgctattttaagcagcaacgccgctgcgaccgaatggtcttcggtgttccttgcaaccgcttttggcgcggtcataggcaccgttttaatggcttttgtggcaaagatgccccttgcacaggcttctggtatgggacttaactataccgtgggcgcgattttgggcggctcgctcggatttgcggtttcttacggcaacgttatgctgcttgtcctcatcagcggtattttgttcctgcttctgtccgttatcaaggtaggcggcgtatccgttcgcgaaaagatttttgacggaattcccgaatgtgtccgcggcgccattgccgtcggtatcggtctgttcatcgcattcatcggcatgcagaacgccggacttatcgtttccacatatgttcccattaccggcgagggcggagtattcctgttcggtatccccggcacgcttgtcgaccttgtcgctttcaacgcatacggcgcgggcgcttatgcggctgcaggtgcggtggtttgccttatcggccttatcgccattgccgtgcttgagcatttcagagtaaaaggcgccgtaatcttcggcgttatcatcgcaacactcgtaggtatacctctcggcgtgaccaaatggtccgattatacctggaagttctgggaatattttgaaaagttcttcagcttcaactcggcagaaggcggcattttcttctccgcattcaccgagggctttacttgggaagcgggcgctaaggctattatgcctgccatcatgaccgtcatcaccttctgcatgatcgatatgttcgataccatgggtacggttgtcggttgctgcgttcccgtcggtcttgccgatgaaaagggtaagcctttccactacgacggaattatgatttccgactccgttgcgacctgcacgggcgcaatgctcggtacttccaccgttaccacgttcgttgagtccggctccggcattgccgcaggcggcagaacgggtcttaccgcgcttaccacggccgttatcttcctgctttccatcttccttttgcccgtgtttgcgtctatccccggcgcggctgcgtcttcggctcttctttatgtcggttgccttatgcttaagggcatcaaaaacgtcaagatagataccgttaaaaacgctgttcccgcgttccttaccatcgccatgatgccccttgcttactccatcaccgacggcatcggcttcggtattctttcttacgtaatcatcgaccttatcatttatatcgtcgacgctatcaagtatgcggtaaacaagaagaaaggcgctgaaaagcccgtttgggatttgcacgtcgttaccattatcgtggcagtgctcttccttgtttacttcttcgtgcccaccacgttttaatttcgcttaatcttttcagattaaatatcggcttaaggagcttggcagtaaatgcgcgggctccttttgctttgttctgaatgcagagtagccgctgattttatgtaatcgtttaataaatcaaagcaccgatatcaaatcaaagcacggaaactaaagcgaagtaggggcatcagcttaaaacacgtatagagtagccgctgattttatgtaatcgtttaataaatcaaagcaccgatatcaaatcaaagcacggaaactaaagcgaagtaggggcatcagcttaaaacacgtatagagtagccgctgattttatgtaatcgtttaataaatcaaagcaccgatatcaaatcaaagcacggaaactaaagcgaagtaggggcatcagcttaaaacacgtatatcgacttaaagcaaaaaagcgcaccgcaaagagcgacgcgcttttattatttttttacttttatgcgtttaattaatgcaggtgcaattattaattttatccttaagcgttgtgtttaaggtaaagcttataaggcttatctgtaaagattctgttcgcggtcgggaccgacgcctaccatttttacgggacagcccgattctttttctatgcactcgatgtacgcttttgcggcggcgggcaattcgtcaaaggattttgcgcccgttatgtcttctttccagccgtcaagctcgatataaacgggtttgcagccttcaagctccgaaatatcggtggggaagtcgtatattctttgaccgtctttttcgtaagccacgcacactttaagtttttcgatgcctgtaagcgtatccaatttgttaattgcaagcgccgtaagtccgtttacgcgcaccgcaaatttcaggataagaatatccagccagccgcaacggcgcggtcttcccgtggtggtgccgaattccgcaccgacggtccttatccgctcgcccgtttcgtcgtcaagctcggtggggaagggacctttgcccaccctggtggtgtaggctttccccacgcccaatacgtccttgataagggtaggtcctatgcccgcgcccacgcagaagccgcccgccgtgggatgagaactggtaacgtaaggataagtgcccacgtcaaggtccaaaagcgcaccctgagccccttcgaataaaacgtatttgtccgctttaatcgcctcgtaaacaagcaccgacgtgtcgcacacgaagggcgcaagttgttttgcgtattcgcagtactcattatatacggcgtcgaagtcaagcggagctccgccgtaaaccgcagttattattttgtttttaacctcgagattgaatttaagctttttgcggaaaacctcggggttaatgaaatcgcacatacggattcccgtgcgttccgccttatccatgtagcagggcccgattccgtttttggtggttccgatgtcgcccttgccgcgtttaagctcgctgagtttgtcgatttccacatgatagggaagaatgatgtgcgcgcgcgcgtctattttaaggttggcaagcgaaatgcctctttccgtcaggttctccatttctttaaggattactccgggggaaataacggtgccgttgcctatcacgcataccgtgtcggggtaaagtattccgctgggtataaggtgaagcttgtatgtaacgtcgcccaccaccacggtgtgccccgcgttgctgccgccctgagcccttaccaccatatccgccttgcttgcaagaatgtcaatggtcttccctttgccttcgtcgccccactgggcgcccaccaatgcgattgccgacattaataattcctccggaaaacgttttacgtctaattataaccttttattgctcagatgtcaaagataatcgtctttaccgcccaacaatttaaaaaattcgcccgaaatcaggcggaaaaacaaaacgttttaagtctggtgttttaacgataaataactttatcggtttttgtcaaaggggagcggtttaatcatatataatcattatttggcggtaaaaagtttatgcgacctcggatttaaaacaaaccgcataaaaacgccctgtttttttcttttattgcaaaattcagcctgaaagacgccaagccgatgtgtaggtttataaaaacacaacgccgaacccgaaaaaacaaacagggtacgccttcacagctttagcgcattaaaatgccgccgttaatcattattgaattattatataatcggtcccgttcggttttatggcaaaacatagaaaaacacctattgccgtccaaccgatgtggctgaggttgcaataggtgtatgacatggtgcggaagatgggattcgaacccacacgagaattaaccactggcgtctgagaccagcgcgtctgccagttccgccacctccgcaaaagctattacagtttactaaatttgcgtgcgtttgtcaattattttggcggtgcgcgcgtaatttttattcggtcaatcgttatgcgtgatttatccgtgttttcgcatggtgcaggcgtctttcggtaaacgcaaccgtgactgtaaataaaaaacggcagtcctgaaaatcaagccgttggtccttaaacttcgcaatagacggggcgggagcaagcgtcaagtgcgtttcagcggggcgtctttcttatatccgacggtgcgtaaccagtaagagaaaggaaaacgcggttaaaggaccttaaactttgaaagccgctgttcatggctatgtcggacagcgtgtcgtcggtggagcttataaggctttttgcgcggtcgcagcggtactgatttaccagcgttttgaaatttatgccgaaagttttaccgaatatgcgcgatatatatctgaagtcataccccagcgcatctgccattttatataaacttatgtcagaggcgtaatttttttctatatagtccagaatgtcgaaaataagcttgttgcacagcggtttttccacgaattgcgtggaattaaggtactcggcaaatacggcgtaaaggcaggcttttatcgtaaaaacaggaggcttgtttatctcaatcgcttccgattccgaattttccgcgagtgcggcgtcaaagccgttaagcatattttttataaagaaggattttgtttcttccgacggcgtcaataatgcgtttaccgcttcttttcccgaaacgaaacggttaaacgagtccgcaaatccgcccgaaaaaaccacaacgtaagccaaggaatgcccttgcgattcgtatgagtgcagttggtaaggggtaagcaaaagaacgtcgccgcacgtaagcgtatattccttgtcgcccgccgtcgcctttatttctcccgacaagttgaaacacagctcgaacccgcggtggaggtgggtataccattttatgtcgcggtaaacaaaagcgttaaaaatttccccgccgatggaattgtgcacctgatggaaaaacataacctctctccgttaggtaaaattatggctataagtttacaacatttttcttgcattgtaaagtatacggacgtataatttgattgtagcgtgacctatgcaggagaaaattcgtccatatcatgagtaaagtgttttccatagaggagttttccacattcgacgggccgggcataagaatgacggtttttcttaaaggctgtccgcttgattgcgtgtggtgccataatcccgaggggaaatcccccgataccgaatacgtccgcagccccaacgggtgccttagttgcggtgcttgcgagcgtgcggggataaagacctcagacggagtaaagcttaccgccgacagcgtaaacgcatgcccgagaaaccttgtgcgaaaatgcgggattgactattcgcccgcggatttggcggaaaaaatattgaagaatgccgcagttcttaaccttaacggagggggagttacgttttcgggaggagagccgcttttcgacacggattttctttgcgagtgcataaaacttttgaaaaacaaggtgcacgttgccgttcagacaagcggatacgcgcccgaaaaaaactttcaaagggtgcttgagctggccgattactttttgtacgaccttaaaataatcgacccgaagctccacaaaaagtactgcggcgcgtttaacacgctgattctgaaaaattacaggactcttgctaacagcaaagtgccgttcgtgacaagagtaccgcttataccgtcggttacggatacggaggaaaatctgaccgcgattgcctcttttataaaggaaaacaacgtaaattacgtcgaaactttgccctacaacaagtttgcgggcagtaaatacgcgctggtgctgaaaaaatacagcccgtgctttgacgaaagcaagcccgtaaacacgggtgaaaacatttttgcgcgcatgggtgtcaccgcgcggaaaatgtaaaggtaacgttgcgagaaaagtttttgaccttgctttaaagcatgggcggtaaaaaaaagttacgtcttttaaaagaaaatcatgccgcaataaaaatcgcaggctaaaaagataaaaatgcagtagccgtaaaaacgcggcaggctacggcaatgaatcaagcgttatcggcgtcggcaaaaaagtccgacgtcaaaagaaaaaggggagtggcgaatatgacggaaaacgtaaaaaaaagactggaatttctgcttgactgcggctacagaaaaaaccgcgccgacggcggaaaaaatcttacaagcgcattaagcggacttcaccccgcgatgcgcaacgcacagctgtttaaagcggcggttgacgccgaaaagcccgtgctgtacaaagaagacctgttcggttttaaccgatttaaccgacttttgcccgttgacgactctgttaataagccttatatattcaagatgggcaacattaccgcagactacgaaacgttgcttgaaatcggaatcgagggcttgcgcaaacaggctttaagtaagtacgaatacgccgacgaagaggcaaaagcgttttacgacgcgcttttcgttacgtttgacgcctgcgcggatataaccgaaaaataccgcgtcgaggctcagaaaaacggttgcgtaagattatataacgctctttcctccgtgcctttacgcggcgcacgggattattacgaagcgcttgtaaccgttcattttctgcagtacgctttaaggcttaacaatgtaaatcacgtcactatcggaagattcgaccagtatatgtatccgtattacctagagtcggtaaaaaacggagtaagccgcgaagaactgcttgaactgacggaactgtttttcatatcgcttaatttcgacacggacttgtatgccggtatgcagcagggcgacaacggacaaagcatggtgctgggcggctgtgacgaaaacggcgaccctgcgttcaacgagcttagcgaaatgtgtcttacagcttccgaagaacttaaaataatagaccccaaaataaatctgagggtaaacaaaagcactccgcttaaggtttacgagcgcggaacccgtcttaccaaacagggcttgggctttccgcagtattccaacgacgacgtggttatagacgcactcgttgactggggctacgaccttaaagacgcgcgcaattacacagttgcggcgtgctgggaattcatagtcccgcgctatggggcggacattcccaacataggagtcatgaattttcctcttgtcgtggacagagcggtcagaaaacatcttgcttcttccgccgattttgacgagtttttaggttttgtcgagcgcgaaatcaaagatgagtgcgacttcattatagaggactgcaacaaacgttacacgccttattcggtgtttacttcggcatttatccttccgtgtatagaaaagggcagggacgtatccaaactcggagcaaaatacaataacttcggcgttcacggcgcgggaatagccaatgccgccgacgcgcttgccgcaataaaaaaggaagttttcgaaaagaaggagctttcggcagatgaacttatcgccgctctcgacgcggatttcgagggttacggggatgtaaggcgcaaattgcttgactctccgaaaatgggcaacaacgacgattacgtcgacaatctcggcgcgtttttaatggataaattcgcgctgtatcttagcaaaaaacccaataaccgcggcggaatataccgtgcgggcacgggaagcgcgatggaatacgttttaagcgcggctaaggtgggcgcaaccgcggacggaagaagggcgcgtcaggcatacggctcaagtttttcgccgtcgcttgacgcggtaatccaaggacccctttccgccgtgcagtcgtttaccaaagcagaccttaaaaaagtatgcaacggcggtccgttcacgatagagattcacgacacggttttccgtaattcggagggagaaaaaaagaccgctgcgcttataaaaacgttcatagacctcggcgggcatcagatacagataaacgcgattaaccgcgacacactgattgacgcgcaaaaacatcccgaaaaatacccaaatcttatagtcagggtctggggttggagcggttatttccgcgagctggacgtttgctatcagaatcatatcatacgccgcacggaattcggcttctgacagattcgtttaagaccgcggccgtaatcgcagtaaaatgcggtttaatcggcatgttcggcaaacagtcaactcagacctaacatttgcgcggattgtattgtttcaggcttaaaacgcaaaaataaggttgacaaccttaagctgatttggtaatataatattaccataagggagtagtcggcttcaaccgaagttgttaaatccacacgatggacggtttgtccgggtttaatagtaattgacgagacttatgcacgggtagaggtgcatggtctcgtttttttatgtccttgcttttgcccgtgaacgtataatttcttctattcggaaataaggataaaggagaggttttatttatgggaattctggaagttttgcttacgggagtggggctttcgatggacgcggcggcggtcggcatgacaaacggacttaacgagccgaaaatgcgtctaacgaaaatactgttgatagccttgtttttcggggtttttcaaggagtaatgccgctgatcggatattttgcgggcacgttgtttgccgaagcggttgcatctatcgctccgtacgtcgcgcttgttttgctggggtttataggcggcaaaatgatatacgaggcgcttaaaaagagcaaagaagaggaagaaaccgtcaaaaacctcggcgtaggcgcgcttacggcgcaggcgatagcaacttccatagacgcgcttgccgtcggcataagtttgcttgcattaaacggaatcggcgcgcttaaagtgaatatcttcgccgcttgcgcgattattgccgcctgcacgtttgtcataagtcttgcggcggtatttatcggtaaaaagttcggcgcggtgcttgccgacaaggcggaactcatcggcggaataatattggtcgcgataggactcaaaatttttatagagggagtttttttctgaacaaactccgaatgcgaaaaaacgacactgttacgttaaaaaacgagttgttaaattcatccgtttcggttatacttgttttacataataaaatatgataccgaagaggtaaggaaaaaaatgagctctttaatcgccgaaaacggaaaatttttattggacggaaatcctttcagaattttgagcggagcgatgcactatttccgcgttttgcccgagcagtgggaaacaaggcttaaaaagctgaaggaaatggggcttaacaccattgagacttatatggcgtggcattaccatgaaaaagaggagggaaaattcgatttttcgggtatgctggacgcaggcgcctatatcgatttatgcggaaaactgggttttaaggtgattgtccggcccggtccttacatatgctccgaatgcgacatgggcggccttccgtggtggctgctgaataaaaactgcgcgcttcgcagcaatgaccccgaatatcttaaatacgcactgaggtatttaagccgagtcgcggaaatcttaagaccgcgtcttgccgaaaacggcggctgcattatcgccgttcaggcggaaaacgagtacggcggttacaccgtttgccccgagcatctcgaaacggtaaaaaatcaccttataaaagaggggttaaactgcttgttgttcacctccgacggtgcatggaaatccgacgaattcatgtttgaaagcgggtctgtaccttcgctgttcgcaacgggcaatttccgcggttacgaagcaaaagacagcatcgacatgataaagcgcctgcgccccggtcttcccgtcatgattacagaattctggaacggcagaagcgtaaaatacaatatggattattcgcaccgctccgcaaaagtaatcgcttctcacctcgacacgatattaaacgagggcgcgtcggtcaatctttacatggcgcacggcggaagcaatttcggctacatgaacggcgccgtttacgaacaagtcgacggtaaaaacacgtttttggtgcaaagctcttcttacgacgcggacgcaccgctcaacgagtacggcgaaataaccgataaatatcttgccgaacgcgaagtcatttataagcacctcggcaaaaaacttcctgagctttccgtttcccccgttaaaacagtggaatacggggaggttaagcttacgtcttttgcctccgttgcggacaatctcgacgcgctcaaggacaaaaaaaccttttgctataaaccgatttccatggaggaggcggggcagggatacggtacgattgtatactctacgcgcattgctaagccctctttaagcccgataagcctcgggatagaaaacgtgcgcgacattgcaaccgtttacgtcaacggtaaacccgcaggcgaaatagtgcgcgacggcgaaaaagaaaccgttgtcaaggtcgacgcatcggcgcccgatacccgcgtagacatagttgtcgaaaatctcggaagatgcaatttcggaaacgtcatttacgataaaaaaggaataatcggaaacgtcgtttatcacgttaaccgcgttctttacaatttcgacgtgtactgtatttcttatgataacatccccgacagcattttcaaacctttagacggcgcagtcgtaaaagacggtcataccctttataaaggcgagttctatgccgacgaaaaaggcgaaactttcgtcagccttacgggatttacgcgcggcaatatttttataaacggatttaatctcggcagatattttgcctgcggacctcataaaaccgtatatctcccgtcgccgcttataaaaacaggtaaaaacgaaatcgtcgtcacggattgccgcggcggttcggacaaaaaagtgttccttaccgccaagcaggagcttacgggcaagggagtaatgcgctcaccttttgcggacacggacttttcggacaacgcggtgaaaatcaagtaattcgatgcgttaaaatcatgcgcagtcttttgtctgacgatgccaaacccattttgtataatttatcttaaaatcacaccttaattgttttttcaaagctatcgtaaaccttaatataagatattcaaaagacaaatcgcattttaaaacatgtataccgatattaaaaaataccgattgttaaaacgtcggtatttttttattgactttgttattttgcggaattataatattacaagaatggtaatttaagcttggtacgttctttaacgccgcgcgtaaattcacggcattaattcaactcaaaaggagataaaaggatatgaaaatcaaagacaacgcgaggatagtttttataggcgattcaataacggacgcagggcgcgaccgcaacgatttgcactcgctctccacgttttccaaaaaagtggaaagctatataaacaacacgtttttgtataaaaaagcggaggtattcaaccgcggtataagcggttaccgttccgccgaccttgtagaaaaattcgacgagttcgtcgtttcgctcaaacccgacaacgtcatcatgttaataggcatcaacgacacctggcgcagatacgactcgtccgaccccacggacgccgagacgtactacgccaacgttaaaaaagtgatttcgggcgttaaaaagctgggcgccgaaatgctggtgctggagcctttccttactaaggacgaccccgacaaatactgctattacgaagaccttatgcctaaaattctgatgctgcgtaaagcctgccgcgaggagggagtggaatacgtgcctcttgacggaattatggcggcgtttgaaatagcgcatcccgaaatatcgctttcggcggacggcgtgcatcccaacgaatacggaagctcgcttatcgcggaagaaattatcaaaagattaagcgtatactaagtatcggcaaaaaagcgcgttaaaatttttccgcagtatagcggcaggtacaaaaccattacccgaaactccgtaagtttttcgttttttaacgttgcataaaccaatcggatattttttgtaaaatggaaatgtgaggaatttatacaaatgataggggtattagtagttttaggtataatttttttctttttagcggtagcgaagaataaccgttaaaacgtttgggaggtttcactgccgacagattaaaaattttagtgcgggtgattcggtttttttaatcggaccgattaaagtgtactcattttttatgtcgcacgctgtaaaaattaagcagaaccgtaactgtaaacttaaaagccgcgcaatgttaatcgttgcgcggcttgtcttatgccgttctgcttgaaaattatcatttataaacttcggaataaaatatatcggcgtaaagtttttttgcgtattacattctaagccgcgcaagccaaacgtccgtgccgccgaagttatccttagcgtccgcgtttactccgttaaccacagccgcaacgaagatgttgtcgccgctttttatgagttttgcgttatccgcgttctcgccggcaaattcgcagtagtaggtttccgcgctgcctattgcggcaagcttagattcgcttttgcccaggaacaaagcatagccgttgcctgaaacgcagtcgaacagcttattcaatccgccgaaagaaggcaaatctcttttttcggagaagtttgcgtcgtatgcataagttacgcttctttcgtccgtaaaaaacgtcgagtaataaagcccgtcggcaaacattaattccgcacgggaaggggaaagggattcgcagtatacgacggattgttttttgaaatttccgtccagcagcattattccgccctcgtcgcggtagacgacagccattgcccaaccgcttgagtagggagcgacggcgtccgcgcggtaatcttcgcctttttcgacgtaagttatttcgggttgggtagccgtagtgcagtcggctacgcccgcgtgccgtccaaggtctgaagaggcgttgaaaaataacttatatgcgcctgaaagttcgaaacagtctatgtatgaaagcgaatatgcggacgaaacaatcctttcgtaagtaagcttgagttcgaagtcgaaaatctgcaaaagcagcttgtttttatcgatggcgttgcttttcaaagaagaaatcagcccgtatttgccgtcgaaaagttttacgtcgcaaaactccgctgcggtaactgtatcggcgtgcgcggaagcaatgagacttccgtcaaagtttataagccgtaaggtaagcttatcttcatgcgaaaaaaccgtcagaaatccgccctctccgaaaatgacgcgttccagcttttcgccgcttcccaaaaaggaaaaacgctcggtggaaaggtcttcgtcggttacgcacataaaagccctgccctgtgcgtccgtcatgtcaaagtcggaagaggaggagttgccgaatatgtaaagctttccgctgagggcaaatgcgtctacaagggcttcgtcgccgcttccgccgatattggtttcaaggtctatggcgtcggaaagcgacagccgcgcttttctcacaagactgtattcgggcttcggggtgtcggaaacgataggagtttccgcttcggcgtcgggcggcataagcgtcctgtcgccaagtatacactcaagggctattgccgcgaccagcactacaagcacggcattcaaaagaattataagccttaactgcgctttttgtaatttcatatcgtattcacctcgacgtctattttagcactgtcgggctttgtgggggacgctaaggcaaaactcgcgcttatattttatttttcgacgtaatccgtaagaatttccgcaatttttcttgtgccgtctattccttgggcgcggcttaaggcggattttatttccgccgcgtccgctttaagtccgtcaagcgcatcgataagcgtttctttgctcatgtcttcctgaaaaagaattttggtgccgtaatgacggttaaagtacaaggcgttgtctatctggtcgccgcgagatactgttttcggaagcggaattatcagcgcgggtactccgagggcggcaagctcgaaaagagtgttggcgccgccgcggcaaagcgcaaagtcgcaaagcgccagccagtccgccatgtcggaagcaaattctttctggtagtagcccgggcgtttaagcccgttggcgttgcctttcccgacaaggtgaattacgttgaatctttcggtaagcgcgtcgattgattcaaaaaccgtttcgttaatggcctttgcgccctttgagccgcccgtgacgagaaggtatggtagagtttcacaaagaccgcattcgttaagcgctttaagacggttgccgcagtagatttcttctctcagcggagcgcccgttttgaccgccttttttaaatcggtttcaaaagaggtgagaattttgtcgcatttacttaaagccagcttgtttgcaagccctaatttaaggtcgctttcgtgtaagactacgtgtattcgttttgcggcaaaacagacgggaagtcccacatatccgcctttggaaaatatgacgtcgggttgtacctctttcagaatttttttcgccgcgttcacgcttttgataagtccgaaaggaatggcaagatttttcagcgataacgagcgcacgaatttcacgcaagggatgctgtgatagacgacttgtggcgcgttttcgcgcacaaggccttcctccatgccgcccaccgaacctatataatgtatttcgtcgaaagccttaagccgcggaataagcgcgagattgggcatgacgtgtcccgccgttccgcctcccgtgagtatgatttttttcattgacttatttttttgcctcctgtataatctaatatatgcattgcaatccgttttaatcggcgtttgtgcgctttcgggctttaatcggctttcgcgttttggaagattaaaaaacgaatacgcctttttgtgcggatttgcaaaaaaacttgacaagggggacgtaaacatggaaagacaatggtttacggcgcgcgacggcaaaaaaatcagtcttgcgttatgggataaggtcgattgcccgcgcggagtcgtgcagattgtgcacggcatggcggagcatatcgcgcgttacgacgactttgccgcgtttctcaattcccgcggttacattgtcgcgggcgacgaccaccgcgcgcacgggcttaccgacaaagacgctttgggacttcagggcgagggagaccttttcgaaaaaacagtacaggaccttaaggacattaccgttatgcttaaggaaaagtacaatcttcccgtaattcttttcggacacagttacggctcttttttgacgcagaggtatctttccgttgacccgaatccgctttcgggcgcggtgctttgcggaagcgcgctgatgaagggcgccgcggtaaacctcggctaccgtatagcaaaaggaaaactcaagaaaaaagcggataagcccggcaacattttcgccgcgctcacgtttgaaaaatacgacaaaaaattcggcgaggggttgggcggatggctcaaccgcgacgtaaaagcggtgggtgagtacaacgcggatcctctttgcgggtttacctgcagcaacggcttttattattggtttttcaaagggcttaagtcgattgcggcgtcgccttgcgaaaaattgccgccgtctttcccgctgcttattatttcgggcgcggaagatatggtggggggatgcggcaagcttgtagaaaagcttaaacttcgctatcggcaaaagggacttaaacccgttgtaaagctgtacacgggcgcccgtcacgaaatcttaaatgagttaagtaaagccgaaacgtacgaggacgcggcagactttttcgatacggttacgtcaaagtaatcgcgtttctttgtcgttgaggggcgcggctgatttgaaaattttttcaacaaaacgggactttttatcttcgcgataaagggtcccgttgcgcttatatgcgaaaatatttataattatgcactataaacgtataataatacagcatcgttgccgcgacgtgaactgacggagaaaaaagaggtttttctgaataaaaattcaacgtaaaacgattgaaaaaaagcgagttttatggtataatgaaagggtaagacgaaaacgcgtccgatttatcccgcttgcttaaaactatgcggattcgggcggttacggaggaaaaaatgtcagcaaaggattacaacgcaaaagacattcagatactcgaaggactggacgcggtgcgtatacgtcccggtatgtatatcggctccaccggggcaagaggacttcatcacatattgtgggaaatcgtcgacaacggcatggacgaggtggcaaacggctacggcgatacgatacgcgtcaccgtacacgcggacggctccgtgtcggtggaggacaacggaagaggaatacctgtggacattcatcccactatgaaggtcagcggcgtggaggtcgtgtttacgcaactgcatgcgggcggaaaattcggcaacgacaactacgctcattcgggcggacttcacggcgtgggcgcgtcggtcacaaacgctctttcgcgctggcttaacgtggaagtgtacaaaaacggcacgacttaccgcatgaatttcgaaagccgcgaggaaaacggcaaggtaaaaggcggcgcggtcgtaaatcaccttacggacacgggcgaaaaaacggacaagcacggcacgcttgtcacttttatgcccgacgacaggattttcgaaaccgtgcgcttcaacaccgaaaccatttcgagaagacttaaggagcttgctttcctcaataagggcgtgcacatctatctcatcgacgagcgcgtgactttcggcgagggatttttacgcaaagaatattattacgagggcggccttatcgacttcgtgcgcgaccttaacgaaaccaaggctcccgcttttcccgacccggtgtacctttcgggcgcagttaacaacatagaggcggaaatagcttttcagtatacggacgcttatactgaaaacattttttcttacgtcaacaacattcctacgaccgaaggcggcacgcacgaaacgggctttaaagtgggacttacaaaggtcatgaacgattgggcgcgcaaactcaatctcttaaaggaaaaggacgccaaccttatcggcgacgactaccgcgagggacttaccgccgttctgtcggtaaagatgcagaacattcagttcgaaggtcagaccaagactaagctgggcaacacggaggcaaagtccgcgcttgaagcgataatcacttccgagcttaatgcgtttttcgaaaaaaatcagtccattgcggaaattgccgtcaaaaaaggcttgcttgccgcaaaagtcagggaagccgcgcgcaaggaaaaggagcttacgcgcgccaaaaacagcatcgacaactttcataccgtaggcaagcttaaaagctgcacgggcaaaaaacccgagcttaacgaactgttcatcgtggagggcgacagcgcgggcggcacttgctctcaggcgcgcaaccgttctttccaggcaatactgccgctaagaggcaaaccgctgaacgccgagaaaaagcgtcttgaccaggtgcttgccaacgaggagatacgcacgcttatatccgcccttggcgcgggactcggggaggacttcgaccttgcaaacctcaagtatcataaagtggtgattctttccgacgcggaccaggacggactgcacatacgcgcaattctgcttactttcttcttccgctatatgcgcgaacttatcaacgaaggacacgtttacatcggtttgccgccgctttacaaagtggaaaagcgcggtcaggcggaatacgcttacgacgacgccgcgctggaggagcttaaaaagaaaatgggcaggggcgtggaaatccagcgctataaaggacttggagaaatgaacgccgaccagctttggaacactaccatggaccccaaaaaacgcaagctggtaagggtcactatcgaggacgccgcccttgcggacaagctggtaagcgtgcttatgggcgacgcgatagagccgcgccgcaattatatagtggagcatgcggattttaacaaagaagattcttttatagataacataggataacccccgcgaggtcaaaatggaagaaaacaacggaataatcttaaaaaacatggaagacgtcatgcacgaatccatgataccgtactccgagtgcgttattttggaccgtgctcttccaagggtggaagacggacttaaacccgttcagcgtcgtattctgttcgacatgatggagcttgggctatatcccgaccgaccgtacaaaaagtgcgcgcgcgtggtgggcgactgcttgggtaaataccatcctcacggcgacagttcggtttacggcgcgctggtaagaatggctcagcctttcaacatgagcgcgacgcttgtggacgggcagggcaacttcggcgatatcgacggcaacggcgccgccgccatgcgttataccgagtgccgtcttacgccgctcgccatggagcttttgaaggacatgggttcgcccgacgacgaaatagtgcgctggggctgcaacttcgacgacacgcttaaggagccggaaattttgcccggccgttttcccaatcttctggtaaacggcgcgtcgggcatagcggtaggccttgccaccaacattcccacgcacaatcttgccgaaaccatagacggcgcggtggcgtacatcgacaatcctcgcattaaactcagcgagatgatgaagattataaaaggtcccgactttcctacgggcgggtatataatcgccgacgaggagcttaagaaagcttacgaaacgggcaggggcaagcttattctccgcgccaaaacgcatatcgaggcggagggagaaaagcgccttatcgtcatcgacgaacttccttaccaggtcaacaaatccgcgcttttagaaagcatactcaagcttcgtgaggaaaagaagggcgtgcttatgggcataagcgacatcgcggacgagtccgaccgcagcgggatacgcgccgtaatcaaagtcaaaaaggacagcgaccccaaagccatactcaacgttcttttcaagtccaccaatctgtccacgtctttcggcgtaaacatggtcgccatcgcggacggcaagcccaagacgctggggcttatggaaataatttcctattatgtcaactatcagcgcgaatttatagtcaagcgcaccaagtgcgagcttgaaaactgccgtaaaagagagcatattctggaaggacttgtaatagccgtcaggaacatcgacgaagtggtcgccattatcaaaaaaagtcagtccacgtcggaagcgcgcgacaaattgcgcgtaaggtttaagctgagcgaaagacaggcggacgcgattttagaccttcgtcttgcgcgtcttacgcatctggaggtgttcaagcttgagcaggagcttaaggaactgcgcgaaagaattgcgcgtcttaccgcaatactgggttccaaaaagctgcagatggacgtggtcaaaaacgaaatgctcgccatcaaaaagaactttaaaactcctcgtaaaagcgtaattctgaaatcggaaaaagaatacgacgtacccgacgaaagcgcaccgagagttgtggacgacagcgtggtgtgctatacggcgcgcggcaacatcaagcgtatgcccatgaaaagttacaacatggcgacgcgcgactttaccgacaattccacgataaatgagctttgttcctcgataatagactgctcgggcgcggaacgcataatgtgttttacggatttaggcaactgctacaagctggaccttgaagaacttcccgacggaaagtggaaggaaaagggcgcttcgcttaaaagcgtgtgtcccgccgcgctcgagggcgaaaaaatcgtctatatgcttccgcttacggaaaaacttcccaaaggcaatcttttgttctataccgaaagcggcatggtcaaaaagacggagtggaaagaatacggcgtgcttaaatccgcttttcaggcaatcaaactcaaagagggcgacaaagtcatcggcattgaaaccgagaaaaaagagtgttcgcttgtgtttgtcacgcaaagcggcatgagtcttaatgccgacatgagcgacattccgcttcagggcaggatttcgggcggcgtcaagggtatcaacctcagtgacggcgacaaatgtatattcacgcggcaggttcaggacggcggagaaatagtgctggtcaccgacaagggttacgcaaagcgcgtgcttgtggtggacctggacatcatggcgcgctaccgcaaaggcgtcaagataatcgaccttaagggcaacagcggcaaaagccttgtgtttgcgggctatgtgaccgagccgtataaaatcgtgcttcaggtaggcgaagattacctgtcggcgttctccaccgaggatttgagaatcgagggacgcgctcacggcggccgcgcgctggtcaaaggcaaaatcgccgtaacaaacgtttacgtatacaattcggatttcgtaaacggttaaatctcggcagacaaaaacggataacaaaacaaaaaaaatttttcgggggacgcggctgaaaccgcgtttccttatgaacggacaaaaatatgagtattcttaaaatcaacggattaagtcacgtttacgaccagaaagtgcttttcaaaaacgcggaccttaccataaacaacggcgagcacgtcggcatagtcgggcttaacggcgcggggaaaagcacgtttatcaatatcatcgcgcacaatatttcccaggacgaaggggaggttatctggcttaacggtattcgttacggctatcttgaccagcacgcggacatcgaccgcagccttacggtcatggagtatcttcagtcctctttcgcgcatctttacgaactggacgcgaaacttcagtcgctgtacgaggaaatgggttttgtttcggacgagaaacagcttgaccgcatgattgaaaagtcaaaccgaatgctggacactttgacgcgcgagcatttttacgatatagaggcgcagattaaaaaagtcgccaacggactcggggtgcacgttttcggatacgacacggtcatcgcaacgctttcgggcggacagcgcgccaagctcatgcttgccaaactgattctggagcagcccgacgtcatgcttcttgacgagcccaccaactttctggacgtcgagcacattgactggctgattaaatttctcaacggctgggagaaaacctttatggtcatttcccacgataccgattttctggacggagtgtgcaagtacatcgtcagtatagaaaacggcagtatccgtaaatacacgggcaactattcgcagtttctggttcagcacgaaatggcggtaaagcagtacgaagaagattacgcccgtcagcaggcggaaatcaagcgcatggaggattacatcaaccgcaacaaggcgcgcgccgccacggcaggcatggcaaacagccgcaaaaaaatgcttgaccgcatcgaggtcatggaaaaacccgccaccgttttggacgcaagtttcgattttccctgcgtgatgcttaacaccaaagatatgcttgaagtaaaagacctgcttatcggctacgataaagtgctgcttccgcccgtaaatttcagtatgcgcggcgaaacgaagctgtgggtgcgcggcaccaacggcataggcaaaagcacgctgttaaaaacgcttatgggcattatccccaaaaaaggcggcgacttccgattccatatcgccgcaaaacccgcgtatttagagcaggacttgtctttccgcaatacctcgcagacgcctttcgactacatttcggactgttttccgcgttacggctccaaggaaatacgcactcagctcagccgcgtgggtatccgcggcgaaatggctttgcgccacatttcggaccttagcggcggcgaacaggtaaggataagactgcttacgattatgaacgtcacttccaatatccttattctggacgagcccacaaaccacctggacgtgcgcgccaaagacgtgctgctttccgcgcttaaaaaatacgaaggcgcgctgcttctggtcagccacgaaaagcagtttgccgaggcggtctgcgacgacgtgtttacctgtaaggaaagtctgtaaccctcgctgtcccgccgtccggcattaattacgacggcgataaaagctttgtcgcggcagaacacatacaacaaactttactcccgcttgctttttttttgattacagaaccttaatcagattattgcggcgggtatataaacggatagggtgggtaacagactgaaacgcccgaacaaatattgcggcacagcggtcttaaagccgaaacctttataaaagctaccaacgctcttttacgggcgttgttttttttcggttaaataaagcggaaaaaagccccgtaaaaccgtttcggtattttttttacgccgtcagacaaatcgtcggcagggcggcaaacggaaaaaacctctttctc

SEQ ID NO: 2973 - DNA, 12565 bp, Unknown
  16S sequences of unknown bacteria
ggaagtagaaatctactaccgcttcatcggcaaaatcgactgacctttcttttttacccaacaatatctttaattaagggagacgggcaattccatgccggatatcgccaagctgccggagttggccgaaatttttggcgtcacggtggatgagatcctgggcagcggcaaccccgtggtggaaaaggtaacagccggagagccggtacagcctgccgattacaccagggaggaactgaaagaggctgccgaggtgctgcgccccagtcaggtagaaaagctggccggggaggttagggaagatagagagagcctgctgacactggtgccattcctagacgaggaaaccgtgggcgagctggccacacagctggcgcaggagggtggcgatgttacaggcctggtcccctttatggcagaagaaaaggtggatgaattggcgttgctgctggagcagaacggtaaggataccgtggcacttgcccctttcatgagcgaagaagcggtgggcaggctggcggaactccgtgccaaaaacggccgctccatcggggaactcctcccctttgccggggaggaaaagctgggcgaggtggctcttgccaaggtgctccgcggtgaggatgttaccgccatgctgccctttttgggtgataaggcactgggggccatcaccaaggaaaagctggcccgcggagagagcatcaccgagctccttcctttcttggatgacaacaccctgcgggaatatgtcaaaaaggcgctgggccgttaaatttgccgcttggtgcggactttcccgtttaacaagcatcttcccctgctgcggcggaaaagcccgcagaaagcatatacccagccgtctgcccgcatagggcgggcggctgtgccgtttatgggggagcagttgggcaatgagcacggtttttctcgtcggagaggcgttttttctctgccggcgtcattgcaaaattcctgcacctgtgttataaataaattatcttggatgatagggttggctgcgcagcggtcaactgttcttttttgtggaggtcgcactatgaattatgatgtcattatcattggcgctggccctggaggcatcttttccgcttacgagctgacccaccgggctcccgccctgcgggtcgcggtattcgaatccggacatcccctcagccgccgtcgctgtcccatcgatggcgataaaataaaaacctgcattggctgtcccacctgctccatcatgagcggtttcggtggggcgggtgctttctccgatggcaagtacaatatcaccaatgactttggcggcacactgtatgagtacatcggcaaaaagcaggcgctggagctgatgcgctatgttgatgagatcaacctggcccatggcggcgaaggtaccaagctgtattctaccgccggcactcgctttaagacggtctgcatccagaacgacctgcatctcctggatgcctcggtacgccacctcggcaccgatatcaactacaaggtgctgcagaatatctacgaggaactaaaggataaggtcaccttcttctttgatacccccgtcaccgcagtcgcggcggcgggtgacggctaccaggtttctaccgcggcgggtgactacacctgtcaaaagtgcgtcatctcggtaggtcgcagcggcagcaagtggatggaagccgtctgccgggagctcaatatccccacccactccaaccgcgtggatttgggcgtgcgggtggaactgcccgcggcggtctttgcccaccttaccgatgagctgtatgaaagcaagatcgtctaccgcaccgaaaagtacggcgataaggtgcgtaccttctgcatgaatcccaagggcgccgtggtaaatgaaaacaccaacggcatcatcaccgtcaatggccacagctatgaggacccctctcgccaaaccgaaaacaccaatttcgccctgctggtggcgcagcacttctcggagcctttcaaggactccaacggctatggcgagagcatcgcccggctcagtaatatgctgggcggcggagtcatcattcagcgctttggcgatctgatccgcggccgccgctccaccccggagcgcatggaggacgccttcatcacccccaccctgaatgccacccccggcgacctgagcctggtgctgcccaaacgcatcctggatgacatcgtggaaatgatctacgcattggataagatcgcccccggcaccgctaatgaggacaccctgctgtacggcgtggaggtcaagttctacaatatggaggttgaggtgaataaaaaactggaatccaaccaacatcccggcctttacatcattggcgatggcagcggcatcacccattcgctttctcacgcttccgccagcggcgtttatgtcgcccgcaatattctggaataaaaaatatcccccgcagaccgtatggcctgtgggggaatctttctgttttacagcacctttgccaggaagctttgcagccgctcgcatttggggttagcaaagaactcatgcggctcgttctcctccatgatgacaccctcatccataaacagcacccggctgcctacttcgcgggcaaaccccatctcgtgggtcactaccaccatggtcataccgtcctgcgccagctccttcataacatccagcacctcgcccaccatttcggggtccagcgcgctggtcggctcatcaaagagcatgacctcggggtccatgcacagcgcccgcacaatggcgatccgctgcttctgcccgccggaaagctggctgggataggcgtttgccttatcctccagccctacgcgccgcagcagggccagtgcccgcgcctcagcgtcctccttgctttttttcagcagggtcatgggggccagcgtcatgttgcgcaggatggtcatattattgaacaggttaaagtgctggaacaccatgcccatcttctgccggtgcaggttgatatcgcacttggggtcggtgatctccgccccatccacatagatagaaccggccgtgggggtctccagcaggttcaggcaccgcaggaaggtggacttaccgctgccggagggcccgatgacaacgacgacctcgcccttttgcacctcggtattgatgcccttgagcacctgcaatgtgccaaaggattttttcaggtcctttacctcaatgatcggtttagtggtcactgctgcgcagcctcctttccagtttgcctaccagccagctaaagaacatgactagcagcaggtagatgacggccacagccaaaagcggcagcagctgctggtaggtggcaccacggatgatttcgccgccacgcgtcaggtcattgacggccacatagcaggctacggaggtttccttcagcagcacaatgaactcattggccagggccggcagggtatttttcagcgcctgcggaatgacgatataccacatggtctgcacaaagttaagccccaggctgcgccccgcctcactctgcccgttatccaccgacataataccggcccggataatttcggccacatacgcgccggaattgatgccgaagcacagcatagccaccggcacgccgtttcgcgccgaggtaaagatgacaaagaacatgatgagcagctggatcatcacaggcgtgccgcggataacggtcaaatataccttgcagatggcgttggcgatcttcagcagggtgcgacccaggcccgggcgcatctcgtggatatttttgtcgtgggcgctgcgcacaatggccacaatggagccgatggcaataccgatcagtacagccaccagcgcgatcttcagggtgtttcccaggccgcgggtaatgtagcgccagcgttccttggtaacaaagcaggtgataaagtcagccttcagctgctcccaccacagcaggaaattactcaatggttcccctcttttctatcgtgataagatagcagcacggggcgaagccagtgtggctccgtcccgctgcatgggtaatgaggaaacgattttacttgatgtacttgtcaataatgccctgcagggtgccatcagctttcagctcggccagtgcggcgttcaccttggtcagcaggtcattgttgtccttgttgatggcgatggcatagtcctcttcggtgtaggctgtatccagaatggaaagaccggcatcggcattggcggcaaccagcgccttggcaggctcgttatccagcatcacgcagtctacctgaccgttgatcagtgcggcaacggcgtcggtggtcttggtgaagccctttaccttctcatcaccaaagtcatcggaagcatacataaagccggtggtgccgctctgggtgccgatgacgacgccctcagcgcccatatcgtccagggactgtaccttgccgccctctttgacgataacgacctgaataccggtggaatagctgtcggagaagttgacctgctccaaccgctcctcattgacggtcataccggccatgcccatatcatacttgccggcctgtacgccgcttacgatggaatcaaacgcgatatcaacgacctccagcttcatgcccagcttttcggcaatggcaccggccacttccacatcaataccgaccagcttatcaccatcgtaatattcatagggagggaaggtaccctcggtggccatatacagggtcttggtttcgtcaggggtgggggtaggctcaggggtaggttcgctattgttgttgccacaggcaaccatcgccagcagcatcatggcggccagcattacagcaagcagttttttcatggtagaatctccttttatctttttcataaaatatctttcgttccggtcccggcggggtcctctccggccgggtggtgattacatgaattattatacatcacatttcgcaaaagtaaagcattaaaacagagataaccgcctaaaattacgactaaatattagttataacaaacaattttgcgattatactgtgtataattattcaaataaaaatgaatattcaaacgctgctgtaccgtttctccggttgctccctgctcccggataggctataatagaaaagtaattttgccccgaaggagaggaaaaacgatggaactcatacagcagctctcgcaggaattaaagctccgcccggcgcaggtggaagccgccgtgcgccttttggatgaaggcaacaccattcccttcattgcccgctatcgcaaggagatgaccgacagcctggatgatgccgccctgcgcgacctcagcgaccggctggaatacctgcgcaacctgcaaaaacgccgggaggaggtcattcgctccatcaccgagcaggaaaagcttaccccggagctggagaccgccattcaggctgcggccactctggcggaggtggaggacctctaccgcccctataagcccaagcgccgcacccgcggcagcattgcccgggaaaagggcttggaaccgctggcggcggccatccgggtgcagaataccctgcgggagccgcttagcatggccgcggagtatgtgaacccggaaaagggtgtggagaccgccgaggatgctctctccggcgctatggatatcatcgcggaggatatttccgatgacggcgagatccgcaaggcactgcgccttttgatccaccgggcggccgtggttaccgccaccggcgatagcaccgagaacaccacctataagatgtattacgacttcaaggagccggtgggccgcatcgccccgcaccgggtgctggccatcaaccgcggcgaaaaggagggctttctcaagacagccatcgtgctggaggaggaaaaagccctggaggccatccgccgcaaaacggtgatcgccaataatgcctgcagccgcgccgtgatggaagctgccgccgatagctggaagcgcctcattgcccccagcatggaaaatgaaaccttccgggagctgttcgagaatgccagcgagcaggccatccgggtctttgccgaaaatctgcaccacctgctgatgcagccgcccctcaccggtcaggtggtgctgggctgggaccccggctatcgcaacggctgcaagctggcggtggtggatgccaccggccgtgtgctggataccgccgttgtctaccccacccagccttttaataaaatcgctgaaaccaagcggaaggtgaccgacctgctgaagaagcataaagttaccgtcatttccattggtaatggcaccgccagccgggaatcagaaaagattgtggcggaactcattgcggaaagcggcctgccggtgcagtatgccattgtcagcgaagcaggcgcctcggtctattccgcctccaagctggccagcgaggaattcccggaatacgatgtcaacctgcgcagcgccgtttccatcgcccgccgcttgcaggatccgttggcggagctggtgaagatcgaccccaaggccatcggcatcggccagtaccagcatgatatgcccccggcccggctggatgccgccctggctggcgtggtggaaagctgcgtcaactcggtgggcgtcgatctcaataccgcctcgccctctctgctggggcacatcgccggcatcaatgccgccattgccaaaaatattgtggcctaccgggaagaaaacggcggctttactgcccgtccccagctgcttaaggtgccgaagcttggcaaaaaagcctacgagcagtgcgccggcttcctgcgcatctccggcggcaaaaacccgctggatgccaccgccgtccatccggaaagctaccccatcgccgagcagctgctgaccctttgcggctgcgccttgaccgatatcggtaccgaaaagctgcgggagctgcccacccttgcggagaagatgggctataaagcgctggcgcagcagctttccgccggcgaaccgaccgtccgggatatcatagccgagctgcaaaagccgggccgcgatccccgcgaatcgctgccgcccacagtgctgcgcagcgatgtgttggagatgaaggacctaaaaccggaaatggaactgaccggcactgtccgcaatgtggtggattttggcgcctttgtggatatcggggtgcacgaggacgggctggtgcatatcagccagatcggtgaaaaatatataaagcaccccggcgatgtgctcaaggtcggggatatcgtccgggtaaaggtgctggaggtggaccagaagcgcggccgcatttcccttaccatgcgcggggtcaagcagcccgcccagctgtaaccgccgccagtctgtacaaaccgcaggatacggcccgcagggcaacccgtcctccggacgggtttggcggcctccggccgccggctccggctttgccggagcgccctgcgggccgttttgcccctttcgcagacgacccctggcccttccctggaaggtatccctctccgcaaaaatgtttcacgtgaaacatttgttcttcatttggcaagctggtttactgtgctgcgtactttgcataacagggtggggaaaagggtattgatttttggggagagtatgctataatacccctaaacaggctgggtaactggcctgtacttgccattcctttggcggcgttgggctgcccaaaggaggatggcaacgaacctgatcaggaggtacataactatggctttcaaaattggcgatgcctgcatcggctgcggcgcctgcatgggtgcttgccccgtcggtgccatcaaggatgccggcggcgtttgcgagatcgacgagggtgcttgcattgattgcggttcctgcgccgctacctgccccgttggcgccatctccgaggcttgatttgatcaattgcccggtaaagaggaaaacgctatgcgctgcttttgccagccgcatagcgtcttttcatttttatggaataaggaaaatttttcctgcaaaggcgcggctgtataatataacaggaaccagccggccaataagcatattttatatttccggcataattccaacaaggatttgattctatggcacaacaccctgttaccaatccccccaccggcgcggcggctggaggtgggaggatccgtgcggcgctgaaatgcgcttttccctataccattcccatctttgcgggattttggtttttggggatgacctatggcatttatatgaatgtttccggcttcagcttttggtatccgctgctgatgagcctgactatctttggcgggagcctggaatttgtggcggtgagcatgctgctggcgccctacgcgccggtgcagtgtttcctgatggcgctgatgatccaggcgcggcaccttttttacggcattgccatgctggataaatttaagggactgggctggaaaaagccctacctcatctatggcatgtgcgatgagaccttcagcatcaattgctccgccgagatcccggaggggatcgaccgggggtggttctatttcttcgtcacgctgctcaaccaattttactgggtggccagcgccacattgggcggcgtgctgggcagcttcatccatttcaataccgaggggctggattttgtgatgacggcgatgtttgtagttatctttctggagcagtggctgaaggaaaagcaccatgccagcgaatggatcggcttggcggccagtgtggggtgcctgctgctctttggggcggataacttcttggtccctacaatgatctgcattctggcggcattgacggcactgcgccgtccgctggaaaaggaaagaggggtgaccgcaccatgaccctggctcaacaaatcatcaccgtggggatgtgcgtactggccaccttgctcactcgttttttgccctttgcggttttcaatgcccgcaaacctactccccagtatattcactatcttggagagctactgcccggtgcgatctttgccatgctggtgatctactgcctgcgcaatgtatccctgctgagcgggagccacggcctgccggagctgatcggcattgccgttaccgtggggctgcacttgtggaagcggcagatgctgctttccatcgcgggcgggacgatatgctatatgctgctggtgcagcttgtcttttaacagagaaccaaacagaagtcccggcagggtgaacctgccggggttttgctttttattccaggcccggcaatgagagcgggtcaatgaatttgccgtcctttttggcggcgaagtgcaggtgactttccatagccacctcggcggtgacggtatctacgctgcccagcatctgcccggcggtgacacgatccccggcctttagggctttttccggcgcaatgccgcaatagatggtttgggtgccatcggtgtgatccactgcgacagtgccgccccacatggggtccatggtcacggcggagacggtgccggcctcagcggcggtgacgacggcgcctttttccgcagccaggtctatgccatcgtgggtgcgccagacatttagggtgtggtttttgaccagctctccaccgctgaagggggcgatggtcttagcgccctgcaccggcaggcagaagcacagcggcgccgcgggctcagattttgcgggcggctggggggcatcggccgcggcggactgtgtgggagaggggttctccggtgcggtagagggagaagtgggtagagagggcttgggcgtattggcttcgccgccggtttgctgctgcaggatatcctcataatcccactggttgccttccccctgttcggtgacagcggggggcttttgttgctgttcacggatgccgctgatggtattctgcgcggtgagccaggcggcggtgcccgccccggtgatacacagcgccaacgcgatgtaaaagcccttggcttttataaaggaccagatccggtgattttggttcatattcaaccatccttttcacaaagtggtagtgcgactgaatgagtcaatgctattgttcaccatccgggggcggattatgcatggcgggagggcagggcgggccgcaggcccggcgatgcggagcatcaccgctgtgggcggagcccacagaagccgtccggaggacggcttggcctgcggcccgcgggcgcacctacccggatttttcgcggtcctccggggcacggaatcgccagccatcccggcggatggcctgcacacccagccatagttcccgcgcggccagcagcaggatgagtaccccgaagcaagcgcgcagggtattttcgcccaggcgggtgcccagcagcacccccagcagcacgccgggcaggccgcccagcaggagaggccaggcggctttgccatcggtcagaccgtttttacggtggaagtaaaggcccagcagcccaacggggaggattatcagcaggttgatgccctgcgcggtcatctgcggccagccggtccataccagcaccagcagcaggataccgcccccacccaggcccatagcgcccagcgtgccgctgaggacagaagcaatggcgatccagaaccaactcatagcaggcggatccctccccacagcatcagcccgccaaaaacgagtttaagccagccggtggagattttcggcatcaggcggctgccaaggtaggcccctaacaggctgcccggcagccagggcagggcatccatcacggtgacacggccctgcacaagatacagaatggcactgaccagtgaaagcgggacaatgaccatcagagcagtggcgtggctttttttgccgcgcacccccagggccgaaagcaatgggaccactaccatgccgccgcccgcacccagcagtccattgatgaccccggcgccgaagccgcccagagtgccccaccattttttatgcataaaaaacacccccgccaagaaaatagcatttgctattatctccggcgggggatataaaatgcgaaatttttatgggggatcattccacgatatcgatggaatcaatggtgacatcgtgcaggggacggtcggcgcgggcggtgcgcacattggcgatatcatccacgaccttcatgccatcgatgacctgaccgaatacggtatgggcaaaatccaggtggaaggtgccgcctacctcggcgtattttttggcaatctcggtggcatattcctttacatcctccggcaggccctgggactggtaatcgttgagtttggtgttcacctcatcaatgtaggcctggatcttgggggcatcctccagggcctcctgcatcatctgcacccggcgcttggcatcgttcagcagctcatagcaggccacctgcaccgccagggcatcgatgtcctgggtgggggcctgactgttctgcacgataaagaactggctgccgttggtattgggtccggcattggccatgctcagcgcgccgcggaaattgtgcagctcctggctgcactcatcctcgaacttagcgccgtagatgctctcaccgcccgcaccggtgccggtggggtcaccgccctggatcatgaaatccttgatgacgcggtggaagatgaggccattataatagccctttttggccagggttacgaagttctcgacggttttgggggcaacctccgggtaaagctggatggtgatatcgcccatgttggtgtgcatgatggcgcgggggccttcgcactgggtaaactgctttagaaccatgattttgatttcctttctgtggggccggtgcggaaaaggcggcttgccctgcgggcgtcccgccgccggcgggtttggcacaggcccggtttcttttgcctcattataccgcatttgcggggcagaatacaagtatcggttgactttgggatagttttcgcataatataagagtagagaaaccaaaaggaggaacgcataatggaaaacgaaaactggggcgaggatattatctcgctgatggacgaggaaggcaaccagagtgaatacaagatcgtggcctgtgccgaaatggacggtaccgagtacatggccctggagccgatcattgaggacccggaggaagcgctgatggatgccgcggagctggtattcctgaaggtgagcgaggagctggatgaggacggcgaggcctatctggatgccattctggatgaggatgagctggaccgtgtggccgagatcttccgggataagctgagcgaggagtatgaattcctggatgaggacgaggaggaataatccccgctgcattgacataagctataagtgaataactgctggcaacaccctgctgtgtgcgtcagcgccgtatgatatgatccaacacttttctttcgggagccggatctccgtttggccggattgcagacctcccatccgtagggtggaagaagggagcgtgaaagcccgggaggctacccaccttgtcgcataagacggggttttattagcggcgcaacggcatggcggggcatttttttgcctttttaggggatgggactttaggtccgctttaggctggtgggctattcttaccataccttcgtttaacaaggacacacacgcttttcggcagcgaaaatcggcgctgac

SEQ ID NO: 2974 - DNA, 6486 bp, Unknown
  16S sequences of unknown bacteria
gcctgcggcgaacggggccaaactcccgctccatgatcgcctccagctcccggtcgtccaggcgcaggttccgggtccgcaccggtggtggcgtatccggctgccgctgctccaggatgctgcccaggtgcatatagtccggcaccttgtcccatgggacgtaaaagcccgcgccgtgggcgcagaagatggagcccggcggattttccaggtccgccgccgggtcatagccgatggcggcgcagaccgcctctgcattatggcacggggcatagccgtccacccggcattggagctggccgcggccctgggtataggccgcgacctcccgcgcatagccccgcatcgtgctgacgggggccgtgccggtcagcgtcaccgtctcctgccctgtctccggcggatcaaagcggcctgccatgcgcttgatatcctgcatcgcccggcccagctggggcagggggagctccaaccggaaggcgtagaccggcgcaagcagcacgctctttgcctgcatcaggccctgacggaccgcccgccaggccgcctcgcgaaagtcgccgccttcggtatgcttgagatgggcgcggcccgcttttagtgtaattttcaagtccgtcaccggcgcaccggtcaggacgccccggtgctgctttgccgcaagctccgccagaatgagccgctgccagctgcgggccagcacatcctcactgcaatcggcatccagcacgacgccgctgcccggctccagcggctccagcagcagatggacctcggcataatgccgcagcggctcataatggccgacgccctccgccggggcggcaatggtctcctgatagagaatgcgcccctcgtccagctgcaccggcagatcgaaccgcgcctggataagctgctgcagcacctcgatctgcacctcgcccatcagctggagatagatctctcgcagggccgggtcgtagccgatgtgcagctgcgggtcctcttcctccagctccgccaggcggcgcagcgccgtctgggtgtcgcagtccggcgggaggcgcaggcgatagcggagcacagggcgcagctggggcgcaggcgcgtccggctgcaggcccaggccctggccgctgcgcgtctcctgcaggcccagggcggcgcagacgccgccgggcccaacctgggagacgggcgcaaattttgccccggtatagacccgcagctggctgaccttctccgggccaacggcgtcccggacctgaagcgtcccgccggtgaccttgagaaaggtcaggcggtttccctggctgtcgcggctaatcttaaatacgctggcgccaaaggcgggcagcggcgtgcgctgcagcgtaaaacgctgcaggccggaaagcagcggctccaggccctccaggcgcagtcctgcgccaaaatagcaagggtaagcccgccgggcggcaatcagccccgccgccgtctcgtcagaaagggtgccgacgcgcagatagctctccaaaacgccctcgtcacacagagccaactcctcctgccagcccggcgcagtcatatcgacacagcccgggtccagcttctgccgcagctgctgaagcagctgcgactggtccgccccgagcagatccattttcgtcacaaagacaaacgccggaatccggtagcgccgcagcagccgccacagcgtcgccgtatgggcctggacgccgtctgtgccactgatgacgaggatcgcataatccagcacctgcagcgtccgctccatctcagcggaaaaatccacgtggcccggcgtatcgagcagcgtcagctccgcctccggcagacgcagcggggcctgcttggagaagatcgtgatgccgcgccgccgctccagggcctcgtgatccaggcaggtgtcgccgtgatcgacccggcccaagcgccgcagctgccctgcagtatagagcagcccttcgcacagcgtcgttttcccggcgtccacatgtgccagcacaccgatgaccaatcgtttcatccggcctcctgcctcctttgccctaccccaggcatgtactttccattattatacgcgattgcccgcccaatggcaagagctggacaaagcccgcgtctcaacgcaggccccctctgccctccgggggtccggttctttcttctccagcgaagaaagaaccggagaagaaagacgccgcgaaaggcgggggggcgggccgtccgcaagcgtcctagcatttgctgcgcaaatgcctttttgcttgaacgcgaaaggggctccaaggccgcccctttcacactttccctaccagggggctcacctgggctgcatcaggtatcgtcgccgcacactgtacggagtaccaggcagatttgtgcgggcggccttggtggacttggggcgggatttgtggtaaagtatagaaaaatccgccgcggtgggcggtgaggtgtttggagggggcgataggtttgaaaaagcggatcatctccctgctgctggcgctggtgctgatactgggcctggcagggtgcgatatgggggccggggcacagacggcgcggcccgtggacagcactgggctgacggtctggtttctcgatgtgggccaggcggatgcggcggtgctccaatgtgacgggcaaacgatgatgatcgacggcggcaacgcggccgacagcgattttatctacgcctggcttaaagaacacagcatagaccagatcgacgccatggtctgcacccacgcccatgaggaccacgccggggggctgtccggtgcgctgcattatgccaacgttgccgcggcctacgccccagtgacccaggcggagacgaagacgttccaggacttcacccgttttctggccgagcagggcgtcacgctgaccgtccccagtccgggtgaccagttttccctgggcagcgcggcggtcgaatttcttggcccgctggaaaattacacggaggtcaataacacctccctcgtcctgcggatagattacggccagacgtccttcctcttcaccggagatatggaaaaaatggcggagcaggacctgctggaggccgggtcccggctggacgcgacggtgctgaaggtcggtcaccacggcggcgacacctcctccagcacagaatttctccaggcggtggggccggaatatgccgtcatctccgtcggcgcgggcaattcctatggacacccgaacggcgacgtcctgtcgcgcctggcagcagtcggtgcgacggtttaccggacggacaaacaggggacggtctgctgcgcgtccgacggcgagacagtgacgttcaccttcgaaaaatccgcgccccagtccgagaaccccaccccggcagcgccggagacggttgctgggtatattggcaatgccaacagcaagaaattccaccggcccacctgcggtagcctgccggagccgcagaaccaggtcacgttccagacccggcagcaggcgctggacgcaggctatagcccctgcgcccggtgcgacccgtaaaggaggccccatgaagcttttacactgtgcggacctgcatcttggcaagcggctgggctgctttgacctgctgccggaccagcggatcattctgcaggagatcctatctatcgccgccgacgcaaagatccaggccatccttctggcgggggatgtttatgacaagcccgaccctccagcggcggccatggcggtcttttccgattttgccgcccggctgcacgaggcaggcatcgccctgtatctcatcagcggcaatcacgacagcagccgcaggctttcgtatttttcgccgctgctggcccactgccaggtctattctgccggggaattcaccggtgcggcccggtgctatacattacgcgatgcgtacggccccgtcgtgctgcatctgctgccgtttctgcggccagctaccgtccggcgctttttcccaagccagacaatcgggacatatgaagacgccgtccgggccgcgctggcagcgacgccccgggcgccggaggcgcgccatgtgctgctgtgccaccagttcatcaccggagcggcgacctgcgattctgagcagggggccgtcggcgggctagaccagatcccggcggaggtctttgccgggttcgactacgtcgcgctgggacatctgcacgggccgcagcaggtgggcagccccacggtgcgctacagcggctcgccgctgccgtattccttctcggaatgcgggcagaaaaaatccgtgaccatcgtcaacctcggccccaaggggcaggtagacgtgcagacggtcccgctgcatccgccccaccccatgcgggagatccggggcagcctggaggcgctgcggcgcgccccctacagtgaggattttgtccgtgtcatcctgacggatgaggaggtccggtccgacgcccgggtgacgctgctgccggtgtttcccaatatgctgcgcttcggcgtggaaaacagcaagacggcgacggatatcgccgtgcagggcgtgcggcagctggagcggcagacgccgctggacctcttccaggcgttttacgccgcacagaacggcggcgtcgccccgggtgaggcccggacggcgttggtcgccaaaatcctgcgggaattggaggaaacggaatgaaaccggagcgcttgacattatcggccttcgggccctttgccggctgcacggagctctcgtttgaagcgctgggggcaggcggcgtcttcctcattgccggagacaccggcgcgggcaagacaacgatcttcgatgccatctcctttgccctctatggcgaggccagcggcgggcggggccgccggtccgggcggtccttccggtcggattacgcagcgccggggcaggagacttatgtcgagctggtcttcacccagcggggcgggacgtataccgtccgccgcagtcccgaatacacgcggcccaaaaagcgagggcagggggagatcaccgtcccgccccaggcggcgctgacggagccggatggcacggtcttggcgcgactggagcaggtcaacgcccgcgtgcgggagatcatcgggctggaccgggatcagtttgcccagacggtcatgatcgcccagggggattttctgcggatcctcaacgccagctccaaagaccgcaaggcattattccagaagctatttcacaccggcctgtatgcccagctgcaggagcggctgcggcaggaggtgggaaagctgcaggacgaggctgccggatacgccgctgccatcgccgccgcccgggggcagatcgtctggcctgagaatgcagctccggcggagcgggagatcgcggcagcccaggacctacaggccgtgctggatatatatttgacgcagcagcggcaggcgcagcaggcattgcatgcggccctgcttgccgcggggcaggcccggacggactgcgctgcccaccttgccgccgcccaggccgggaaccggcagctggctgcccgagacgcggcccagcagcggctttccgcggcccgggcagagatgcaggcccaggcggggcaagcatcgcgtctggcgctggcagagcgggcccaggccgtcgccccggtgcgggctcaatacgaggctgcgcagctgcggcaggcccagggggcggagaagctagcggccgcccaggcccagcgcatcccctgccaggcggcgctggaacaggccctggcacggcagacacaggcgcaggcgcggctttccgaggggcagcaggcccaaacccaggcggcagccctgcgccagctgttgccccagtgccgccgcgcagaggagactgcccgtcagcttgtccaagcagagcgagagaccgcgcggctgcaggccctgtcccagcaggcggcaagcgcgtatcaggcgctgtatcatgccttctgggctggccaggcggggctgttggcccggcagctggagccgggaaagccctgccccgtctgcggggcgacggcgcatccggccccggcggcgctcgatggtgcggttccagagcggcagcaggtcgaccgggcggagcgggcctccaagcaggcaggagatgcgtttgccgcccaggcccagaagaccgccgccctgcgcgccgggctggcagaggcccgccagagccttgcgcaggcaggtgctgcgtcctgcacggcggcggagctggcaaagcgcgccgatcagctggaacaagaggccagtgccatccaggcaaaagcggatgcagcggcccatgccgcccagcaggcccaggcccgtcaggcggccctggatgctaccctgcagcagctgacggctgcccaggcagatggagcagacgccctggtccgtcagcaggcggcgctgcatgcggcctgtcttgccgcaagctttgccgatgacgcagccgcccaagcggcatttctccctgcggcggaacttgaccggctgcgtcgggagatcacggcccggcagcagcggcttgcccag

SEQ ID NO: 2975 - DNA, 14538 bp, Unknown
  16S sequences of unknown bacteria
gccctgcgccagcacatggtcgagtccgccgtagccgatgtcgtaggcccagccgtcgccgccgaagatccagatggacttcttcaccagcaggtcggcgttttcaatcacttcacgcgccagcgtgcaggcttcgcaggggcacttcttgccattggcaagccactcggcttcccactgggtgccggtgagatccacgtcgatgccttccttgcaggcagccaacagcttttccgccgcggccttggaaccttcggcgtcgttcatcttttcgagccattccgcgcccgcttccttgatgacatcccagcaatgcggcacggcgatcaactgcttcacggtttcggccagcttttcgcggcgctgcgtgaaggccaggttcatgccgaagccgaactccgcgttgtcctcaaacaggctgttcgcccaagcggggccatgacccttttcgttcacggtgtaggggcaggtcggggcgctgccgccataaatcgaggagcagcccgtggcattggcgatgaccatgcggtcgccgaagagctgggtgatcagcttgacatacggcgtttcgccgcagcccgcgcacgcgccggagaactcaaacagcggctttttgaactggctgcccttcacggtcttggtgttgagcgctccagcgaattccggcagcgtctgggcgaactcccagttcttttcctgcgcggcctggctggacagcggcttcatcaccagcgccttttccttggccgggcagacgttcacgcagttgccgcagccggtgcagtccatggggctaacctgcatgcggtattcataaccggcgaactccttgccaatggcgggcttggtttcgaaggtttcgggggcgctctgcttctgctccgccttcaccagatacggacggatggccgcgtgcgggcaaaccagcgagcactggttgcactggatgcagttggcgatctgccactcgggcacggtgacggcgatgccgcgcttttcatacttggtggtgccggtgggcacgacgcccgcgggatcgaacgcgctcacgggcagcttgtcgccttcctgcgcgaggatcggggccaccagggtgtcgaaatattcggtcgcttccaccttgatcggcaccgcgccggtctcagcggtcgcccagctctcgggaatggcgacctcatggatgccggagatcgacatatcgatggcgtcgcagttcttcttcacgacctcttcgcccttgcggccataggtcttcttcacggcggccttcatatacgcgtcggcatcctcgtaggggatcacgttcgcgagcttgaagaacgcggcctgcatggtggtgttgatgcggccgcccatgccggcgtcgcgggcgatggtgatggcgtcgatggtgtacagcttggcatgcttcttggccagcgcgcgcttcatgctagcgggcagctgggcatccagctcttccgccgaccaggggcagttgagcaggaacacgccgccatccttcagcggggccaccatgtcgtacttggtgacatacgccgggttgtggcaggccacaaagtccgccgaatcgatgaggtaggtggacttgatcggcctcttgccaaagcgcaggtggctgatggtgatgccgccggacttcttggaatcgtaggagaagtagccctgcgcgtacatatcggtgtggtcgccgatgatcttgatggagttcttgttcgcgcccacggtgccgtccgagccgaggccgtagaacatgcagctcacggtgccttcggggctggcgtcgagcttttcgcccagcggcagcgaagtgccggtcacatcgtccacgatgcccacggtgaagtggttcttgggcgtttcgagggccaagttgtcgtacacggccttgatcatcgtggggttgaactccttggagcccaggccatagcggccgccgaccacggtgatgtcgttcatgcccgcctcgcgcagcgcggagcacacatcggtgtacagcggctcgccgagggaaccggcttccttcgtgcggtcgagcacggcgatcttcttgcagctggcggggatcgcggccaggaagtgcttcatggagaacggacggtacaggtgtaccttaatcaggcccagcttctcgcccttggcgttgaggtaatcgatggtttcttcgatggcttcgcagccagaacccatggcgatcaccacgcggtccgcgtccggcgcgccgacgtagtcaaacagcttgtacttgcggccggtgatgcgggcgacgtcttccatcacggcttcgacgatggcgggcgtggcctcgtaatacttgttggcggcttcgcggccctggaagtaaatgtccgggttctgcgcggtgccctgttgatgcggatgctccggattgagcgcgcgctcgcggaagcggcgcaccgcatcccaatccaccaactgcttcatctcgtcgtactcgatctggtcgaccttctgcagctcatggctcgtgcggaaaccgtcgaagaaatgcaggaagggaacgctggccttcagcgtggccacgtgcgccaccagcgccatgtccatggcctcctgcacggagttggaagcgagcatggcaaagcccgtctgccggcaggccatcacgtcggaatggtcgccaaagatggacagcgcgtggtaagccagcgcgcgcgcgctcacatggaacacgcacggcagcagctcgccggaaatcttgtacatgttcgggatcatcaacagaaggccctgggacgcggtgaacgtcgtggtgaacgcgcccgcggccagcgagccgtgcacagcgcccgcggcgcccgcttcagactgcatctccgcgatgcgaactttctgcccaaaaaggttcgtctgcccagcggcagcccactcgtcggcagattcggccatcggagaagacggcgttatcggataaatggctgccacatcgctgaacgcatatgcgacatggctggcggcggtattgccgtcaatggttttcttgatgctcaattgtctgaacctcccctgttcgtcgagcaaaccaaagtttgcgggatactgacatcgttattattatagtagatacgcgccacaaagtcaagtgaagaaaccgtcaaaggcgaaagttcccttgcaaagcgcaaaaaaagcggcccggccacagggccagggccaccggagagcgaaccgcagccgccgcgctattgcagctcgccttccacgcaccgcgcttcccccgcgcggatggcgtacagctttgcgatgggcgcgcccgccaggtcggaagcgtccgtgcaggtgagcacgacctgcacgccttccaggcggcggatgagctgttcccggcgcgcgggatcgagctcgctcatcacatcgtcgagcagcagcaccggccattcgccggtttcgtcgcgcatcacgtgcagttcggagagcttgagcgaaatggccgccgtgcgctgctgaccctgggagccaaaggcgcgcgcgtcctcgccgccgatgagcaggcgcaaatcgtcgcggtgcgggccgacgctggtgatcatgcggcgcaaatcactctcccgcgcggcgaagagttggtcggcaaagcgctcctcctcggtcgagggggcgtattgcacgtcgagcgcctcgcgcttgcccgaaatgctcgcgtggatttcgctggcgtaagcgctcaagcgcgcgatgtagtcgcgccgcgcggcgatgatttcccgcccggcggaaacgagttgcccatcccaggcatccagcaattcgccctgcgcgcccgcgcgcaacagctcgccgcgctgtttcagggcgcgggcgtagcgctgcaacgcgtaatagtaggaaggcttgagctgcgaaagctccatatcgataaagcggcggcgttccgccgggccatcctgcacaatacgcagcccctcgggcgcgaacagcactcccgtgacgcatcccatcaactcgccggatttggcgatgggcgcgccatccacctttacgcggcggcgctcgctggtggacagggcgatttccaccgtgcgctcgcccaggcggctatccgcccgcacgcatacgcgcgccacgttttcgccggagcggatcagttcgcgctcgcgggcggtgcggtgcgagcggcccgtgcagcaaaggtaaatggcttccagcaggttcgtcttgccctgggcgttgtcgccggcaaaaaccgttacgccggcatcgggaacgatgtcggcgctggcgatgtttctgtaattttgcacggtgaggcggcggacgatcattgccgcgacgccatctttttgcgcttttcggcgttcaattcgcgcttacgcatgcggatggatttgggcgtgatttcgatcagctcgtcgtcgctgatgaattcgatcgcctcttccagcgtggggatccgcacgttggtgatcttcagcgcttcttctgcgctggcggaattgcggatggaggtaaggtgctttttccggcacacgttcacgtcgatatcgccgctgcgcgaattgctgcccacgatcatgccggaatagaccttcgttcccggatagacgaacaactcgccgcgctcctgcgcgtagaacagggcgtaagacgtggtttcgccggtttcaaacgccaccagcgagcccgtgctgcgggtggggatatcgcccttgtaaggggcgtaaccgtcgaacaccgcgctcatcacgccttcgccgtgcgtgtcggtgaggaattcgccgcggtagccgaagaagccgcgcgaagggatggtgaattccaggcgcgtgcggtccatgccatgcatgttcaaaagctccgcgcgccgggaacccagcttttccatcacggtgcccacatactggctgggcacgtcgatcaccacgcgctccatgggctcgtgcaggatgccgtccacctcgcggaagagcaccgtgggcttggtgacggcgaattcatagccctggcggcgcatggtttcaatcaagatggaaaggtgcaattcgccccggccatacacgcggaacgcgtcggtggactgggtgtcctccacgcgcagggaaacgtccgtctgcatttccttgaacaggcgcgcgcgcaggtggcgcgaggtgacaaactgcccctccgtgcccgcgaagggggaatcgttcacacggaaatccatggaaaccgtcggctcgtcaatcttcacaaaagccagcggctcgggattggccgggtcgcaaatcgtgtcgccaatggccagctcgtcgaaaccgcaaatggccacgatatcgccgatctgggcgctttcgcagggcacgcgctttagcccgtcgaatgtgtacaatccagcgaggcggctggcgggggaagtggcctcgtgcgtgctgcgcacggccatctggcccgcgcggatggtgccgcgctcgatgcggcccacgccgatgcgccccacataatcgttatagtcgatggtggaaatgagcatctgcaacggcgcatccggatcgccttccggcgcgggaatgtgggtaaggatggtgtcgaacagcgggcgcaggtcgtccccgcgcgcatcgggatccagggaagcgcaacccgtgcggcccgaagcgtatacgatggggctgtcgagctgttcgtcggtggcgtccagctccaggagcaattccagcgtttcatccgtcacttcgcggctgcgcgcgtcgggccggtcgaccttgttgatgacgatgatcaccggcaaattgagttccagcgcctttttcagcacaaagcgggtctgcggcatggggccttcgaaggcgtccaccagcagcaacacgccgcccaccatcttgagcacgcgctccacttcgccggaaaagtccgcgtggcctggcgtgtctacgatgttgatcttcacgccgccatagtgtacggcggtatttttggaaaggatggtgatgccgcgttcgcgctccaggtcgttggagtccatcacgcgctcggccacctgctggttttcgcggaacacgccgccctgcttgagcatttcatccaccagggtggtcttgccgtggtcgacgtgcgcgatgatggcgatgtttcggatatcatttctcgtaattttcataattattgctccatactgtcggcttcggttcggtcggcggtttccgccagcgccaggccctcgttgttttccaatgccaggcggatgctccaatcgttttcaaacaagagcaccggccggccggaacggtcttcggcgatggccgtggtggaagtgaggcgcagccggtcgagcggcttgggcgtctgcgtgacccagcgcacaaagcggaagggcaaattctcccgcacgacgttcacgccgtattcgttcttgaggcggtattccagcacgtccatttgcaaaacgcccaccacgcccgcgatcatctcttcgcggccgatgtgcggccgcttgaaggtttgaatcgcgccttcctgtgaaagctgcgtgatgcccttgaggaattgcttgcgcttcatgctatcctccgggctgatgcggcagaaatattccggcgcaaacaggggaatgccgccatagcgcacgggagaacccgtgcacagcgtatcgcccaggcggaaaatgcccggatcgaacaggccgatgatatcgcccggataggccacttccacggcctcgtgctcctgcgccatgaactgctgcggctgggcgagcttgacgcgctcgccgctggaagaatgccacacggtcatgcccttttcgaacacaccggagcacacgcgcataaaggccagccggtcgcggtgcgcggggttcatattcgcctggattttgaagacgaagcccgtgaacttctcgtccttcggatcgatgggccccacgtccgacatgcgcgcggcgggcgggcgcgtataggaaagaaagcggtgcaggaacggctcgacgccgaaattgttgctcgcggagccgaagaacatgggcgtcagctcgccggagaggatctgctccagcgaaaagggatcgcccgccacgtccaatagctcgatgtcctcgcgcagcttatcggcatagttcttgccaatgcgctcgtcaaaatcgggcgcgtccagggaaatctcctgcttttcggcctgggtggtgccgtggttgccgcccgcgtacagttccacgctgcgcgtgtcgcggtggtacacgcccttgaaatccccgtggatgccgatgggccagttcaccgggcaggaacggatgcccagcacatcctccagttcctgcatcagctcgaaggggtctttgcccgcgcggtcgagcttgttgatgaaggtaaagatggggatggagcgcatgcggcaaaccttgaacagcttaatcgtctgctcctcgacgcccttggcaaagtcgatgagcatcacggcgctgtccgcggccacgagcgtgcggtaggtatcctccgaaaaatcctggtggcccggcgtatccaaaatgttgatgtggtagcccgcaaattcaaactgcatggcgctggaagtgacggaaatgccgcgctgcttttcgatctccatccagtcgctggtcgcgtgccgcgcggctttgcgcgctttcacagaacccgcctggcggatggcgccgccatagagcaggagcttttccgtgagcgtggttttgcccgcgtccgggtgcgaaatgatggcgaaagtgcgccgccggtcgacttccctggcaagctcggggtgggacaaacaaatcattccaatccataatgagtttttggcacgccctttattgtaagagtttgcgcggggcgttgtcaaccacgcggcgttaagccccgcgttaattcaaagctttttcgcaaaagcgccgcgcattcctcgcgcaaaagtccgccgtctgagcggcaaaagtgcggaaaagcgggatcttcgggaatgcggtacacgctgcccgcgcagccgtattgcggatcatacgcgccgaaaaccagccgccccacgcgcgccatcacgatcgcgcccgcgcacatggggcacggctcgagcgtgacgtaaagcgtgcagtccgcaagccgccaatcgcctatggctcgcgccgcctggcggatggccaggatctccgcgtgcccggtggggtcgctcccacggtcgttgtgcgcgcgggcaatgatttcgccgccccgcgcgatgacgcaaccgacggcgatttcgcccgcctgcagcgcggcggccgcctcgctgagcgccgcgcgcatcatctcctcgtcaaaccgggtgaacatattccccctcccctctccatgagtataaccgatttgccaaaaatcgcaagcaaaattttttcgcacggtttcgcgggaaggactttacaaatgcaaaaattttgtctatcataaattacggtgggttctgtgtgaactgtgtactgtggtatgggaggatggatatgcacacaattggttttgacaacgcgctgtacctaaaattgcaaacgcagcacatccgggagcgcatcgcgcaatttggcggcaagctgtacctggaatttggcggcaagctcttcgacgattatcacgcttcgcgcgtgctgccgggattcgagccggacagcaagctcaaaatgctccttcaactgcgcgagcaggcggaactggtgctggtgctcaacgccaacgacatcgagcattccaagcggcgtggcgatttggacattacatacgacgcggacgcgctccgcttgatcgacgaggcgcgcgcgcgcggcctgagcgccaacagcgtggtgatcacgcaatattgcggccagccggcggcagaggcgttcgcgcacaagttggtgcaactgggcattcgcgtataccggcattaccccattgaaggctatccctccaacctttccttgattgtgagcccggatggattcggcaaaaacgattttgtcgaaacggaaaagcccctggtcgtggtaaccgcgcccggcccaggcagcggcaaaatggctgtgtgcctttcgcagctgtatcacgagcaccagcgcggcgtggcggcggggtacgccaagtttgaaaccttccccgtgtggaacctgccgcagcagcatcccgtgaacttggcctacgaggccgctacgctggatctggaggacaaaaacgtcatcgatccctatcatttgcaggcatataacaccgtggccgtgaattacaaccgcgatgtcgaagttttcccggtgctaaaggcgatttttgaggcgatttatggcaaatccccctattgctcgcccacggatatgggcgtaaacatggcgggcttttgcctttccaacgacgaagtttgccagcaggccgcgcgcatggagattgtgcggcgctattacgccgcgcgctgcgcgttgcgcatgggcgtgggcagcgaagaagaagtgcgcaacgccgagctcatcatgaaccaggcgcatgtcacgcgcgaagaccgccgggtggtggcccccgcgctggaagtggcggaaaagacggggcagcccgccgccgccatggaaatgcccgacggccgcatcgtcaccggcaaaaccagcgatttgctgggcgcttccgcggcgctgctgctcaacgcgctcaaagcgctggccggcatcaaaaaggaaatcgacctgatttccgccaccatcatcgagcccattcaagatctgaaggtcaaccacctgggcaaccacaacccgcgcctgcacacggatgaaatcctcgtggcgctgtccatctgcgcggccacgaatcccacggccgagctggccatgcaggcgctccaggatttgcgcggttgcgaagtgcattccagcgtgatcctttccagcgtggatgaaaacaccttccgcaagttgggcatcaatctcacctgcgaaccgcgctatcagagcaagcagctataccacaaatagggtaaataggttttttggatttccttgccgcgggcgcttgcgctcgcggcaaaaaaatgatacaataaaagcactatgttccgggaagggggttgcatggctgcgcaacgcgctatgccatgcgccgggttatgaaaaagaaacgagttcttgccgcgttggtgcttgtggggctgcttttgctgctcacaggctgcaccagcatgctgggaggagaaacgcaaccgcaggcgacgatgccgcccatgacggcggaaatgttcacggatctatccagcgtgacggaatggtacaatgccgtcactttcgaggatacgctggaatcgctcaccgcgcgtttcggcgagccggaagaagtgcaggatgacaacggttcctattggaatttcctggatgaaaacaaccacggcgttgccgttgtatttttcgacgatggaacgttgcgctccaaaatggtgtatttcgaagacatccgccagttcgccgacttgagcggcgcttcccatattgaaaacgtttccctgctggattctggcatggaatatgaagtggtggccgctgcctttggcgcggagggcatcgaaattatgcaactggcaaccgacagcggcaatggcgccggacagtatctgatgatttgggttagtgaagacggcggcatcgtacaggcgctgtttaacgtgagcgataataagctggaacaagtgagctacagcctgggtagcggggcatgagccgcccccagttctttgcccattttatccgcccgcaaagttttgcgggcggattttgtatccccattcgcatgggaaaatgtgaattttcgcggtaaaaatttcaaattgttcgcgattttttgcggcatgcctttacgtgggagaagtttcgtgttattatacaagcggtgagaagaggaggcgtgcggtgaaaattctcatacatgcgatgatgtatcccgaaggccccaaagagctgcgggcaaatacttctctgtttttgcatgaatacgcgcaaagatgggtgcgttccgggcacgatgtgctggtgttccaccacaaaatggcctatcccgcctggctggaaaaggcggcgcgcgccttggcgcgcgcggtgccgcggctcacctttttgcgggagttcctcaatggatacggcagcgatgaagacgcgcagtttgcgcgcgacggcgtgtgcgtgctgcgccgcaatttgccgcgttggctcccccgcagtctgatcagcgcgcgcgcaaaaaacaagcgggcgcaatgggtgcgcgcggaactggaaaagcgcgcgttccagcccgatctggtcatcgcggatttcctctgccccagcgcgcaaatcgcgctggccggcaaagagcgcggcggcgcgccggtcgcgctgattttgcacgatacttgcatgggctatctccgccggccttggacgcgcgcccgcgcggaagcgttggcgcgaaacgtggattttttggtattccgctcggaaagcgcaaagcgggcgtttgaaaacagccattttgtacccgcgcgcgcggtgctgatgccctcgggcgtgccggaagagttggcggcgccgctcgccgcgccgcgagagcaagtgcgcaattatctgtatgtcgggcggttgatcgcgcgcaaataccttcttgaaacggtagaagcttttggccaggccaattgttccggcgcgcagttgaccattgtgggcgatgggccggagcgggacgccattgcgcaggcgatcgcccgccaacccaacgcgaattccattcacatgctcggcccgcttgcacatgcggacgtgttccgcgccatggaggcggcggacgcgtttgtgatgatcagcgaaaaagagaccttcggcatggtctatgtggaggccatgtcgcgcggggccattcccattggttcgcggggcgaagggatcgacggcgtgatccacgatggacaaaacggttttctgctccccgcgggcgataaagacgcgttggcgcgcctgtttgagcgcttgcacgcgatgcccgcggaagaagtgcgggcgctttcgcaaaacgcctgggagagcgtcgaagccctgcgggcagacaaattggcggaaagcgtgctggcgtctttgcgagtgcgcgaaacgccccgcagccttgttttctttacgcggggctatcccacgccgggcatgccttcgcaccaggtgtttgtagcgcggctggcgcgcgccatggcggattgcggcgcagatgtgcgggtaatctatccggtcgcgcggcaccggcggcgcagggaaaaggcgccgttcctgtttaccgaacggacggagcagggcaaccgggtggaagtgttttgtccctcgcgcgcgaatctgctctggtacccgctcacggcgtggcgctttgagcgcgcggccctgcgggaaatgcgcaggcgcggcctatgtcctgacgcaatctacgcccattttgccgtgccgccagggacggcggcggcgcgcgcaggcaaaaaactgggcatcccggccttctttgcctatggcgaaagcacgccgaaactgcttaagcaatatggcgcgcgccgcgcggcgcggacgctccaaagcgtttctggcgtcgtcgccgtttcgacagacgcggcccatacggtggaaacctacggccttgcccggccggaacgggtgcgcgtgttccccaacggcgtggacgcaaatcgcttccaccccatggaccgcgaaacgtgccgcgcggcgtgggacatcccgcagggcgcgtttgtgctggcctttgtgggcgcgttcagtgcgcgcaagggcgcggcgcgcgccagcgaagccatcgcccgggcaggaaacgcctttggcatattcgcgggcagcggcgaagagacgcccactgggccgcacattctatttactggagcggttgaacccgcgcgcatggcggaatttctcaacgcggcggacgcgtttctcctgcccacgcgcaacgagggttgctgcaacgccctggtggaggccatggcgtgcggtttgccgctgattacatccgaccgggactttaaccgcgatatcgcgggcgaggacaacgcccttctcattgagccggacgatgtggacgccatcgcgcgcgcgatttgcgcgttgcgcgacgatcccgagcgccggcgggcaatgggcgcgcattcgctggagcgcgcgaaatcgctcacgctttccgcgcgggctgaggcgatcctggcctttataggcgagcaaagcgcgtcttaaaacgttatcctgcgccaacccattgcggcgcatgatatagtaaggaggatcacaatgaacaacaaggcttttgaaattgcgaaagaatggtatgacgcgcatggcgtagacgtgaacgcggccatggacgcggcggcgaaaacggccatctccatgcactgctggcagggcgacgacgtcgtcggcctggaaggcgtgggcggcggcgcgtccggcggcatcgccacaacgggcaactaccccggccgcgcgcgcaacggcgatgaactgcgcgcggacatcgacaaggccatcagcctgatcccgggcggtaaaaagctcagcctgcacgccagctatgcggagctgcacggcaagaagatcgaccgcgacgcttatacggccgaagattttgccgagtggatcgattgggccaaagcccgcaaggtcggcctggacttcaataccacgttcttctcccatccctatgcggaagacggcttcaccctttccagcccggacaagaagatccgcgatttctggattgagcacggcaagcgctgccgcgaaatcggcgaggcgttcagcaaggcgctgggccagacctgcgtgatcaaccactggatgcccgacggctataaggatacgccggaagacaccgtcgccccccgcgcgcgcatggtcgaatcgctggacgcgatttttggcgcgaaggagatcagcaaggatctcgtgcaggacgcggtggaatccaagctctttggcatcggcgtggaaagctacaccgtgggttcccatgagctgatgatgggctacgccatcacccgcggcatcctgtacacgctcgacgcaggccacttccatcccacggaaaagatttccgacaagatcagcgccattttgcaatttatgccgaagattctgctgcacgtctcccgcggcgtgcgctgggacagcgaccatgtgatcacgctggacgacgatctgcaggccatcatgaaccaaatcgtgatcaacggctatcaggatcgcgtgtacatcggcctggattatttcgacgcttccatcaaccgcgtggcagcctgggtcatcggtgtgcgcaacgcgcaaaaggccttgctgcgctcctacctgcgcccggcgagcatccgccaggacgaatacgccatggactataccgcccgcctcgcgcaccaggaagcctacaaagtggcgccgttcagcgccatttgggacgagtactgccagcgccagggcgtgcccggcgaaggcgaatggctcgattgcgtgcgtcagtacgaaaaggacgtcatgtccaagcgctaatgatttttgtggtgctgtgaaaaaaccaaaagttttttcacagcccctggtggcgggggagcaagctt

SEQ ID NO: 2976 - DNA, 7367 bp, Unknown
  16S sequences of unknown bacteria
tgcatgttatttctttctttttttatgtattttgcatataacaaacttttgaatatgtgttagaggcatatagattcccacaaaaaaagatgctgcccattacctgagtaacatcttttcacgcacatgtcgacggcacagctatcgcacctgccgcaggtctgcttgatcaggggacgtccgcagccccggtacttgctttcgatcaagcccactggcgaagatcgaagcttagtaccgctgggcgaggaattagcgagagcggtccctctgaacatgctgcctgtggtgagtacgatggctgtgccacaagccaaactcactcccggattgcgtctttcacgctcttcacgaattcagccacataaggcactgcatctttgccgtatttctccaccagtttcacgatggcggatcctacgatgacaccatctgagacagcagccattttcttcgcctgctccggtccggagatgccgaatccaatggccgccggaatatcagaggattttttcaccagctctaccatagctcctacatcggtagtgatctggcttctcataccggtcacacccagggaagatacacaatatacaaatccttctgcctctttggcgatcatactgatgcgatcatgggaggttgatgcgatcaatgaaataagatccatcccttctttacggaatacagaggcaaattcttctttttcctcgaatggaacatccggcaggatcacgccatccatgcctacagttgcggctttcttcgcaaatcgctcaatgccgtaggaaaataccacattggcataggtcatgaacaccatgggcactttcacgtctttgcgcagatcttccaccatgtcaaaaatcttgtcggtcgtcacaccgccggtcagggcacgcaaatttgcggcctggatcaccggaccttctgcggtcgggtctgaaaacgggatgccaagttcaataagatctgcaccatttttctccatagctctgacgatctcttttgtggtatccagatctggatccccgcaggtaataaatggaataaatgccttgccaccagcaaaggcttctttgattctactcatggatatcctcccctctgtagcgggcgatggctgcacagtctttatcgcctcttccggaaatattgatgaccataacctgatctttgctcatggtcggagccaattttttcgcataagctaccgcatgggcactttcaatagccggaataatgccctcggtcttgcttaaatattcaaatgcatctaccgcttcatcatcagtaacggctacatattcagcccggccagtgtcatgaagccatgcatgttccggtccgatgcccggataatcaagtccggcagaaatggaatagaccggtgcgatctgtccatactgatcctgacagaaataagatttcatcccatgaaaaataccaagctttccggttgcgatggttgcagccgtctcgaaagtatcaacacctcttcccgcagcctcacagccaataagacggacactcttgtcctcaataaaatgataaaacgcaccaatggcattggatccgccgcccacacatgccagcacagcatctggcagttttccttctgctgccatacactgctccttgatctccttggagatcactgcctgaaaatcacggacaatggttggaaatggatgtggtcccatgactgatcccagcacataatgggtgtctgcgattcgatttgtccattctctcatggtctcagatacagcatccttcaaagtgccggtaccagaggaaaccggatggactgtagctcccagcagacgcattttgtacacattcagtgcctggcgctcagtatcttcttttcccataaatacttcgcattccattcccatcaaagctgcagctgtggccgttgccacaccatgctggcctgctccggtctctgcaatcacacgggtcttacccattttctttgccagcagcacctgtccaagcacattgttgatcttatgagcaccggtatggttcaaatcttcacgtttcagataaatctttgctccacccagatcctctgtcattttctttgcaaaatacagtctggacggacgtcctgcataattgttaaataaatcctgcagttccgcattaaattccggatcatttttgtaatggttatatgcctcttccagttcgatcactgcgttcatcagcgtttctggaatatactgtccgccatgtacgccgaaccggcctttggatctgttctctgccatcttacttactcctcacttgttctatgatttttctgatcttatcaggatcttttttcttatctgtctccacaccggagctgatgtccacaccccatggtgcaaaattgtttattgcttctttgatattttccgactgaagcccgcctgccagcagaaacgactgctttgtcgaccagtctttcaacaggcgccagtcaaaactattaccggttccatatccattatccaataagatccggtctgcactgctgttctcgatcttctgtaaatcttctgcagatcttattttacatgctttccagatctcgcatccaggtaccagtctccgcagcatctccatatatgcttcatcttccgttccatgaagctgagcaatctggataagaccttccttcaggtgcgctgccacctcctccaccggcaagtttacacatacacccactgccgggatctctgaccgcaacttttcccgaaagtctttcatctgctcccatgtcacatatcggtggctgggtggatagaatacaaaacctgcataatcgggctggtattgattgactgcgtcgatatctgcatcccgatacaggccgcagatcttgattttcgtctgcccactgtctatcatctggttagcgttctggcttctcatgccttgcctccgtcagatgcctgactctgtacgtccgatgtctgcacctgctctgcagccttctctcgtccctgtgccgctgcctgtttaaattcagccagccgttccgtcttgtcttccgcacgcataagcgcctcaccgatcagcaccgcatcggctccaatctctgccagaacacccacatcctgcggctccttcactccagattctgccacaaagatcacattcgtggggatctgctcccgaaggttcgctgcattggaaaaatccacagtaaagtttttcaaattccggttattaacaccgatcactctggctcctgccttcagtgctgaccgaatctcattttcatcatgagtctctaccagtgcagtcaatcccagatcatcacagatcttcagatattcccgaatggtctcggttggaagcaaggcacagatcagaagtactgcatctgctcccatgcattttgcctcatagatctgataggcatccaccgtaaaatccttgcggatcataggaagggtaatggccgcccgaatctctttgaagatttcatcagaacctaagaaccattttggctctgtcagtaccgatacacagtctgcacctgcctgctcatattccctggcaatctccacataaggaaaatcctcggcaatcaaccctttggaaggtgaggctcgttttacttcacagataaaggatactcctttgttagaaagagcatgctcaaaccgaaaatctccttttggaaagctgcgggcttttcgttccatttcgtccgctgctatctttttcttcgcctccgccacccggaaggatgcataagctgccaactcatctaatatcatatctgtctccttcgcctgtctgcttttatgccactaagatgccaccgattcctgcttatttgattcacggataaaagcatttaacgtctgctgtgccatgccctcgtcgatcagagtagctgccagcttcacaccatctgccaggctgtctgccttgccgcccacatagagaccggctcctgcatttaacaggaccgcatctcttctgactcctttttcacccgccagaatagctcttgtaatggctgcattttcttctggagtaccgcctttgagtgcatccttctgagcagtcttcataccaaaatcttccggccggatcacataggtcttgtactcaccattgccaaattcacagaccgttgtaggtgcacacatggagatttcatccagcttgtcctgtccgtagactaccatgccccgttttacccccagctgataaagcacctttgccatcggctccaccagatgctcagcatatactcccagcacctgaagattggcatgtcccggattggtcagcggtcccaacagattgaagaccgttctcacacccagctcttttctgactggtcctacatatttcatagaagtgtgatatttctgtgcaaagaagaaacagataccaatctttttcagaagttttacacattgttccggggaaagttgaatatttactcccaatgcctccagacagtccgctgcaccactctttgaagaagctgcccgattgccgtgtttcgccactggaacgcctccggcagcgatcactatcgaagatgtggtagaaatattaaaggagccagctccgtctccacctgttcctacgatctccagcagatctccgtcatattgtaccggaagtgcatgggatctcatagctgctgcgcaggcggtaatttcctcaatggtctcacccttggtggacaaagcagtcagaaatgcggctgtctgtacctgtgaagtctctccgttcatgatctcattgattactgcatttgcctgctcataagtcaggtcttttccattgatcaatgctgctgttgcttctttaatcattttcttatcctcctcatatattttatgtgtttgcgtgatagttagaaacttttgatgcctgcatcaaaaaattactcaatatgatttttccatctggtgtcaggatggattctggatggaactgtacaccataaatgggatactcccgatgcataactgccataacttcgccgtctttggtcttggcagtcacctttaatgtttctggaatagtctctttcacagccgccagcgaatgatatctggctgctttcatggtatttcccatgccctgaaagatggggcaggtctcatcaatggttatcgtggactgcttgccgtgcatcagctcttttgcataagaaacggtagctccataggcttcgcagatagcctgatgtcccaggcagacacccaatgtcggtatctcttttcccagtgtctttgccgcttcgatacagatgcccgcatcctttggaaagcccggtcccggtgaaagaatgatccgtgatggtttcagtgcccggatctcatccacggtcagttcatcattctggatcactttgatatccgggtcaatggttccgaccagctgatacaggttataagaaaaactatcataattgtcgataagtatgatcattggtcgatgcctccctgtgcggcagccagtgcattcatcactacctttgccttgttgatacactcctgatattctttctgtggcacgctgtcagccacgatgcctgcaccgcttctgacaaataccttgccatttttcttatatgcaatgcggatcgcaatacaggtatccaggtttccggtgaaatccagataaccaatggctcctccgtagatgccccgcttattattttccagctcattgatgatctcgcaggcccggatcttcggtgctcccgataaggttccagccggcagaatggaatccaccgcatcgatggcatccaaccctttcctgatggttcctttcacagtagaacctatgtgtatcacgtgtgaaaaccgctgaatgctcatgtatttttccacttccacggttccgaactcactgatcttaccgatatcatttcgtcccagatccaccagcatgttgtgctcagaacattctttttcatctgccagcagttcctgttccagcctctggtcttccgcctcagtggctcctcttggtctggtacctgccagtgggaacgtatggagcgtcttattttccagctttaccagcgtctctggggaagctcccgcgatctccatatcgtcactggaaaaataaaacatatatggggaaggattcaccgtccgcagtacccggtaggtatccagaaggcttccttcataatccgcttccattcgattggaaagcaccacctgaaaaatatctccctcccgaatgtagtgctttgctttctcgaccatgctgcaatactgcttctgatcaaacaatgcccggaattcagaaatacatctgcccggtatttcttccgccatctcgccgctctggatcagctgcttcatggtagaaagttccagttctgcccggtgatactcggtcttcagatcctcacatcggatatttacgatcaggatgatcttctgacggaaatggtcaaatgcgatgaccttgtcaaacaacatcagatccacatccttaaacccttcctcgtcttctgcatccagcaccagagacggctctgcatatttcatataatcgtaggaaaaatatcctaccagtccaccggtaaatgtaggaaaaccttcaatcttcggacttttattttcatcaagtatctgtcggatatactcacctggatgctttgtctccatattcacggatgttccgtttttgatcgtgagttttccgtttgtacaggtgatctcaagccgagggtcatatcccagaaatgtgtagcgtccccatttctgattatcctccgctgattccagcatgtagcaatgtctgcttacatttttcagctttctgagtaccatcagcggtgtgtactggtctgcatataattccagactgactggaatgcacttatactctcctgttgctgcgatcttaactgcttctttgaattccggtctcatgttgtctccttttctggcataaaaaatcgcccttgataagtctgtctaacttaccaaggacgagtcattacatttcccgcggtgccaccttgatttgtgaagggatctctgccttcacactcttacgaaatactaacatatctctgacaactgacgtatgtcctcacgtcacagaatactcggcttttcatctctgcctttgactgtgccctcagcggtccatttgatattctgggttccatccggctctcagctccccggactctctgtgcgaccataaataccgttatctccgcttcatcggtttaaagtgatgctcaattcaattttttacatcatagcaaagccgattttatttgtcaagaaaaaatttgatatgctataatttgtgagtattcaaatgcaaagttattttactcgaggagaatagca

SEQ ID NO: 2977 - DNA, 4977 bp, Unknown
  16S sequences of unknown bacteria
tctcaaatcaatgaagaaatgaagatcgccgcggcggaggctctggctgctctggccggcgaagagttgaatgaaaacaacatcatccccaaggcgtttgatccgcgggttggccctgcggttgccaaggcagtggccgaggcggcccgccaaagcggcgtggctcgcatctgagcagggagatagcgcagaaaatgtgcagcggatggttgcgcggtgctgccggaaagaaaagcggcagaaagggaaccattttctgcagtatacatagaatgaagtgaggccggccacacgggccgagcacgaatcttttaggaggtttcattttatgtataatcagggcttctttggcggtaactgctgctggatcatcattgccattatcctcatttgctgctgctgcggcggtggccagggcaataactgcggttgtggctgcggctgcggcaataccacccccagctgcggttgctgagtgcgcatcgatagaaagaattacacaaaaaaacgcacggcacagccgtgcgtttttttcttcaattctgataagccaggcggccggtgcggtacaggttgccgccctgggagtcgatggcgacaatcagggggaggcgatccacctgcatctgcttggcgctttcgcagcccagatcctcataccccaccacagtggatgcggtgatgtgtttggcaatcagcgcgcctgcgccgccgacagcagcaaaatagacggctccgttgcgccgaatggcatccaccacggcgttgctgcggtcgcctttgccgatcatggcggccagacccagatccagcaaacggggcgcatagcagtccatacgcccggcggttgtgggaccgcaggagccgacggccataccggggcgggctggggtcggtccggcgtaataaataatagcgtcacgcaggttatagggcagcggagagccattgtccagcgcttcgcaaatgcgcttgtgtgcggcgtcgcgggaggtatagatacggccactcagcaaaacccggtcgcctgcgtgcagttctggcagataggaacgaatttcatctgtggagatttcgtaggtcatacactcatccatcctttttttcccggctggattgcagggttttcattcctgcgctgattttatcaaatacagcaggcatctgcgtcatttgctcctgggctttctgcagcgcggtggcagcctgcagggcagaggatttatacatttccagcagcgcctgatactgtgcttgggtgctgttgagcagggtgtgcagctgctggcggctgagcatcgcatgctggtcggctttctggcggatcgctgcggcgtttccgttggcctccgagcggatcttttctgcatcggcctttgcagcagaaaggacggcgtcggcctgcgtgcgggctttgcggaggatctcttctgcgcttgctctggcttcggccaccaaggtgtctgcccggtgtttggcttccacttcgacatcggcaatatttttctgcaacgtgtggaatttatccacttcgggctgcagagcggcgacggttgcctgcagggtattgatttcttcggtgtactggcgattggaacgctgtgcattttccagcgcctctccagcactggcgcaggaagcctgcgcggcatcccgttcagcctgcgcggcgctgagtgaagcgacagtgtcctgcagggaaacgcgcaactgttcgcactggtcacgcaattgggtgttttcctgctccagcgcggcgatctgttcctggttttgctgcaacagttcgccgctttcgcgggaggctttttcaatataattcatgacatcctgacggttaaagccgccgaagatggatcctttaaacgtattgttttccatagtacactcctcgtttcgccctgtttctgcttcagggcaggtgaaaaaagggcgaaaaaacaatattttatatttatattatcatgaaaagcacggaaaaacaataactgtggcgagaaacattttcgatttgtactgaaaagaaaaaaattgaaaatttttgaaaaaaaggcttgctttttttgcgcggaagtggtattatacaaaagctgtctgtgagatgtgcaatatgcggctgtagctcagttggatagagtgtttgactacgaatcaaaaggtcgcgggttcgaatccctccagccgtaccaggaaaagccttgaaaccaatggtttcaaggttttttctttttctatttcggacaggttgacaatgacgcagcaatcggactgttttctgcagtcaaaagtctgtacagtgtgtacgatgaaactgctgcgggaatgggatgcagatgccaaaatgggagatgcatcgattgataacttgttgggtcaggtgcatagtgatgccctcaaggataatctgacggaatgtaaaaaacaccgctataaaaccagtctatgtgttttggtgtttcgtcatactttgctcctgttcaaaatttttgcagcttgtaaatagaagcgcactttctggatttggttggcagaaaaagaatgcgcctcggattgaacaggcaggttcgggtgtggaatgccctgtgcggtgcacggctgtgaattacggcatttcgcatggcggaaaagaaacccttcctgacactggaatcgtgtcagggagggttttttgttgatcatttatggtaggatcagactttcacttctccagcgaggactttctggtagtcagcgtaattctttttcagcagtgtggggatgtccagttcgtaggggcagcgcgttttgcatatgccgcattcaatgcaggtttcaatttttttcatttccgcctgcatctcttcggtcaaccaggcttgggaaggcgcgcggcggagcatcagggacatccgggcgcactggtggatcagaatttcctgggggcagggcgcgcagtatccgcagccgcggcagaaatcgccggttagttcccggcgctcccggtcgatgaaagcggtggtttcttcgtccatggcgggcgtttggtccatatagctgagccattcgtccaattcctgctcccgctggataccccagatgggcagagcgttatcgaattgctggatataggccatggcggcgcgggaattggtaatcagtccgccggccattcctttcatcacgatgaagcccatgttttgcgcggcgcaggcttgcaccagagcttcttctttgggcagcgaaagataactcagcgggaactgcagtgtttcatacaaccccgatgcgatggcttcctgtgcgatgccgtatttgtgggccgtgatggcgatgtggcggattttgccctgttgcctggcttccagcatacattcgtacatgccggtgccgtcaccgggagcaaagcagcggttggcacagtggaattgatagatgtcgatataatcggtgcgcagattgcgaaggctggtgtgcagctgcgcccaaaagtcctcgggcgtttgggccatggttttggatgcaatgaagatcttttcgcgcatcccatcaaaagcggcgcccatttttttttcgctgtcgctgtatgcgcgggcggtatcgaaaaaagtcatgccgccgtcgtaggctttgcgcagaagatgtacagcttcctgcgtggaaatgcgctggatcggcagcgcgccaaacgcgttctgcaccgtggtgattccggtggaaccgagtgtgatcgttttcatgttctacaacctcctgtttttcgctcttgatccaaacatgcttcacacaatcaaacaaaccctttgctgttactttacggcccggcaaggaatttgtcaacgggtccgggcgataacaagaaaactgagccttattgtgcaaggaagaaaatacatggtgcttcttctgttgttttacaaaagtaaagcgctaaaagagtgaatccataaattatgaataaaaagttgtttttggcaaaggtggacttttgtataaatgtaaagttttatgtaaataaagttgcatttctgccgggggcgcattataataagtgcactgttattttgccggagaaaggttgtctacgcccatgaagaaaacgtttgtcacgaaatcacagctggagaaaatcgtgaaaaaatatccgacgccttttcatctgtacgatgaaaaggggatccgtgagaattgccgcaaactttataaggcgttttcctggaataaggggttccgggaatattttgccgtaaaagctacgcctacgccccgtattctgcagatcctgaaagaagagggctgcggtgtggactgtgccagtgaggtggaactgatgctggcggacaagtgcggtttccgcggagaggagatcatgttctcttccaatgagaccaccgcttcggagtatgaattggcccgtaagctgggtgctattatcaatctggatgacattacccatatcaattttctggatcggctggtagggatcccgccgctgatctgctgccgctacaatcccggcggccattttgcactgggtaacaccattatggatcacccctgcgacgccaagtatggcatgacccccgagcagatcaaggagagctatatccggctgcagaagctgggcgccaaggaattcggcatgcatgccttcctggtcagcggggccatgacgaacaagtattatcccgccttggcagagatcatgttcaaaaaggcggtacagctgcacaaggagaccggtgcgaccttcaaatttatcaacctgtccggcggtattggtattccttatgaaccggagcagaaagccaataacatcgccgtcattggcgagggggtgcgccgggccttcgagaagattatggtgcccgctggcatgggcgacaccgccatctacaccgagctgggccgtttcatgcttggaccctacggatgcctggttaccacggcgatccacgagaaacatacctataaagaatacatcggtgtggacgcctgcgc

SEQ ID NO: 2978 - DNA, 1817 bp, Unknown
  16S sequences of unknown bacteria
agcatttccgtctcggtgcggcgcagctgatagatgacccgcacacagtcgggctctcccacaccgtgaaacgcacctgccataaaaggattgtcctcgggggcgttgcaaagcgtcactaattttgcggcgccgatacagtcgcggtcctctgtcagctcggcagacattttaaccgcctttcccatcattttcaccgcgtccatatttatgcccgctttggtgcttcccacgtttaccgaagcgcatacatggtcggtctcggcgagagctctcggtatgctttcgatgagagcgtagtccccgtccgaaaagcccttctgaacaagagccgagtatcctcccacaaaattgaccccaagctcgtttgcggctttttcaagagtcttggcaaatttggttatatccgccgaggggcacgccgacgcgatcatgccgatgggtgtgaccgaaatacggcggttgattatcggtattccgtattcgctctgtatttggtcgcacaccggcacaagcctttcggcatatccggttattttgtcgtatattttggcacaggccttgtcaatgtcgctgtcaatgcagcttaaaagagatatacccatggtaacggttcggatgtcgaggtgctcctcccgtatcatgtttatggtttccattatatccgacggattaagcataacaatttcctttccgataaagactaaatgcggtgcatggaattgaaaatgtcctcgtgcatggcgtgaacggtcatgccgatttcctttccgaattccttgatattttcggcaaattccgaaaaaggaacgctgcagccgtcaatttccacctgcatgatcatggtaaacattccgtcaacgaccttttggttgacgtcgataatatttatgttgttttccgcacagcggccggaaattttcgcaagaattcctaccctgtcggcgcctataaccgaaataacagctctcatttttattcctccaaccgattttttatgaaattatatcacaattttcttttgcccacaagatttttataaaaaactctgttattttttcatttgttgtgctataatcttcaagtaaatataatttttcggggtgtatataaatgggttttaaaaatcttgttgattttcatttgcataccgacaattccgacgacggatttgacccggttatgcttatgtgcgagcacgctgtcaatgcgggtctgcgcgcggtggccattaccgaccattgcgaaattaaccgttaccgagccgatatataccgttttgacaaatcgataaggcagagctttatcgaggccaaaagggcaaaggacgccttcaaaaaccacctcattataatggcggggatcgagcttgggcaggcaacccaaaatctcgaggacacaaacgacgctctttctgcaaacgattatgattttattctcggaagccttcattgcatcaagggcgaagaggatttttggaaggtggattatgaaaagaacgatcctttcgaatttttcgatatgtatctcgaccagctttacgagcttgttcggtggaacggctttgacagtcttgcccacctgacatatcccctgagatacatcaacggtgaacatcatttcggagtcgagcttaaaaactatgccgaaaaggtggacgaaattttaaagcttcttgccaaaaatcaaaaggcgcttgaaatcaacacctccggctaccgacaggcctacggaaagcctcttcccgatctcgaagtcgtgaaacggtttaaagacaggttcccatacccgtgtgtcgatactatcatcaggcaata

SEQ ID NO: 2979 - DNA, 2173 bp, Unknown
  16S sequences of unknown bacteria
ggggcagtacttgatgctttcgtgcaaaatccgattgggcattgcgattcctcctcgtgacgggaatttccccgtttgttttgatgggaatatcttatcacgtttggagataaatctctacccacaaagcccaatctttacggaggatattacaaagggaagggaaaacaatcctagcgcgctttgccagcggcgtgatgggcagccccttagttgtcttcgttgataatgtgaaagggccgcacacgttcgggctcaggcgtctttgccaatggattctttcaaaagaggcagcaggggcaaagaaatggtcacgcgcaggcccttctgcgcgttttccgcccaagccgcgccgtggtgttgctcggcgatggcgcgcacgatgtttagccccacgcccgcgcccggcgcatcggccccgccgcggcggtaaaatcgctcaaacaaacgctcttcttctccgggcggtacgccgccgccctcatcctccacgctgacgcgcgccgtggattccgcctgttccacgcgcacaaacacgcgtcccccgcctggcgtatgttcacaggcgttcttcaacaggttgtcaatggcttcgcccagccagtgcgcgtcgcaacgcacgcgcgcgtcgccttccagcgaaaacgcgcggtctgggaacagggcggccacttcggcgatgctcccgcgcgcgatggccgccagggagtgcgcctggaaggaaaagggatacgcgcccgcgcgcaaccgctccaaccgcaaaagggaatacaccaaccgttccatgcgctcgatggcggccagcgtgcgggcggcgtgcgcgggcgcgtccatctccgtgtacaagcgcagcgcggccagcggcgttttgagctgatgggaaagatccacaatcagcttttcggttttgcgcgcttcggctcgcgcgttttcctggctttggtacagccgcgcggacagctcggagaccgcgttttccaactgggcgaacgcgtcgtcgcgcacgctcacgggcaggggttgtcccgtgcgcagcgatgcttcgatttgcgccacaagggcgcgcagacgccgccggttgtgcagcgccttccacaagcaagcggccagcgcgagggacagcgcaatgcacacggcgatcatggcagttccacccagcgatagcccgcgccgcgcacggtttcgatgcgcgccgcgccgatcttttcgcgcaggcggctgatgtgtacgctgagcgtgttgtcgtccacaaagcggccgccctcgtcccacagcgcctcgagcaaaacggcgcgcgtgagcacgcggccgcccgaacgcatcagcgcgccgagcaacttgtattccgtgggcgtcaaaaacaggctttccccgcccaggctggttgtgagccgctcgaaatccacgctcagcgccccgctcgcggcctgcgcgcccttgtgcgcgcgcaattgcgcgcgcacgcggctcaacagttccatcgtgcgaaacggcttggccacgtaatcgctgccgcccgcgtccagcgcgcgcaccacgtggatttcctcgtccagcgcggtgagaaatatgatgggaaaatttcgcccttccgcgcgccaacggcggcacagggaaaccccgtcgccgtccggcaggcccacgtccatcaggcacaaatcaaacgacccggcctggatgagcgcgtccgcctcctgcgcggtggccgcgctctttgtgcgatagccctcccgcgcaagcagttcgcaaagcccctcgcgcaacgcgccatcgtcttccaccagcaaaatggtcgcttccatggccgcgccctcctttcgcttattgccccaaaatccgtatccattataccacaaatccgccgcgcgcaaagccgtattgcgaaattgtaagaaaggaacagacgaacattcattctcaaaacccgtcatacatttcctcaaggcgctctgttgcgcagatgttttggcagtcccccacctctcatccgaatcgacgggcaggcgcttttcaaggcgacaaaaaaggccccggcgttcgtcgcctgggccttttcgctggcctccataccgctacagcctctcgcacacggccttgcaccgcttcttgtggaaggcaatgccgtaggccaaaatatcctcccggccttcgttgcgcagccgctcgccatacc

SEQ ID NO: 2980 - DNA, 1698 bp, Unknown
  16S sequences of unknown bacteria
gaccatccgagctggggacgttttgcggcggtgacacgcaatacctgcggaaaagggacagcaacctaccttggctgccaaacgacaaaggcgatgctgaaggagattctccgggatacgctgaacgatgctggaatcgcagatgcggcggatcggccggagtttccggtcatcatccgtaccggtatcaatcagttcggtaaagagatcgtatattatctgaattattcgccgaaggagcagatagtcacatatcagggaatagacggagtggagctgtttggagatacgccggtaaaggaaggagagacggtacatatcccggcctgggatctgaagattatcgagcggtgatgatgccgaccatgtttgaacgcagataagcaattgggaataaaacataacaggagcagagataccagatgaaacggttgtctctgctctatttttttattgctgattcaacaaaaaatacttgacagaattactaggttataatatcataacaatagttagagcaggctaatagaaatcagacacaaaatacggaggaagtgtatgagcgttgtaattataggtggtaacgagcgaatggtctgtcagtattctgacatttgcaggggctttggctgtaaggcaaaggtatttgcaaaggaaaatggaccgatccgtaagaagatcggcaatccggatcttctgattctgtttacaaatacggtttcccataagatggtactggcagcagcacaggaagcaaagcgcaacaacatcccggtagcgcggatccatacaagcagtgcagctgcgttaaagggcgtgctgaacgagtattgcgcataagagtttgtcaaacggagatactgtaaaaaacaggtagaagaaacgggaaaaagggggctgctatgctggaggaatatctgatcgggaattgctctccgacgcttgcatcattgaaaacggcgaatctgttcagtatgccgtatacatcagaagaagagttaacagagcagatcgcattctggaatgcacagatgaaagagaaaggactttctgtcattttgctgcgaaagcgcgctgcgactgcacttgtctatgtgtgccggaagacacggctgcaggaaaatatattaaagccgggcgtgctgcattttctggagagatacgggtaccgcagtacagatgcagatgaagcgattgtacatttaaaggaacgtttatccaatcttgagggagaaggatttccacatgagatcggaatttttcttggctatccgctgggagacgtcattggctttattgaaaatgcaggccggaattttaaatgctccggatgctggaaggtctactgtaatgaatgtgaggccgtaaaactgtttgcaaagtataaaaaatgcagagacgtctatctgaggctctggcagcagggaagaagtgttctgcagctcaccgtagctgcatgacataaattaagctttataagaaaattttataagaaagtggtaggaatgatgagtaaaattgcagttgtatactggagtggaacaggtaacacagaggcaatggcaaatgaggtggccgagggtgcaaagagcgcaggcgcagaggcagaggtattcacaccggatacattctccgcagacaagatggatgcctacgatgcagttgcattcggatgcccggcaatgggagccgaggaac

SEQ ID NO: 2981 - DNA, 1507 bp, Unknown
  16S sequences of unknown bacteria
ccggcggttgtgggtccatcggcggctgcggatcgaccggcggctgcacgtcgaccggcagcggagccgggaccggcttgccgcaggcaccacagaattttgcaccgtccagaagcggcgcggaacagtacgggcacagcatagcgcatccctcttttcctttcagtttcctctattatatgcgaaaagccggggaattgtcaacaaaaaccggcgttttcccgggccgcacttgacagggaatttcccgctgtgctactatgaaaaaaaagcgccacggcttgccgtcgcgcagtgaaatgaggtggcgtaatgcgcaaaacaatcccatctatggacgcttggctgcgggaggcgaaggcccaggccgggcaaacaggcgtcgggatgtatctgatccacaacggcgttgtccgtgccacgcctcgggcccaagcccggcacggtgcgcaagggctggccccggtggcagggatggacttttcttacgacgaagccaaggttcaagctgctatcgccgaaacctaccggctgcctggcatcttttacgcccgggtctggctgaatgaaggcaggctttctctcggcgatgatatcatgtacgtcctggtgggcggggatatccggccccacgtcgtcgacgcgctgcaatttttagttgggaagatcaaaacggaatgcgtctgcgagacggagctcccggcgccgggcgcggaaggaggaaccggtgcatctactgtttaagcagcggctgttttcctggtttgacagctatgacatttacacggaagacggcagcgtctgctacaccgtcaaaggtcagctggcctgggggcatctgctaaaagtctatgacgcccaaggccacgaggtcggcgaggtccgggagcgactcttatcgctgctgccaaagtttgaggtctcttgcggtgggcagtatctgggctgcatccgcaaggaattttctctgctgcggccccggtttgatattgactacaacggctggtccgtccagggcgactggatgggctgggattacaccatcaccggccccggtgggcggtgcatcgccaccgtctccaaggagctgctgcggatgaccgacacttatgtgttggagattgaagacacagccgacgcgctgcatgtcctgctgttcgccctggccatggatgtggagaagtgctccagcaattagaaatcacaagctatcgcaaggccccgcctgtctcgtaggagatgggcggggccttgtgtgtttttcaaacttcctcccgcacaagagggaacagcgcggggtcaaacagtcgccagggcggcgcatccggcggcgggacgaaaaattccagcggctcgcccgtcttcgggtgggtgaatcggagcaggctggaccagagggcgatctcgcagccgtccggccggtccggcaagggggtgtatttccggtcgcccaccaggggcaggccgcggcttgcaagctgggcacggatctgatgcgtccgccccg

SEQ ID NO: 2982 - DNA, 7269 bp, Unknown
  16S sequences of unknown bacteria
cagttggtagagcagctgattcgtaatcagcaggtcgccggttcaagtccggccaccagctccaaaacctctcacgaaattattttcgtgagaggtttttgttttttaacttttaaaaatgtccataataaacttcaatggagggttacccatgtccgaaaagttgaagaaatatcaggaaaaaagagattttgtcaagacgagcgagccgaaggggaagcctgcgaacggcaagcaacgcaaaaagaaaggtttgaaattcgtggtacaatatcacgcagcgcggacaacgcatttcgactttcggttggaatggcagggcgtgctgctcagttgggctgtgcccaaaggcccttcctataatcccaaagataaaaggctcgcggtgcacgtggaggatcaccccgtggaatacgccgatttcgagggcgcgatcccgaaaggagaatacggcggcggtacggtcatgctgtgggacgagggcgcgtgggagccgcaggaagatttcgaagaagggcttaaaaaaggctctttgaaatttaagttgtcgggagagcgcctgcacggcaaatgggcgcttgtccgcatggctccgagggaaaacgagagcgcggaaaattggctgctcatcaaagagaaggacgagtttgcggcacccggtacgggcatttccgactatgatacgagcgttcgctcgggacgcaagttagagaagatcgcggcggaggaatcgtcgcagacgaaagtcattccgtttcaaaacctttccgtgcatctcgcgcgatccgtagataaacttccgcaggaagatggctgggcttacgagatcaagtacgacggctaccgcatactggcgtacgcggaggacggctccgtgaaactgatgacgcgcggcggccacgattatgcggcgaaattcaaaagcgttgcgaaggcgttggaaacgtggagcaaggggcgctcgatggtactcgacggggaaatgatcatagcggacgaaaacggaaagagcgattttcaggcgctgcaaaactatctgaaaaagccgacgggaaaagaattgacgttcatcgtctttgacctgttggcggccgacggcaaagatctgcgcgatctcccgctttccgagcgaaaaagcgcgcttgaaaaattgatgaagggcgcgcccgcatccgtcgtttacagcaaacacacgctcggcaacggagaggagatctttcaagccgctgcaaaaatcggtctggaaggcattgtcggcaaaaaactcgattcgcggtacagtggaacgcgaaacggcgattggatcaaaatgaaatgctataaccgtcaggaattcgtgatcggcggttatcagatctcggagaaaaaagcgggcgggatcggcgcgcttctgctcggggtgtacgaaggcagaaaattgattttcgcggggcgcgcgggaacggggttcgggcaacgggatgcggagtcgctgctgaaaaaattcgacaagttgcgcacggaaatatctccttttaaaaccgcgcccgaatttgacgaaacggaaacggtttttctgaaaccccgtctggtcgcagaggtgcagtttgccgaatggacggacgaaaacgtgttgcggcaggcgagtttcaaggggctgcgcacggacaaaaaaccgacggaagtcgtgcgggaaacgccgctttccgagaaggacgtaaaatcggaaccaaagagggaaacgaaaaaagaggcgaccgtgcttggcattcccgtcagcagtcccgataagatcgtttttaaagatcccgaagtgaaaaaactcgaaatcgcgcagtattacgccgccgtcgccaagcggatgatgccttacgcgggcgggcgtgtgctcagcgtcgtgcggtgtcataagggcgtatccgccgcgtgcttttttaaaaaacaccccgtgtcggagggcgaggggacggcaattttagagatcgaaaacagcgaaggcgaaaagagcgattatttttatctgaaagacgaaaggggtctgatctcggaagcgcaactcggcacgctggaatttcacgtctggggcagccgtgcggacgatctggaaaggcccgacatgatgatcttcgatctggaccccgacgagggcatggggcttggtcagatccgacagggagtcaaagatctgaaaaaagtgctcgactcgctgtccctgcaaagttttttaaagacgagcggcggaaagggatatcacgtcgtcgtgccgtttcgtccgacggcggagtgggacgcgttccgcgatttttctcggcaggtggcgcagttgatggagaaaaaatggcccgaaaggtatacgagcaacgtgcgcaagatcaaaagaaagggtaagatctacatcgactgggtgcgcaacgggcggggggctacgagcgtcgcgccttattcgctccgcgcgcggcccggcgcgcacgtttccatgcccattgcctggcgggaactctctacggtggcgcccgacggcgtcgatatgttcgacgcgctcaaacgactgaaaaaagccgatccgtggaaaggatttttccaaatcgggcagcagttgcaaatttagaaaagacggcggcgatgccgtctttttcattgacaaatcgcattttgtcatatataatcatggatatatattacaaaaggaaagagaggatcgaaaaatgggagtcattgcgcaacgcacgttcaacacggcgtatatctggctggatacggcgtttttggtgttattttgtgtgctgttgtttttgagcaaaagaaaattgacgttgctgttcgcgctgtgcggcggcgtgctgtactttcttgtcgattacggcatctttcatctgctgacgcattcgcgtaccatagagggcggcagtatgttctgggtactcttgtggatgtccatgagttacggcatcacaaactttgcctggatctggctggctctccgtaaagacgaacggttcgccgaatggacggcgctcattctcctttggtggctcgcctgtcccatgctggccggcatgttcgggaacgcgcctgagatcaccattgcccgcaccacgggcgcttatcacggatttatggctttatttttgttcctttcctatctcgccgtgatcggctggaatattttccaaaaggaaaagaaataccgtttccggatcctgtggctcattgcgatcggcgtggccgtgcagttcggctgggaattttccctgcttatcggaggtatccgttcgagcggcatcgtcgaaatggcggaaaaattgcgagtgctcgtcgtaaattccctgttggaaacaaatctggggttgcccgcgatctactgtatttaccttttcatatcccgtaaggtaggggaaaacctcgaaaaactgcccgcggcgggctttttgacccgtttggaggaaaacaacgccaaacgatattttgccgaaaaaaaagcgccgttgcagggcgaatgaaattgataaagaaaggcgcggagcaatttgctccgcgcctttttttgtcttgacgaatcatgaaaaaattgttagaatacatatgtattgtaagaaggacgcgctctgacggaggttttatgaacggagaattgctgatcgaacggctgatcgcctatgcaaaggcgtttttgcatttacaggcttgcgatgaaatttatacgcgcaatcttcttttgtctaaattcgggctgtttgcgccttacgacggcaatgcggaaacgagcgacgtgtacgaaatgcgcgttcccgacgcgctgtacgcggagatctgcgcgttcgcccgcgaacgcggactgtgcgacgcgggggaagaggcgcgctttgccgcgggcatattcgggcttttgacgcccccgccttccgaagtgaaccgcgctttttacgcgatcaaagcggagaaaggcgcgcaatgcgcgtgcgattatctgtacggattatccgtgcgcaacggctatatccaaaagaccgccatcgaaaaaaatctcgtatggacttacgacgacgggcagaacacgctggagatcacggtcaatctgtccaaacccgaaaaaaacaataaggacattgcaaaactgctcaccgcgccgcaaagtaaaagatatcccgcgtgcgcgctctgcaaggaaaacgagggcttcgaagggcaaggcgcacaggcgccgcgccagaatatccgcaccgtaaagacgatcctgggcggcgagccctggttcgtgcaatattctccctacgcctattatgacgagcactgtatcgcgatctccgaggcgcatacgcccatgaacgtaaacgattccacggtggaaaaggtgctcgatttcgtggatgcgtttcccaactattttatcgggagcaacgcctctctgccgatcatcggcggctccattctcaatcacgaacatttccagggcggcaggcacgaaatgcccatgcaccgcgctgaatttgacgttttatacgaggagcccgcttttcccgatgtgcgcgcgggtattcttgattggtataacagcgcctttcaattggaaagcgaaaaccgcgcgtcggttgcggcgctcgcaaagcggctgatcgcggcgtggaaaaaattcgacagccctgcctgcaacgtactttcgcacagcggcgatacgccgcacaattcctgctcgcccatcgcgcgcaaagtcggaggcaagtacgtagttacgctcattttccgcaacaaccgtgcggacgaacagttccccgacggcattttccacgtgcacccgcgctatcacaatatcaaaagcgagggcatcgggctcatcgaggcgatgggattatttatcctgccggggcgtttgaaggcgcaactcgaagagatcaccgatatcgtggcgggcgcgccgtacgatgcgtcggcgccggaagaaaatacgcatcccttatatttgcaccgcggcatgataaaggatctgctgcaagagggtacggcggcaaaccgtgaggcggcgcacgagcgcgtcatatcctacgtcaaccgcgtatgcgcgggcattctcgactgcaccgccgtattcaagcgcgacgaaacgggccgccgcgggttcgacgaatttttacgcggttgcggatttcaaagaacgtagggggaatattcgttcaaagccttgcgctttcgcggtgctttatggtataatatggtatattgaaaaagcgttcggcaaggaggaacggaagttatgcgaatcgatcaactgcaagcggcatcctggtgggagaaattgaaagcgctgttcgacagcccgctcgcccttacgcttttggcggtgtgcgtggtactgtttatcgcgatcgtctgtctgatcgccgtgctttcaaggcgtattcaagtcacgtacgtgtcgtgcggcaaggaagatattaagtcgtattacaaaggcgcgcgcgccgatcagtccgcacccgaacagcgcgaaggctatcgtttcggcggttggtaccttgacgaaacgtgtacccaaaaggcgcccgaaactttgcgcgtcaaaaagaaaggcattgtgctttacgccctttgggaaaaagaagaggacgaagaggccgcggcagaacctgtaacggaagaaactgccgtcgtggaagaacccgtaacagaagaaactgccgtcgtggaagaacccgtaacagaagaaaccgccgtcgtggaagaacccgttgcaaaagagcctgccgcggagcctgttcccgaagaacccgcgcaggaagaggcggaggaggaagaggacgaaacggaagcggccgaaggcgacgagtttgacaacgcgctcgttacgacggtgacgggaaccaaagttttcgtgcagtaccgccgcagtttcacggcgcgactcattcaggcggatgacgagatcaaggatatctataattcggtgcgcaacgcgttgttgacggtcagcggggtaaaggagcgcacgagttggaactataacagcatcaaccgcgggcgtaagcagtttgcgaaaataaacgccaaccgcaagagtcttattctgtatctcgcgctgtcgccctccaatatagaggacaaataccgtttccgcgacgtgagcgaaaagaagagatataaagacgtacccgtgcgttataagatcacgggcagccgcagtttgcaatacgcgctggaactgatcgaacaggcggcggataacaacgggctgactttgcaggaatttcctttcgagcagaatctttccattccctacgaaccgcgggaagatctcatcaaaaagaaactgatcaaagtctatgcgaaaaaagattcgggcgaaaccattaccgaagagcaactcgaagagttcatcgaagagggcgctacggtagagagcctttcgtcctttaccgtcacggataaggtgagcgtgctcgaagcggaaaaactggtcagcgacgcgactgccaaacagttgatggctcttgcggacgaggtcgcggacaacacgccccgcgtcgcgcaggcaaagcgcggctatatcaatctcgataccattgccgccaacttcaaggaagacgagatcgtcaatttacagacgctcaaagagaaaaaactcgtgcagcctaagatgagcgccgtcaaggtgctcgcgcgcggcagcctggataaagcccttaccgtcgaggcggcggatttttctcttcccgccgtaaagatgatcgtcataacgggcggcaaagtcgtcaaactgaaaaaggtatgatagaaagcggggagcgcttccccgcttttttcgatcgagattgtaaactaattatttcaatatggttgacaataagatcgcgatatgataaaatcatggacatgagtgtaaaacaggatgttttaaaagtattggaaaaaaggcgcggggaaagcgtttcgggagaggagttggcggatgagttgggcgtttcgcgcgcggcggtgtggaaggcggtgaaggggctcaaagcggaagggcacgccatccatgccgcgaccaatcggggctatcttctcgaagaggattccgatgttttgaccgccccgtcggtgcagcgttttctgacgcatgatttcgacgtgatcgtggaaaaaaaagtgacgtcgaccaacgacgcggcgaaaaaactcgcgctcggcggcgcgaaagaatggacggtgatcctgtccgaagagcagagcgcggggagagggcgtttcgcgcgttctttttactcgccgaggggggcgggcatctattgcagtgtcgtgctccgtcccggatac

SEQ ID NO: 2983 - DNA, 32759 bp, Unknown
  16S sequences of unknown bacteria
aacggcgcttcgccgccgttttacgggacgcccctcccggggcgtcccgcctgccggccttcggccggcgcggcggggccgcggcccccgggctttccccaatttccgccaaggaggcaccccatgaccgattttgttcatctgcacatccacagcgaatacagcctcctcgatggcgcctgccgcatcaaggggctggtccagcgcgccaaggccctgggccagtccgccgtcgccatcaccgatcatggtgtcatgtacggcgtcatcgatttctacaaggagtgcaaaaaggagggcatccgccccatcatcggctgcgaggtctatgtggccccccgctcccgcttcgataaggtctaccggctggattcctccccctaccacctcatcctgctgtgcaaaaatgaggtgggctatcgcaacctcatctacatggtctcccgcggcttcaccgagggcttttacaataagccccgcatcgaccgcgacctcttaaaggaccaccacgagggcctcatctgcctttcggcgtgcctggcgggcgaagtgccccgggcactggaggccggcgattaccaaaaggcccgggaggccgccgcctggtaccgcgatctcttcggcccggaagattactacatcgagctgcaggaccacggtatcccggagcagcgtcagatcctcccggatctcatccgcctggccggggagctcggcgtggggctggtggccaccaatgacgcccactacctcgaaaaagaggacagccgcatgcagtttttgctcacctgcatccagaccggccacaccgtcaatgatgagcagacgctggaattccccacccaggagttctatgtcaaaagcggcgatgagatggccgagctcttccgcaatgtgccggaagccctctccaataccgtcaagatcgccgagcgctgcaatgtcgagtttgagtttggccacaccaagctgcctctgttcaatgcccccaatggcgaggataacgaaagctactttcgccgcatgtgccatgagggtctgctgcgccactacggcgaaaacccgccccaggaataccgcgaccggctggaatatgagctttccaccatcagccgcatgggctatgtggaatactacctcatcgtccacgatttcatccactacgccaaaagccacggcatcccggtcgggccggggcgcggctccggtgcgggcagcattgccgcctactgcatcggcatcaccaatatcgaccccatgaagtacaatctcctgttcgagcgcttcctcaatcccgagcgtgtttccatgccggattttgatgtggatttctgctacgagcgccggccggaggtcatcgattatgtcgtccgcaaatacggcgccgaccatgtggcccagatcgttaccttcggcaccatgctggcccggggcgccgtgcgggatgtcggccgggccatgggcctggcctatccccaggtggatgccgtcgccaagctcatccccaatgagctgcacatgaccatcgataaggccctggaggccaacagcgagctgcgggccatgtgccaaagcgacccccaggtggcggagctcatcgaaaccgccaaaaaggtggagggctttccccggcacgcctccacccacgctgccggcgtggtcatcacccgggataccgtcgatagctatgtgccgctggccaaaaacgatgaatccatcgttacccagttcaccatgaccaccttggaggagctgggcctgctcaagatggactttttgggcctgcgcaatctcaccgtcatcgccgatgccgagcggatgatccgccgccgggaaccggatttttcaatggacaagctccccgatgatgaccccgaggtctacgagatgctttcccgcggcgattcctccggtgtgttccagctggaatcgggcggtatgcgccagatgcttacccagctgcgcccccagtccatcgaagaccttaccgccgccatttcgctgtaccgtcccggccccatggattccatcccccagtatgtccgcaataagcagaatcccgccgccgtccggtacaagaccccgctgctggagcccattctgggcgtcacctacggctgcatcgtctatcaggagcaggtcatgcagatctgccgcgagctggccggttacagctacggccaggccgatctcgtccgccgcgccatgagtaagaaaaaagccgatgtcatggaaaaggagcgcgggcacttcatcaccggctgcgccgccaatggaatctccgaggccgtggccaacagcatctttgatgagatgagcagcttcgcggcctacgccttcaataaatcccacgccgcctgctatgccgtggtggcctatcaaaccgcctatctcaagcggcactacccccgggaatacatggcggccctgatgaccagcgtactggattccaccgccaagctcatggaatacatcgaggaatgcacccggctggagatcccggtgctgccccccgatatcaaccagagcgatatggtctttaccgtcacgccgcagggcatccggttcggccttctggccatcaagaatatgggccgcagtgtcatcgaagatattctgaaagagcgggagctggatggccccttcaccaattttgtggagttctgccgccgcacctcggccggcgatctcaaccgccgcggggtggaaagcctcatcaagtgcggggccctggaccacctgggcgccaaccgccgggagatgatggaaaactacggccccctggccgatgccatcgcggaagaaagccgctacctttccggcgggcagctctccctctttggggaaggcggcgccaccgccgattatcggctctccccccgggaagaatacccccatgccgagctgctggcctacgaaaaggaagtcaccggcatgtacctttccggccaccccatgagccagtatctgcccctttacgaccgctaccaggcggtgcgcatcgcccggctgcaaagcgctgagaccaatgccccctacgataatgcctgggtcgatattttcggcatcctggccgataaaaagatgcggaccaccaagcggggggatatcctggccctgctgacggtggaggatatgaccggcagcatggaggtcatgtgctttggccgggtctactcccaggtcagtgccaagctggtgccgggcgaaccgcttttcttccggggcagggtctccctgcgggaggaggacgacaccaaaatggtgctggagcgggtctttaccatcgaggagcgccaaagcgccccgcccccccgcccgccgcagagccgggaaaagggcggcagcggcaagcccgcggccgaacgcccccaaaagggcggcaggctgctcatccgggtgccgcagatggagggagaacagtgggaaaagcttcagctgctgttttccatttttgaaggggagacccccctgctggtgcgggccgccgataccggccgcctgctgaaggcgggagaggaatataataccgatgccaacccggtgctgctgggcgagctgagacgggtgctgggccaggagaatgtagccctgctgccgccggaggctcccaaggccccgccggaaccggctttgcagtaagccaaccaaaaggaggaaataacatgagcgaaaccaagaagaaaacctttgcagtactcaccagcggcggcgatgcccccggcatgaatgccgcggtccgcagtgtggtacgcaccgccctgcacaagggccacagcgtttatggcattttccatggatacgagggcctaatggaagaccacatggacgagcttcaagagcgttctgtcagcaatatcatcaaccggggaggcaccatcctgtataccgcccgcagtaaggaatttatgaccgaagagggccagaaaaaggcggcggccattctgcgctcccgcgggatagacggcctggtggtcatcggcggcgatggctccttccgcggcgcccaaaagctctcggccctgggcattcccaccatcggcatccccggcaccatcgataacgacatcgcctccaccgagtataccatcggctttgataccgccctaaataccgctgtgcaaagcatcgataagctgcgggatacctcccaatcccacgaccgctgctccgtggtggaggtcatgggccgcaatgccggccatctggccctgtacgcgggtctggccaccggcgccgtcgccaccctcatcccggaacgcccctttgacctggaccgcgatgtggtggaccgcatgaaggccaccatgaccaccggcaagcatcacttcatcgtggtggtggccgagggcgtgggcaacagcaaggatatgtgctactacatccagcagcgcaccggcgtggagacccgcctgacggtgctgggccatgtgcagcgcggcggcgacgccacggccatggaacgggtttatgccagcgccatgggctaccgtgccatcgagctgctggaagaaggcgtgggcagccgcattgtcggggtcaaggaaaaccgtatctacgatatcgacattgatgaggccctggccatgaagaaggatatcaacgagctgttctacaaggtcgcaagggagatcagcatctgatggaaaaacaactggcgacattcgaagatttttcccggctggatatccgggtgggcaccatcctgacggcgcagccttttcccaaggcccgccgcccggcctaccagctcacggtggatttcggcccgaagatcggggtaaaaaagtcctcggcgcaaatcaccgaccactaccgcccggaggacctgccgggcatacaggtgctgggggtggtcaacttcccgccccggcagatcgcggattttatgagcgaggtactggtgctgggtacctactccgcgggcggagttattctcatcaccccgcagcagcccgccgccaatggtgaccggctgggataaatattggctttcggcaaagctccatcgggtttccccggtggggcttttctgcgccccggcggagtcggcggcaggggagaggttcgggccgcaggcccggcggcgcagccgccgcagcgggcttcgcccgctgagcccgtcccctgcgggggacgggctggcctgcggcccgtcctgccccttgcagggactcacccccgcagcagggtcagcagctccgccgtgggcaggggcttggcggggcggggcggcaaatcgcccagtaccgcctgcagccggcgcagggtttcccggccgggcagccgcttgccatgctctatcatgctgatggtggtgccgcccaccctgcacagtgtccccagctgccgctgggtcaggcccagctgccgccgcagctggcgcagtttgatgccatacatcgtcttctctccttctcggtcccggattggggccgggaagtacctccccagcccctgggatagcttatcgtagtgattttttcgggaatgtcaagcctttcgacaaaattttatctgccaaaaatcagtgaagttttttggcgaccgttttatgggactttgcaaaaataacggttgacagacggcaaaaagcggagtacgctaagaagcaagagaacaaatgttcttgacaaaaacgggtcccttcgccgaaagctaccaagccgcatcgagaaaaagagaggaaaccgagaaaacatgatgggaattgccgaactggccggggagtaccaccgcagcgtggaactgctggaggaccggctgacacagctcaaggaagagatcaaaacagcacgaggaccgcattacttcgacctgaaacagcgcattgagctgctgcggttcgagctcgtggataccagagaaacggagaggattctgcatgactactacaactaaattcaccccccgccccttaaaacgcgtcgcgcgctgcgtcagtaccgccacgctggaattttacatcccgcgggaggagagcggccccagcgaggaacggctggccctgcgccggctgctgcagtacggctgtacccgctgccttaccctggctcagcagcagcttacccggctgcgctataccgatggcctgacggtaaccgccatcgcggagcagatgggcctggcgccctcctcggtcagccgcagcctgggggtcatccggcagcggctgtaccgctttaccgaggaggccggggaaataggccagctgtgcgatattttgcgccgccagctgcaataattgggccaaaacgtgttgcatttttggggtctgcggcgttatacagggtaggggggatttgtatccttggctggttttcgccgtcccccaggtccggccccgcaggggccgcggctgcgccgcggccggggcgggcagcgcccgcccaccggcctttggccggcctgcggggccggacccgggggatcggcagaaaaccctgcccaggcacaccatgcaaacccgcccaccatacattctacggatatagaaaataaattctacacttgcagaatgaccattgacaaccgcattctacgatgatagaatgaagatgaattctaaacccgtagaagatgaaggaggcccctatggaactgcccgagaaaaaactatccgatgccgagctggatatcatgctggccatctggcaaagccctccgcccgtgcagcgcgcggatctggaggagcagctgcaaagccacaactgggccgataccaccctgctcaccctgctttccaagctggtggaaaagggctatctttcggtggagcggcagggccggcacaacctgtaccgtcccctagtcagcgaggcggattaccgccgctgggccaaccgcagctttttggggaagatgtaccagtcctcccttcgccgcatggtggcatccctggtggaaagccgggacctgaccgaccgtgatctggcggagctggaggaatttatagccgggcagcgccgtgcccgtgaggaagagaggagctgacaaggatggaacgactgatgaccgccctgctggagctgaccctgccgatggcactggtgatagcggtgctgctggcggcaggcccgctgcttggccgccgctttaccgccaagtggcggtactgggcctggctgctcatcgcggtgcggctgctgctgcccgttggcatcaccctgccgcagccggtagttaccctgccgcagccccagggagagttcacctacccggtgagccgggaggagcccgcccccactgaacccgccccggtcggagacccgatccaggtggtgccgggagcggcggaaaacgacccctaccagcagatcgaggcggggacgaccgccccgaccgggccgagcgccgaaacgcctaaaccggcggagccggctatcacccccaccccggctggtacccgttctatcccggtgatggaagcggtgggctggtgctgggcagcggggaccgcactgttcctgctgtggcagctgggcagctacctggcgctgagagcaaagctctcccgcagccgccgccccctgaccgatgaagccatcctggctgtgctggaaagggaatccgccgcggcgggactgagaaaaccgctgccggtctatacggccgccgtaggcagccccatgatcgttggggccattaagccgaccctgctgctgccggagctggagctctctacggagcagctttcgctggtattccgacatgagctgatccattaccgccgccgggatatctggtataagctgctgctaatgctggccaatgccatccactggtttaacccgatggtgtggctgatggtgtatgccgccgaccgggacctggagctttcctgcgatgaggccgtggtggccgggcgggatgaagcctaccgggaggaatatggccggtgcctgctggctgttgtgcgggccggcatgagccgccgcaccctgttcaccaccaatttttacagcggcaaaaagacgctgaaaaaccgccttgccaccatttttgataccacgaaaaagcaccggggcacactggcgctggcggccctgctgctggcggcggctgtggccggttcgctggtggcctgcacccccgatggcgggaaaaatcgttacaacatcgacctgaacgatatggacgccctgagccgggaatacctggcgccgctggcggccatgggtgatatctactggtccggctaccaagagctgaaatccggaccgctgctgaaatacgccatctatgagctgtacggctataccggcgaggagaagctggacctggccgccgcctatggcacagccgatgccgaaaagcgggcggagctggccaagttgatggacaccaactacgatgccagcggcaagctgcccaacgcgcagaacttctacctgccgcaggaggaggtcgcggccgcgatccagaagcactttgatatgagccccgaaatggcggacgcctctctgaaggatctccacaactatgacggctacttttgggtgagcccgtggaaactgggggataacctgtttgcctatgcccgggaggccacgatcgagggggataccctaaccatccggtacagcctgtatgaggcccagcccggcgatgagggcttcctggcgcagcacatggcggactatacccagacccacgagagctgcggccggtatgccatcaccatacggctggaggaggatggcggctggaaatacatcagccgggactatgacagcgagacagtggtgatgccaaagccggagggcgagctgcaggtggagccgagtgatgacccggagaccgccggctgggaactgattgccaccaaggccgaatactacgcgtcggatacctatgtttttattgatggcagcaccgaaggctgccgcctgctgggctggggacagcagcaggtgagtgtttaccgcgctgaggacggttatcacctttcgtactggcggacggaaccgctgaatatttccggcctggaaaaccccgaggtaacccaatggaacggatatacttctgagagccttatcacaccggaggacgcggcgcttttcaactttgaggatatggtcatctacctgaacccgaagggcgatggcggatattcgctgtacagccccagtcggaacagcagtattgccattatgccggttgattcgacggggatcctggtggagcagagcggcagcggactgattgccctgaatgaggaggcaagctgggtctttgcggagggcagccgctaccggctttttgtgagttaccttggcatggatgatgccgacggctataacaagtataatttttacctgtacgacagtgagacccatcatctgaccaccctgctggagaataccccctatgagagcttccagcggatctcggacgatgacgacggcatgctgttcggtatcatacggcaggatggcctctatatttacgacgcggcaaagccagaggcgccgctcatggtgtatgataagaccaacctgccgatggatggctgtgacgcgatcaatattgagtatctctacgctgacgatcggggcggggataccctggcgctgacctatttcccctataacagcggcgaggtgcccgatgcctggaacggggaatacaagaagagcagcagccactggaaggtggcggtgctggaccggaatgacatcaccgagccggtgcgggtgctgaccctgccgcagtatgtgtaccgcaattactggggccaccgggatatgggccaggtcatcgtgcgggatgggctgatgtattacagcaactactatgatgaaaacggcagccgctacctgccggacggcacccagctgtgggagcgctggtgcctgaacctcacgaccggggagagccagctggccagcaccaatgacccgaccgccgtatcctatgccgatgaaaagtttattgccaaggccaaggcgatgggctataccgatgaaatgctggagatcatgaaggcttcccgtgtgtcggcttccgatatcctaagcggaacaggaaccggaagcggcagcgaggacttctattccccgggcgccaaataccgggcatacagccgtgagatcaacaaagagcatgataaggcgatggtggtgctgctggacagcagcggcagtatgcgggtggtgccgcaggtgttttatgacaaaaacgattcctatgggaatagacttacctatatgaggctgggctttaccgcggagggactgctgtgggtcagcgatgaccggggcgtctattactacgacccggcggccattatggcggtggcggaggaccgcagccccgtttacagctggagccccagtgaactggtaaccggagatgacattccctatgtgatgctggtaagaggctaccgggcagagaagaggatcgctgtcctttggacggctttgccggcagactgggacggctggagcatgctgcccggggatacgaccattcacgcggcggtgctggatagcaccggacagctgcaaaatgactgggataccaagatcaatccgggacgttacgaagagggcgggccggttcgcattaccagcaatgagcagaaggacggctacctgtgcttctatgtagatggcaaacatggcaaggatggtgcatcctacgagctgaacctgacgaccggtgaagtgaacagaacctaaaggaggacaaaaaaccgtgaacaagagaattttggcgctgctgctggcggcggtactgctgctggcggtggggtgcggaggaagtgagaagatcctttccaccgagggggtgccgcaggaggtgctgcaaagcgcccagtacaaggcggcgctggccgaggagacggcgactgtcattgcctacaactatgtgccgctgaccgacagcgctccagtgcgggccgcggtaaaaaagatgcaggctggggaggacgccgagctgcggtattataacttttatgaccgcaatgactgccaagggatagatggcatgcggctgaccgtaaaggacggggtggcggcttttcaagaggcgtcactgaccggctatggcgacaccgtggactgggaaaatgtgctgtaccagcaggcggaggagatcaagctgaacagctgcggcgagctttctcttattgagagcatggatcatacatacatagtcttttcgccgctggatacctatgaggactacaacaagcgctacgagctgaccaagacctacctatacccgctggcggaggggtgtacactgaagttcgcttcgccggaggggatcaccgatccattgtggtgggcaagattgtgctggtttttgaccgatggcgaaacggactacccggaggggcatgaggtgcctatcgatgaaatcgaggaggtgctgctgaagtggtttgacatcagcgaggaaaagctgcggagcctgctggaccccgatgggaacgggacaatgctgtgggtaacagagacgggcattagctggtcatgctttgccaaagaagcagtgcaggagggcgacctgctgcggatccgttacggatttacctttaatgggagagagcccaactacaatagggaactgaccgtaaggatagcggaggacggcagctggaagtatgtgagcaaccgcaccgtacctactgagctggagaatggtgtggttgcgatgagtatcggcggaatgctttccggcagcgggtggcagccgctgtatacctgcatggtgcaggatggtgatggctataatgaggtttttcatgccgctatggagccaaagctactggcggacggcatcttggcgataccggtcataccgggaacaagctataaggacggcgcgcccattgcggtaatgatgttgcacaccgatggcagctatgaggtgattaaaacgcctctgacctgcggggactggatgaagatgagttactcaggtggagagattcggtacaccagcaccgaaactgcgggagagtcacttatcattcgaacggagtattccaccgatataggggtgagaaacccctacaaccggatagaccggctggtagaaaccgaggtatggagcgacggtcgggtggaaagccgggactatgtgccggagggcagccgatatactatgctgaaaagtccggatgggcagcacattgcggacagtgccgaaaacggcagcctgaccatcaacgggacggtggtgcttgataccagcttgaatggggaagatcagggacttgatggctattatgcaccggagctatggctggataacgaccggctggtgatcagcagcaacgactaccggcacagcaatgattacgggatttacagcctttccactggggaggtggtttggttgaatctgggtaaaatgaacttgagcagtctttcgggcatcatgctgttggacggcaagctgtgttggacggcacgcgaagtattttttaccgatgaagaaaatgcaggaatatgggaatgggcgttttacagtctccccgtggaggagctgccctatggtacccccacccgcgtggtgacggggcagcattacggcatgaagcaagacggtcgcctgtggacagtggaaaccaactataccgtaacagggcatcatcttaccgtgcgcgccattgacccggaaagcggaaaatcggcggagttggagcttccgacggcggaatggctggatggcgtagagcagagcagaagctggacatgtaacgccatcaaaatgacagcacaggggatggtgctgtgttgcacccagtacataggggaggaattctacgggacggattggctcatcatggtgccccatgcgatgctggataaaatggagtggcagcggctgcccagtgtgctggactctgccgaggaaatacccctgaccgagatcgaggagatttttggcggacgatggcaggacatggaatacggtgatggctacacgctgaccatctaccgggatggtgacgccatttactgccggtgtgaggatatggagccgcagcagttggtgaaagcttataagaccgggaaaacgggatattacatcacgacccggcgggcggatggcaccaccgacgcactggcgctggataccggtaagcccaaggataataagatcacggcgatgctttatgagtggaggaatttgacctaccagggcgaagcataaccccaaaagatacctgcaggctgctgctttgtggtctgcgggtatttttgagcctgtgcagggccgggggcggggcgcagccccaccgcccgcagggcggtgaaagcaggcagagcctgctttgctccggcggagccggagcgagctgcgccccgtgcgagccccctgcacaaagcccttaaaagcggcaggaaacaggggagaggcatcttgcaccgggggcggggactgtgctatactgggggcggaggaaaccacaataaacggaggtaaaaatgatggataagaagaccattgccgcgatgatagaccataccctgttaaagcccgaggccaccccagcccagatcgagaagctgtgcgccgaagcggcggagtatcactttgccagtgtgtgtgtcaatccggtttatattccgctggccgcccgcctgctgaaagggaccggtgtaaaggtttgctgcgtagtggggttccctttgggcgccattgccccggagcagaaagccgccgaagccgccagttgtgccgccatgggcgccgaggagctggatatggtcatccatgtgggtgccgcgaaagccggcgattgggcgctggtgcagcgggatattgagggcgtggtaaaggctgcggccgggcacaccgtcaaggtcatcattgagacctgcctgctgaccgatgaggaaaaggtgaaggcctgcgaggccgccaaggccgccggggcgcattttgtcaagaccagcaccggcttttctaccggcggggccaccacccacgatattgccctgatgcgcaaaaccgtggggccggagatgggtgtcaaggccagtggcggcatccgggactatgcgaccgcgatggcgatgatcgaagccggggccaaccgcattggcgcttccgcggggatcgctattgtggcggccgccgaataacggcacaataagcagtataaagtcgaataatattacattttgtattatatcaatgcgaaggagtgagcttatgatcaccatttttaaccgtcgtcagctggctgtcacctatgcgctggaggaaaagatccacatctgccgggtgctggcagagcagaatattgcctacctggtacgggagattcaccgcaccgcgccccatgctatcacctcggagcggccgcgagacggcagctttggcaagcaatccgagatggtgaccgcttacttcatctatgtaaagaaatctgactttacagctgccgttaaggcgctgggggccaagaccgcggaaaaatgatctgccgcaaggcaaaagaaaaagtcctcccagttggggggactttttgctagggggatttactgcattttcttttggcattcggggcaaacaccctccagcaccaggttcatctgatgcacctggaagccgcagccgcccttcagggcgtcctgcagcatgggcagggcctggggcagcacatcggtcacgctgccgcacacctcgcagtaggcgtgggcgtggtcgcccagcgtgtggtcaaagcggtcgctggccccggggatcggaaccttgagcagctgaccgttctcacacagcaggttcaggttgcggtatacggtgcccaggctcactttggggtcctgcgcccgcacccgggtatagatggtatccgcggtggggtggtcatcggagcgctgaacggtttccaggatcagctctctttggcgggaatatttcaatgggatcactccttaaacagtaacgattacttgtttaaggatagcagaaaatggccggtttgtcaatgccggaagcccggtttgcgaaaaaaatatcctttgcggtagggggcaggctccgggccgcaggccggccgtcctccggacggccgcggcgggctgtgcccgccggccccggcgcagccggggtgcctgcggcccgaagcctgccccccaccgccaaagcagccggcaagaaaaagtcccccggccacagcggccaggggacggataaatttgcttatagattattcctcggcgggagcctcttcctcagcggcttcttcctcgggggcttcctcggtcaacagggccttgatggacaggctggcgcgatgacggtcatagtccagctcggtgatcttggcatccactacctggccaacggaaagcttatccgctaccttctctacgcgctcacgggcaatctgagagatgtgaatcaggccatcgataccggggatgatctgcgcaaaggcgccgaaggtggtcagagacatgatcttgacgggaacgacatcgccgacctgatacatggtcttaatcttctcccagggattgtcctcggtctttttgtagatgagggacacgcggttattctcacggtcgatatcctttacggtaacctctacggtatcgccgatggaaacgacctcagcggggctcttgacgcgcagccaggtcaggtcggtcaggccgatacggccatccacgccgcccagatccacaaaggcaccgaagttggttaggctcttcaccttgccggtgtaaaccttgcctacttctacctcgtcccagaacttctgggccagctccttgcgggcctcgcgggccactacgctgatggagcctacggcacggcggcgctgacggttggtttccaggatcttaaagctgacttccttgcgcagcagggtgttcaggtcgccatcgcggggaacaccggtctggctggcggggataaataccttgacgccattggtgagaaccagaacgccgcccttgatgacctcggtgacaacgccggtgaggacttcgccggtctcacctgcgttcatgaccttctcgaagccggctacggcatccagacgggtcttggagagcatggcggtgccttccacatcgttgacgcggacgaccatcagctccagctcatcgccgatcttgacgatgtcttcgggcttggcagagggatcgctggtcaactgatccaacggtacataacaggcatgcttggtgccggcgtcaacagaaatttccgtcggcttaatgcctgtaacaacggccgttaccttctccccattatgtatacttttggagtattgatcgagcagctccccaaagttcatttcttcagtgttgttttccaatacgctcatggaattttgaacctccttaatgatacaagccggggttgaagcgccggcagtaataccgataaagcgggcgccccgcagggcctcccggtggcgttccagctggtccgccgtttcgacctgcactgtggggcaatagctgccgcacagcgccgccagagccgtggtattggcactgtgcagtccccctaccaccactatggcatcggcagattgggccagctgttttgcctcggactgccgttcaatggtcgctctacatattgtatcaaatacttttagatttgtacacactttttttgcgaaaaataatattttctcccattcgcgcaaagaaaatgtggtctgagccgccaaaatgacggggatattgccatccgatggcaggaatgccagcagttcctgcatttcctccgccgaagagaagaccaaagcctgcccccggcagtaccccaggatgccctgcacctccggatgctcccggcggccggccagcagcagcaggccattctccggtacctcggcggcaatttggtggatgcgcttgacgaaagggcaggtggcatctattacagggctgccctgtgcccgcagggtatcatagacctgcggtcctaccccgtgggagcggatcaccacggcggtaccggcgggggcgtcttcggggcgctctatcaccgtaacgccctgcccggccagctcctccaccacctgccggttatggatgagctcccccagcgtgcaggtgggggagagggcagcacttttctgggtcagctccagcgcccgccgcaccccaaagcagaacccggcggttttggcaacggtcacctgcatggcacttcccctatccgctgccggatgtaggcgagtatggcctgcaccgttccctcaaaatccagatgggtgctgtcgcacagccacgcgtcctccgcctggcgcagcggggcggcagcccggtggctgtcatcgtagtcccgcttaatgacggcggctagcacatcctcgtagctttccgttatgccctttttctgctgctgaagccagcggcggcgggcacgctcctccggggcggcggttaggtaaatcttaatggtggcctggggcagcaccaccgtgccgatatcccgcccatccatgatgacattgtactgccgggccaggctgcgctgctgctccagcaggtaggcccgtacctccggcagggcggaaacggcggaggcgaccgcggaggcctccggcaggcggatggcctccgaaacatcctcgccattcagcaggatgcgctgctcgcccgcctcaaaccgcaggtcgatatggatatgcggcagcagggggaggacatcggtggggtcggcggggtttttattttgccgcagcacaaaaaggcccaccgcacggtacagcgcgccggtatcaatatgcaggtagtgcagctcctgggccagcctggtacagatgctgcttttgccggcccctgccggcccgtcgatcgcgatggagaccatggtgtttttcctgcctttcgaaatagtctgtgcaaaaagccggggcccgccgccccgcggcggcagccctgcgggctgccgccggaggggcgcccccgcagggggcgccccttaccgcgccgtaggcgcgggcggggcggcgggcccccggctttcgcagagttttatgatagttcggccgtcccggccaaatagccggtagaccaggcaatttgcagattatagccgccggtcacggcgtccacatccattacctcgccggcaaaggccagccccttcaccagcttgcttcgcatggtgcgggggtctatctcctttacgcttacgcccccggcggtaatgaccgcctcttcaatgggccgcagcgcctgcggggtcagcgggaaggccttgatcagcgcccccagcttttgccgctcctcacgggtcagctggttcacccgccgctcggccggaatgccgcttttggccaccaccacagggataagggaatggggcagcagtgcctccagcgcgttgccaaaggcccggttggggctcccctcaaagtcccgcagcatccgggcatccagctgctcaggggtcagccccggcttgcagtctatagtgatgcggtagtcggtgggaacatccatatagctgctggcggtcagggccagcggcccgctgatgccaaaatgggtgaacagcatctcgcccagctcgctgtatatcaccttgccgtttttcttttggatgaggttcagcgttacattgcgcagcgaaagccccatcagcgtggtaaactgcttgtccgtattctcgcagatgatgggcaccaacgagggccgcggcggaataatagtgtgtcccacggcagccgccaaggcgtagccgctgccatcgctgccggtgccggggtagcttttgccgccggtcgccagaatagtcagcggggcaaagaattcttcgcctgcttcggttttaacacccactacggcgtcatccctttggatgagctcgctgacggtggcctgttttatctgcacgccgccctgccgggcaaagcgcaccagcgcgtcggcaatatccatggcgcggtcgcttaccgggaacacccggttgccgcgctcggttttcagcgccacccccagctcctcaaagcaggccatggtgtcctgcggcgtcatggcgtagatggcgctcatcaaaaagcgggggttgcgccgcaccgccgctatgaattcctgcggagagcagtgattggtcacattgcagcggcccttgccggtcaccagtattttgcgcgcgggacgctcccgcttttccagcaccagcacccgcaggccgcttttggcggcccacccggccgcgaataagccggcggccccaccgccgataacgattcggtcaaattcgtttctcatggcgcggaatggatctcctcatttttctcgtacacatcgtattcgctccagatgcgctccagcatggcataggtgttgctggtctcatgctttttgcgcagccccaccgccacgatgatggcattcagcaggctcatgggcgccaccagcgaatcgacaaaggaagccatctcgctgcgggccagcagcacatggttggccatggcagccagcggcgcgctggtggaatcggtaatgccgatgatgcaggcgccctgctttttggcgtaatgcaccgccttcagcgtccgctgggaatagcgcgggaagctgatggcgatgagcacatcattgggcccgatgcgcagcatctgctcaaaggtctccccctgggcagcgcccacattcaccacatcctcaaagatgtgattgaagtagaaggaaaggaacccggccagcaccccggaggagcgcaggccaagaatataaatgcggtgagcaccgatgatggaatcaatgacggtatcgaagtctttggggtctatctcctcctgcgtgcggcggatcttatcggcatcggaggacatgacccggtgcaggacatccacgccgccggaaagctgctcatcaatgatctccatgcgctgtacggtggtcagccggttgcggatgatatcctgcagggatttttgcagctggggatagccctcaaagcccagttcggccgcaaagcgcaccacggtggattcactgacccccaccgtttcccccagcttggcggcggtcatgaaggccgctttatcgtaatgctccaggataaaagcgccaatgcgcttctgccccttggaaaagcccttcatctcattactgatcagctgaagcagatcctgcgtcatacttaacccctctttctgtaaagtattcccccttatcataccgaatgacagagataaaatcaagagttttacaacaaaaaacgcaggaaagaaaattctttcttgcgttttcacggctgttttaggcaatgcaatgggaaaatccccctaaaattgaatggcaggccacacttttgcaggaggagcaccgttcttgcattttgtggttctccatgcagagtttgcgctgggcgaaagccagggcgcagcccgatcgcccctccggggcgatcctggcggcctttggccgccgtcagccgccctccgggcggctggggctgcgcccctccctgcccgcaggcccgccaaagatcccgtttcctgcctcggcaggcccctgcaaaccgcaggctttagcccgcagggcagccgtcctgcggacggctttggcggccgggggccgcctgcggcgccgcgtagcggcgccgaccctgcgggcccgcttccggcacaaacttatcccaccggcatctcccgcagcatcggctgcaattgccggccctccagcgccgctgccagcgccgccccggtcagggaaagctccgccgccagactggtcggctttttcagggggtcatcctgcccaaagggcacaaagtagtagtttttgcggcacagcagcgccccaatattcgccgcgctcgcgctcagtccgtcattggtggaaaccgccagcaccaccgggcggtcattgcgcagatgggccttcaccgccatcgttacaggtgtatcggtgatgccacccgccagcttgcccagggtattgccggtacagggcgccaccagcaggatgtctaagagcttccggggcccaatgggctccacctgtgccaccgtgtgccagatgggccggccgcatagggcctccacctggtcgcgccagtgctccgccgtgccaaagcgggtatccgtcccgtaagtaatgggagacatgatcggctggatctcccacccggccgaaaccaaatccgccatcattcgcagggtgcgttccagcgtgcaaaaggagccgcagagggcaaagcccaatttcttgtcgttcactattcattcctcccagtgcggcaggccgcgtatcacctgccccaagtattctccggcggtgcggggcgctgccttgcccggcaggcccggcgcgttccggtagcgcagccccatcgcttccgccacggcggcgtcacagccgcccgccgcgctggccagctccaccaccagagcttccggcggcagcctgcgcagcagctcctccggcagtaccggggccggcactgtattaaaaacgacttcgcagccgtccagagcagtggaaagcttattgatatcacagggggtatgcccatcggcatagatgcgcgccagctgttcccggcggcgggccgcagccgttaccttggcgcccagtgccgccagtctgcggcacagcgcgctgccgcagcgtccgtagcccagcaccacgcaccgcatatcgaatagagtggtgttctgctcccgcatggccagcgccaccgctccctccgccgtcgctatggcgttcagctcctgcagctccggcagcgccagcaggtcggtgtaggccaaatgccgttcctcctcgatttttcgacagtctggcggcagggtgccgcccagcaccaccgccctctccggcagcagccgcaggcactccgccagggggtagcgctccgggaccgtcggggtgcgcagcatcccatccgggcctaccgtcggcaccgccaggatcactgtctcgctttccggcagcagcctatctggggtctccggttgcggcagccgatttttcaggggggcagggggcagcagcgccgccagccggatgctatacccctcccgccgcaggctttccgccagccacgccatgcgttcatcgccgcccaagatcgtcacggtccgtttcatcagtcgtcacctgctatctatgtcaataaagttgctcgctcgcttggcggggattttcccgctgccccatcctattccgcacccgcccgcccggtgcaaaaaaaggacgcccccgctccaaaccgggccgcccctacctatattatagagaaacacttcctgcatggcccaggctgcggccgcagcccacgatgctccgcatcgtggacgccccttcggggcgccccgcccgggctttgcccgggcggcctgcggccgcgccctctcggcaggctccgccgtcacggcagcagctccaccaggatatcctccagctgaacgggcgttacctcccgccgcgccagatattccaccagcagctcgcccaccccgcgattttccagcaggccgggcaggcggcagcaccggccgggccgccggcttccctccacacagcacaggatgccgtagcatcgctccgggccgcagctgtcctccgtcagggaatagcgcacccggcattgctcgccctcttcaccggtcatctcccggtgcaaagaaaaaacctccatcatatgtacctccttcgtcactcagcactatgcttacatctccattataggtccccgggccccccgcgcccagttgcggattgctggaaatattgctggaaatggcaccctgtcaattccgacaaatcagaacaactctttttgtaaaatgggtagattttgtcaaaagtatttccttttttgcataaagaatggtacaataaaaacgcccagtcttaagagagaagggaatgggaatgataggaaaccgcttatacctgctaaggaaagcagcgggactgtcacaagccgagctgggggatatgctgtccgtctcgcaccacaccatatccgcctacgaaaaagagaaaagtgacccaagcgacgcgaccaaggtttggctggccagatttttcggcgtttcagtggattatctgatggggctcagtgatgagcgctacccaggctatgccgccgcatcttccgatgtattgctcctgcccgaggggcttacggaggaacagcgcagcgcggtccaggattatgctctttttcttgccgagcgcaacggataagctcgcatccgtcggcacccggggcaccgttatctctttcagcggggatagcggtgcctccttttttattgcacccgccgccttacggcgctataatggaaccagcacagggggcaggcccaccacccctcccgcaaaccctccctcaaaatccacccgaaaagaggtccctccctatgaaaaccctcctcatcctcctgcttgtccttgctgtattgttcctgctgctcctgctcctcctccgcccggatccctccgcccggaagaagatggccccctttgtggggcggcgctacgcccaccgcggtctgcactgcgcccaggatggcatcccggaaaatagccttcccgccttccgccgcgctgtggaagccggctacggcatcgaactcgacctccatctcaccaccgatggccggcttgtcgtcttccacgatgacaccctggaccgcatctgcggcgtcaccggccgggtggatgaaaattcctacgccgaattgcagcagctccgcctgctgggcaccgaagagcgcatccccctcttctcggaggtccttgacatcgtcgcggggaagatccccatgatcgtcgaggtcaagtatcagaaaaattaccccgccctctgcgagaaaatgatgtctcagctccgggattacaccggcctgtattgtgtcgaaagcttccacccccaggtcatcctgtggatgaaaaaccacgcccccgccgttgcccgcggcctgctctccgatcgctataccgagggcgagggcaatatgacccgcctcacccccgccacctgggcctctcagcagcttttgttcaattggctcaccgccccggatttcatcgcctacaattacctcaccgccccccgcacccgcacgctgtccctcatccgtaaggtatggcatgccccctgcgtcgcatggacggtccgcgatgaaagtaaggagcccctggcccttgcccacttcgatgccgtcatcttcgagcgctaccgccccgccccccgcattaccccgcctgtcgcgtaaaaccgaccattttgctgtcagtttatgccgaaattaaaaaattcgctgcaatttcccattaggcacttgacattcacctggaaaaggaataaccttaacttaccaaaataaaatcgcccccgggggcgtctccgtgtttgccacgcaaacacgaactccctgtgggccaaagaaaaggagaggttacacaatgaaaaagttcctaagcattgccctggcgctcctcatggtctgcgtcatgctgcccgtcgttgccctggcggatggcacttctctgcctgccccagatgcaaatggcgttattacccttgaaaaagatgttacgctgaccagtacatggaagattacatctgatgttacacttgacctgaatggcaaaaaattaaatattgagatcgccgacagcggcaatgctgttgaagtagaggaagcgaccctgaccgttaaggatagcacagggaatggcgaaatggcgctcagcaaacatggtattacgctgatggatgcaaatatgaagctgatgagcggtaccgtatcttgtacggatgtcgtgatagctcttgtaggagattgcaactttacaatgaccggcggcaaactccatgggaacgggaatagtgcttcctgcttcaatcccggttattggggcacacaggtcatcgatattaggggcggattggtccagtgcgacagcacctgcacggctgtgattggctgcggttctgcatttaagaagaccacgctgggtgttacagttagcggcgatacggtatttgattatggaaacattgacctgatcaacggtaccgagcagggcggcgaaaatcgtaccgtaaacattggtatcaagggtggcactttcattggaagagatcatcttgatgatgtcgatccctacatttccgaggatggcctcgttgtattggacgatgaaaatatctatgtcggcgctactgctacctctgtagtttccaatgccaccagcggcaccttcaccgtagtaagcggaaatggcaatctgaccattaagggcggcgttaccgtcaagaacgatactaacgagcctattaccgtaaacggtaagaaagttcctgctgagggtagctataccgaacctactaacatcaccatcatcgttcccggcgacaccacccccgccgagacccccaagaccgatgaccagaagaacccctccaccggcgccaatgactttgtcggcctggccgccgctgccgctgttgtggccctgctcggttccgctgtcgtcctccgcaaaaaataatccctaaaaccgcataaaaaagctccccatcggggagccttttttatgccatttcgcaggaaatataatccaacatttagtcaaattacatccatattttccctcattcgtaaacttttcgtgaaaaaaagtgaattattaacctttgggctgcaaaaaagggtcgtttttgcactattagtgggaggtttttttccgcaggtactcgtcaatttcctgcgccgcctttcggccggcccccattgccaaaatgacggtggccgctccggtcaccgcatcccctccggcaaaaacgcccggcagggaggtgcggcagctgccctcctcggtggtcagccgcccgcgccggtcagccgccaaaccggccgttgtccggtgcagcagggggttcggcgtcgtcccgatggccatgatgaccgcgtcgcagtccagggtaaattgtgcccccggcaccacctcggggcggcggcggccgctttcatccggctcgcccagggccatggtgtcgcaccgtatcccggtcacaaagccgttctcatcccccaggatctccactgggttggtcagcagccggaaggtgatgccctcctcctcggcgtgctccacttcctcggcccgggccggcagctcctcccggccccgccggtacacgatggtcacctcggcgccgcagcgcagggcgcatcgggcggcatccatggccacattgccgccgcccacaaccaccacatgcttggcgggcatgaggggggtggcagcccccggttcggcggcgtgcatcaggttgatgcgggtcagccattcattggcggaaaaaacgccgcacagcgtttctcccgggatgcccatgaagttgggcaggccggccccgctgcccaggaatacggccgaaaaaccgtccttcagcagctcctccaccggtatcgtccggcctatgacggtgtcggtctggatggtgacgcccagtttttccagcccggcgatctcctcatgcaggatgtcctttggcaggcggaaggatgggatgccgtaggccagcaccccgccgggggtgtgcagcgcctcaaaaacggtgacggaatagcgcatccgggccagctcccccgcacaggccaggccggccggcccggagccgaccacggcgacctttttgcccttttcttcggcgcaggatggagccttcggttcctgctgggcccggtgccaatcggccacaaagcgttccagccggccgatggcgacgctttcgcccttcttgccccggacacagacggcttggcactggttttcctgggggcagacccggccgcagacggcgggcagggtattatccgccgagaggatttcccaggcggcggcaaaatcaccttcggcgaccttggcgataaactgcgggatatggacgcccaccgggcagccgccgcggcagggtgcgccggggcagccgaggcagcggcggacttcttccatggcggttatttcatcatagcctagagctacctcctcaaaattgcggcggcggacagccggggactgtaccggcatgggggcggcggtgggggaaagattgagattttggttcacggggattcctcttttcgggtagggattttatgggaaaatgggatggaaagcggcaggcggcccgcagggcaagccgccccttggggcggcttcggcggtcgcagaccgccgggttcggccggaggccgaaccgccctgcgggccggttccagccttctgcgcaaattttggtcaagggagtcggccgggttccctgcccggcaaggggctggggaaggtcgatgcagggggcaggcaaaacggggccgggccgctgcaccgggaaaaagcaacgtgaaatggcgagcttgcagtttgctggggatagggctcctgcagggggtggggcgcccgaagggcgcttcggctccgccgaagccggcggctttgccgccgaggccgtcctgcggacggcctgcccttcgggcgccccggccgcgcggaaattcagcgaaaatacatggttacttcggctccaggcccagcagacggcaggtggcttcacggctttgctgctcctgtgcgcggtaaatgcggctgcggcggatggcctcagcaaaatccacctggtgtccgtcaaattcaggcccatccacgcaggcaaagcgcacctgcccgcccacggtgagacggcagcagccgcacatcccggtgccatcgatcatgatgggattcatgctgacggtgcagggggtatcccagcgggcggtcaggtcactaacggccttcatcatggacagggggccgatggcgaaaaccatgtcgaagcgctcgccctgctgcaaaaggcgttccagcgccccggtgacaaagccctgctccccggcggtgccgtcatcgctgcagaggagaaaacggtcgcaggaagcggccatttcctgcgccaggatgacctgctgggcgctgcggaacccggcgatggcggtgacccggcagcccccgcggtgcagggcagcggcagtgggcagggcgatggcgcagcccaatccgccgccgatgacagcggcattctggaagcctgcgatgtggctggggcggcccaaagggccggtgaaggtgggcagggaatcaccgggccggagggaatccagcagcagggtggtgccgcccaccacctggtagacgatggtgacggttccggccttggggtcaaaatccgagatggtgagggggatgcgctcgccgttttcggtggggcggaggatgatgaactggccggcggcggcatgggcggccacttccggggccgagaggaccatgcggctgatgccgggggccagggtttccttgcggaggatgggtgctttcatggagagattgcttcctttcgggggtgagattggtagggcgccaaaaagcaggcgcgaaaagacagaacgcaggaaagtgcgtaaggaccttttgagcggatgccgcccaaagcggggggcctggctaggggccggtcatgcttagctgcgcggcaggggaccgtaggagcggctgcttggcaggagtgcggatggggcgcttgcggggcaaggccgcaagccattgaaaaagcgaggggcggttttaggcgacggtatctacaaacaaaagcgcgcgcaaaacaaagtggggcgggccctctttgcggtgggggcgtgtcatatgtgagtccggattatgggacagcacgcctgctatactggaggcagtaaagcgaaaggggtgccggatatgcgctatgaaatgagatttgtgcggggccatgtggaggtctacgataaggacgggcggtttgtgttttccgccgataatgagcgggaggctgaggaggacctggcgatgctgattgcctgagtaggagcagggggcagaggtttgggggcggcagccccggcggcggagccgccgtgaggcccccgcagggggccgtagccggcccggagggccggctgggatgccgcccgatgccaggtcccggcaaaaattccgaaattatacgatgagagtcacggcgtttttgttattgagaatgtgggtatggctgaaggtgccgccgtactcgccatcgatggtccagctgatctcgtggctggattcgaaggtgatatccgaggcgtggaacattttgactagcgggccatcaaaattttgggtcattagggcggtgagcatggcctgcgcttcgagggcattggtgggattcttgaccaaaagcagctcgtacatgccgtcatccagcagaaccttttcgggatcgagctttaagacgccgcccagggagatggtattggtgacggcgccaaagaggtaatcctcctcgaactgctcgtcatcggcggtgattttgacatggatgggcaggatcttgcccaggctcttgacgccctccagaatataggccaggtggccgagggcatttttgatctcctggggggtggcgtagctggtttcggtaaaggcgccgaaggcggcgatgtaattgaaatagcggtcattgagggtgccgacatccatatggaactcattgccggtgacggcccgcagggcggcttcctccaccctggtgggcagccgcaggctgacggccaggtcattggtggagccgagcggaatatagcccatggggcggcggtcctgccgctgcatcatgccgctgaccatttcattcagggtgccatcgccgccgcagcagacgaccagatcgaaccggccggcgtcctccagcaccttccgggtgcaatccagtcgggcgcgggtggggtagacggtgacctcgtaatcgtggtcggcgaagatcttgaccattttgtagaggtcggtttgggcctgctggcggccggccatgggattgatgataaacagaagctttttcatggggtgttttctccttagcatcaaattggatgtggtgagcgggggtggagggccgcaggcccggcggcggagccgccgacacgagcggagctcgtgtgtttcggcgcagccgaaacggcctgcggcccgatcctgcggcttgcggggatttgccgaggacagagcccggatttttagcgggtgaggataaagccggtgagggggtcagccgtacagcgcgaggaccgaccgcaggtgggcctggaactgctggacgatcggctggggcgagagaacctgtaccgaggtgccgagaccagtgagccaggcgaagaactgcggactgggcaccacctccacggtgatggtgaagcctgccggggtgggggtgaggatcctatcccggccaaagcggtcaaagacaatattggccatatttgcggcaaattgcagggtgatctgctgaggctcgccgccgtacatgccaaagaccttgcgggagtattccgcggggtcaaagtgggagaagagctcttttcccaggcgttcctcgccggtttgggtgatggcttccatcttatccacccggtagtggcggcgttccccgtgctcggcatcgtagccgacgaggtagtaattttcgtcatcccacaggagtgcccagggactgatctggtagcgcttaccttcgtgccggtatttctttttaccggtgatgtcccaatcgaaatagcggaaggtgatacggctgccggcggcgatggcgctgtgcagggcatccacattgtagtagatgctttcgttcatattcttgacccggtgggtgacatagacctggcggcgcagggcctgggcctcgtagcggctggccagcttttccagcttggtgatgagcgcattgcttttgcgcagggagaggaatttgctgctctgcacggcatccaccagcagctttaattccggcagctggaactcccggctggccacatagtagccgccgccctgggccttacggtactccacatccaggccgcactgacgcagggcttcgatgtcatcgtagagacttttgcgctcggcggggatatcgtgccgggccaggtattcgatcatttgggggatggtggcggggtgctcctcatcggtattttgcagtaggaactgccacaggtacaggcacttgagcttttgattggcggcgcgggccatggggtccctcctcccggtgaattttacgccatcattttaccatagcgcgccgggaaatacaatggacaaagggcgaggttgggggggctgcttttccgtggtgaaaaggaggcaaaagaattttggggctgaatttgtgggtgcctagcggcgaaagcctcccttgtgcaaagggaggtggcacggcgcagccgtgacggagggattgatggcacaaattatgccaaagtttcatctcgctttcggcggggcgagaattttgcaaaggcatagttagcaccgctgccgcgggggctgggtttgaggacgcccgacggcggggcgaggattttgcaggctgtcaccctccggtgactctgcgccgccgaaggcgagatgaaattattaccttttgccggcaacccctcagtcagccatgcggctgccagctccccttacacaggggagcctgtgggacggggcaaaaaagacaccccggcgggggtgtctttttgagtatgggggggttatttgccgcagcactttttgtactttaggccgctgccgcaggggcaggggtcattgcggccgggcttctttttatcggccttcatggggattttcttgacggtgccgtcttcgccggtggccaggggcttgagggtctgctcccgcttgatctccacctggggacggggacgaatggtgagcagcatcttgacggtattttctttgatgccctcgatcatctgatcgaacatctcaaagccctccaggcggtaggccacgacgggatcctgctgggcgtagccgcgcaggccgatgccgcgcttgagctcctccatggcatcgatgtgatccatccacagggtatcgacattccgcagcagcaccacccgctcgatctcctcgaaggattcgccgaagagttggcgctgggcctcatagcgggcttccgctttctccagcagggtctgggcgatatcgtcccggctcatgccgcggagctcctccagcgagtagcgcaggtcgttctcatcggtgatccagcccatgaaacgatcccgcaggccatcgagattccattcctcgtggttcttttcatccactaggtactgctgcacgctggcggtgatgtattcctgcatcatcttgcggatgctgtcggagaccgattcgccatccagcacgcggcggcgctgggagtagatgatctcccgctggcggttcatgacatcatcgtacttgaggacattcttacgcatctcgaagtgcataccctcgatgcgggcctgcgccgactgaatggaattggagagaagcttggcctcgatgggcatattttcatcgacgcccatgctgttcatcagtgcctgcaggcgctcgccgccgaacagacgcatgaggtcatcctccagcgagatgacgaacttggtggtaccggggtcgccctgacggccggcacggccgcgcagctggttatcgatgcggcggctttcgtgccgctcggtgcccaggatatacaggccgccgacggaacggaccttttcggcttcgggggcgatttcggccttgtacttttgcagcagctcctggaagtggcggcgggcggcgagaatggtctcatcctgcgtttcgccgtaggcggtggcctcgtagatgaggtcctcctccatgccctcccggcggagggcatccttggcgagatat

SEQ ID NO: 2984 - DNA, 8167 bp, Unknown
  16S sequences of unknown bacteria
aaaaatacagctgctatttcgatatttttccttttttcggtcttgcttgcacgcaaaaaatctgctctggcttaattgccacagcaggtttttctacaagctgaggaccgcaaagcggtcctttttttgcgttcgggcgggcgcaaggctcccgcgcggcgcgcgcgccgcgcccggatagaatgagggacgtaaaaaaggggggacgcggatggaggcatttctcatgggcggcgcgcagggcggcggaatcgacgcttcggctgcgcccgcggcgacctacagcggcaagtggtcgggctggcacgtggaggactacgacggcgcggcctactgggaggcggtgttctacacctccggcacgctgacggtgaccgggacgatccaggccgacgcctggggcatcggcggcgggggcggctgcaacatggcgcagggcgggggcagcggctacacgaacatggccctgggcctgtcgctgagcggcgcgatcgccgtgaccatcggcgagggcggcgcgcaccgcgccgcgggcggcagcacgagcctggggtcgctcttgacctgcgcgggcggcggcggctcgcccaacttctccaacggcggctccggcggctcctcgggcggtgcgaacggcgggagcaacggcgcggccggctccgccggaacgggggacggccagccgatctgccggttccgcgcggactgcaaggcgggcgacgcgggcgacggcggcacggccaagcccagcggcggcgcgggcgggggcggctggctccactggcgggcgaacgaggggcagaacggctgcggctacgggggcggcggctccttccaccagtcgggcgtcgggccgggcaaccagggcgcgctggtcctgcgcgtcgcgatttaggcgcgcaagcggtgcgcaggagaaggctctcttgcgcaccgctcgcgtttttggattcgcccgcggcgcttacagccgcttggagaaggcgacgttgtgctcgctttcggtaaagcccagcttcttgtagaacgcataggccgggacgtcgtcctcggtcagaaggaagaggtatttgagacccatgccgcggcaggccgcctcgatctcgcgcacaaagcgcgcgccgaggccctgtccctggcactccgtgcggatgcacagctcgtcgatgcaatactccgtgccggaataccaatggcgcacgtgccccatggagaggccgacgagcgccccgcccgcaaaaaggccgaaggtcagggagttgctctggccggtcaggtcgtgcaggtacaggcgcagctggtccgcgtccgaccaatcgtcctgccagggctcctgggtgaagacgcggcggaagagctccgcggccgcgggaaggtcgcgctcgtccagccggcggaaggtgagggaatcctccatcgcgtggttctccttgatctgtggatttgcggccgaagcgccaaatgcagaaaacctgcagtcccatgcgcgtacaggaaactgcaggttttttctggtgggtcgcagtagactcgaactaccgacctcacgcttatcaggcgtgtgctctaaccaactgagctagcgacccatcccggcgctcaacgcggtatttactatagcaccatcgtgggtcgttgtcaagaaaaaccgtcgaaaaattgcggttttactgtgcgtccgcggggaagacgatgcccatctggcggcgcgcctcgtccatgaccatggcggtctccagcgtcgcgcggctgtagctctcggcggaagcggggtcgagcgccatgcgctggaaggcctcgatctcgtagcgcatgggcgcggactccggctggtcgaacagcatccgctcctgctcgccgcgggggcgcagggagaggaactgcggctcgctgatgcggtccaccagcaggctgccgccctcgccctggatctcgctgggcagcgcgccgtccgcgatcttggagtagagcaggtccgcctggaactcgccgtagccgagcaggatgctgcccgcgccgtccacgccgccggcgagcttgaccgccgtgccctggatggtccgcggcaggccgaagagcttgaccaccgggtagacgcagtacacgccgatgtccatcagcgcgccgttggagagcttggggtcgaacgcgttgagcacgatgccctgcttgaacttgtcgtagcgggaggaatactggcagtaggaggccgtgatccggcgcaggcggccgatcagcggcaggctgcgcgaaagcgccgcaaaccccggcaggaaggcggacttcatcgcctccagcagcaggacgttgtgcgcccgggcgcaggcctgcatcctgcgcacctcggccgcgttgctggccatgggcttttcgcacaggacgtgcttgcccgccgagagcatggccagcgcctgggcgcagtgcgcgtagttggggctggcgatgtagacggcctcgaccttgcggcaggcggccaggtccgccaggttgtcaaagctccgctgcgcgccgtgctcggcggcaaaggcctggccccgctccttgctgcggctgtagaccgcgtacagcgagaagcccggcacctggctgccggcggagatgaacttttcgacgatggcgcctgtgccgatgacggcaaaacgcatggacaatccctcctcgttgcaaatggatcccgcgcggcatctcagccccggcaggccccgatgaaccagtcccagatgggcatcatgccctcgtcgagcaggcgctcggggtgccactgcgtggccaggaccgtttcgccagccgaataggcctcgatcacgccgtccgggctcgtggccgccagcgcaaagcacggcgcgagcgattcgacggcctggtggtgggtcgaattgacgcgcagcgtgtccgccccgccgaagatgcggtgcagcagcgtgccgggaacgacgcgcacctcgtgccgcgtctccttgttctggtgggcgatggtgacctcgggccggtcgaagatgtgctggcagtgcgtgccgcccagggcgacgttgagcacctgctccccgcggcagacggccaggatcggctttcccgccgcgaaaaaggcgcgcgccagggcgatctccgtgcggtcgcggtccaggggcacgggctcggccttctcgtgcgcggggcagcccagcgtctcggggcaaaggtccccgccgccggtgagcagcaggccgtcgaaccgctgcaggacgaagtccacgtcctccttctccagggtgcggcagacgtacagcggccggccgcccgcgcgctccaccgcgttgcagtagttgacgcccggcgggaactcgtcgccatagatcagggaggcaatggcaatcaggggcttattcatggcagaagacctctttcctgtgtctcatccgccctattgtacaggaagtcgggcggcgttgcaagcgcaggttttttgtgagaaaactgtttcaaatttgcaagaaatccaaaaaggaagcaaattggaaacaacaaccattgcttcgcgtggattcggtgatagcatggagaaaaattgaaagggaggttgaaccaaatgttcaaaattgcagcaatcctgacatctgcagccatgctgtgcaccggcacgcttttggccgcggcgccggaggcgagcgccgcctgcacggaaccggcgcaggctgtacagcggtgcacggtgcagcggcacgcatatatccgcatttgcggcgattggtgggagatccccctgcagcccggggaggagctgcccgcgcagccgccggaggaggagacgccgcccgcggaagaggccccgccgcaggagaccccgccggcccaggagaacccggacgaggacgcgcccgaggagagcggcggcgtgcaggaagcggccgcggcggtcgcctccctcgtcaatgcggcgcggcaggacgcgggcctttccgagctggagctggacgcggacctgtgcgcggcggcccaggcgcgcgcccaggagatcgcccagagcttctcgcacacgcggccggatgggtcgagctgctttacgatcctggaggaattcggcatctcctaccgcgcggcgggggagaacatcgccatgggccagcgcacgccggaggaggtcatggacggctggatgaactccagcggccaccgggcgaacatcctgaacgggacgttcacctcgatcggcgtggggtactacgtggacggggccggcgcggcccactgggtacagatcttccaggcctgaccccgatccggccgggcttcacagaaacctaacacacagccgcggcggaatctggtatactcggtttcgacaacgcaatagacggttcgtgaccatcccgtcgtgaaaaaaaactacggactgcaccgccatgcgcgctctgctcctgcagggtgcgcaggcgttttgtcgtgcgcgcggtgaaaagagaggggagcggttcatgctcccctctcttttgcgctggaaaaagaacggcagaccgccgaaggaaaaggagtttttttatgacgcaagagagaaaggcgctgcgccggctggtgcgcggcgcgctgatcgccgccatctacgccgtgttgtgcgcggcgctggcgcccatttcctatggagaagtgcagttccgcatcagcgaggcgctgacgattctgcccctgctcatgccggaggccgtcccggggctgttcgtcgggtgcctgatcgccaacctgatcggcggggcgggcattctggacatcgtcttcgggtcgctggcgacgctgatcgcggggcttttgacgtatgcgatgcgcaagctgccggcctgggtggcgctgctgccggtggtggtggtcaacggccttgtcgtgggctgggtgctgaacgcggcctacggaacgccgctgctgctggggatggggtcggttgcgctgggccaggcggtggtctgctacgtgctggggctgccgctgctggcgctgctgcgccgccgcctgccggagaagctgctgcactaagtccgcgccccctttttggggaggaggggccaaaatgccccgttttcggtgcggcgcggccccgacttccctccatttttccctaaattcaaggaaaaaacgcgcgacagcccttcctttttgcgcgaagatgttctatactgaaagagagtgtagaaccgtgcaaatgggacgaggaggtgtgcgcacatgacgacactgagcggaaagaagggtctggcgctgtgcatcctcaaggtgctccgggcgcattcgtccagtgagcgccccctgacgatcgcgcagctggaggagtacatcgagagggactttggcatggaggtggggcgcaacgccatctcacgcaacctctccctcctgcgggagatgcactaccccatccggacggggcccggcggcaagggcgcatatctcgagccgctctttaacgacatggagctgcgcgtgctcatcgacagcgtgctgctgagccgctacattcccccgcaggaggcgcgcgagctcatcggcaagctcacgagcctggggcgcgcgggcttttccagcggcgtgcaggacgtgcacgccgtggacaagtggcatcggatgcaccaccgcgacttctttgactgcatggacgggctcagccgcgcggtgcacgagcacctgcaggtgcgctttgtctactgccgcatcgggctggagggcgagctcgtgccggacggccgcgtccgccaggcgcacccgctggcgctgctgtgcgcgcaggggcagtattacctgctggcctgctacgacggatcgcgcgaggtgcggcacttccgcgtggaccacatgcgcgacctcgtggtcacagggcttgcggccatgacgccctatgacctgccggagttccgcgggggcgtggacatggcgcgctatgcggccgaacaccgctacatgtacagcggcgagcccgtgcgcgtgacgctgcgcatgcccatcagcgccgcgggccaggtctacgacgcgttcggccactacgcgcagatgatccccaacgaggacggaaagacgatggaggtgcgcctgcgctcgagcctggagaacatgcgctttttcgccctgcagtacgcgagcgtctgcgaggtgctctcgcccgcggagctgcgcgagcaggtccgccaggacgtgctgcgcatcgcgcagcgctatgccgacgccgcaacttgaatggaaaacgggtccccgagcgcttcggggacccgttttcctgtgtgggaaatcaggcgagggagacgtgaaagttgtcgtccacgcgcaggcggacgccgcgcgcggcctcgcgggcgcgggcgatggcgcactccaggtgctcttcgtccgggatgtgcaggtagtagtcgcggaagaagttgtcgagatagtcctccaggtcgccctcgatggtctgcatggggatggagcggcacatttcgacgagcatgccggccatgagcgtggcgcgcagctgcatgcggtccgcctcctgcggggtctccggctggccgtagagcgcgcagcagaagtcatagcgcttctcccgctggcgggcgaagttggacttcgtcgcgcagacctccgaaacaaagcgcgccaccgtcggctcctgcagcagcaggcgcagccagatgcgcatgttggcggtctccagcgcgagcgcgtcgtcgtgcagggccagcagctggggcagcgggctgatggcggcgcaaagatcccgctgcatttcgtagaagatctgcagggcgagggattccttgctctcgaaataataggtaaagaggccgagcttggagtgtgctccatccacaatctccttgatggaagtggctgcgtagccggcgcggaagaagtggcgtcgcgctgaggaatagagcgccttttgcgtttccaggccgttgcggtagctgggcatgcttctcctcctttccggtgcgttttctacttctatattcctaccataccatttttttcgggcattgtaaatccaatacattcatgaaaagttcgtattttgggcgcaaacaaaaatgagcattgacagcatttgacacctatgttacacttctgttaggtgaagttgtattattgcgaaatccttggaagcacttcagcccaaagggggagaagacgttgagcctctaccgcgaagcgcggcggcgcatccgccccccagaacaagaggaatccccccgcgcgcaggagcgcttcctcgccctgctgcgcaggagcgcaggggtggactacgcccccggccgcgaccccgtttacgccctgagcgaagggttctcccaggtgtttgactgggtagggacgcagagcgcgcatctcctgctgggagagaagccggacgcgacggccggcacgtccatgcgcccgctcgtcgaggacgacgcgcagggctccttaaggcgcttcgcgtcctatgcgttccagagcgggcgcatggcgggcgcggtgctccggggccagggggagatgatgctgcacgcgtgcctgcggcgcgccgcgggccgcggccttccgcagacggaggcgcgccgcaggctggacagcctggccgacgagcggcccgtgccgcagagcgccgcgcgcgtccgcttcggcggggatgagcacagcgccatcgccgtgaccctgcgcgccacgaccgccgcaacgcgcgcccttgccgcggtgcagaagtccgcaaagaccctggagggccagggcgtctccacgctgcgcgaggcgttcccctttctctttacgcaggaggaccgggcgctgatcgcggcgctgtcggagaagcggcggaacatggggcaggcctccccggaggaggtgcgcgccgtggaccgcgcgctcgtgcgcgcacgtgccgtgctgcagaaaaaggagcagcggcggcgcgacttccttgcgaagctggagtccatgctcgccaatgcgcgcgccgcagaacgcctgtttgcgcagatggaaacggactctttgcaggatccacacgaaacctttgcagaagctccaaactctcccgacgccgaggagaagaatgcagaaaatgctggaggaaaagcaggaaaaacggaaaatcgaggagaataaagaaaaaacgagcgcctcccagggaagtgaagtgaccccgaaaagttagacaatatttctgaaggaattgttcaagcaaccg

SEQ ID NO: 2985 - DNA, 22117 bp, Unknown
  16S sequences of unknown bacteria
aaaggtgaataagtaaataacctgaacaaggtgggcggtcgtatgaccgcctatttgtgtgattgtatacaaaaacctaaaaaatatataaaaatgcattttatagaaaatatggttgactgatgtaaataagcctcgtataattatatgtaataagacaactcagaacttgtaatatacgacgtatatgatatataactaagggagacaacagtagatgaagcatataagataattcttgaaatcattcttgaaaaggaaatcaactttaaaggagaacctattgcagagaatgagaagcgaaaggagcttccgggcaaaatagcaaggcttgatgtatgcgccataggtgatgacgacacagtttacaacgccgaagtgcagaaagtcccgatatgccgtagagtgccacacgctaaagcgttgcactcctgacaggggacttaccagcggctcatacttcgccaggtcaagtctcccaatatgcacaagcgtatgagatattacggcgcattaatgacaagcaagctgctgccggagggaacaatagactataacaagttaaataacttgtgtatgatagtaatagcgggctttgacatgggcggagaaggaaaataccgctacacagtacgcagaatgtatgagggctatcctgacaaagaggtatatgacggagaagtaatcctctatcttatataccaaaggtaaagacactgagggagtaagcgatgggcttatagctatgcttgaataacaactgatgacaaggcattgtcatcaggatatgataggataatcagacttaacgagatagtagcgtccattaaagcaattgatgagattggagtgaagtatatgaacgcataatattccccgcggcaagcgcagtaaccatatgctatataatagtggcggctctgtgcgtatgggaggattacaagacttgcaggatatttcagaaccagccggttcaacatattcggctcatacgggcttgtgcaggaagcagtcctttgtgtgcatattcctatggataaatatgtcacatactgctaaaatagtaggactcatatggctgggaataggaataatagttcttgcaatacagactaaaggcttcaggaagcttcctcctgaaatggaacttgaataatcacattaaagtctgcttttccggcaggcttttttcttgaccgcaggtaaatttcaggtatagaattacatatgcagatataatatctgaaatggaggcaataatagatttatgagcggatttgacaaaaaacagaaagctacggtaagcgtagctgtgattacatcatttataaccacatttacaggcagcgcgcttaacctttccatacctgcgcttaatcaggaatttgcggtgagcgctgcggccataggctggattgtgacaggctatatgctgacactggcggtgcttactgtgccctttggaagaatagcggatctgacatccagaaaaaagatactcgaaacgggcatattcatatttatggtgtgcgctgtgctggcggctttttcgtggaaactctggatactgcttgctttaaggattatgcagggagtgggagctgcgatgatattttctacaaaccatgcaattctgatcagcgcatttccggaaagcgagagaggaaaagttctgggctatgcgctggcttcaacatatgtcggacttgcggccgggcctgtaatcggcggcgttataaatcactatctgggctggcggtttatctttgcatttattgctgctgtaagctttgtttcgtggtttaccgcatggagaaagcttcccgaaaaatcgggagaaaagacagagggtggcagctttgacattgcaggcaacgtgctgtttgtactgatgatattcggatttatgtttggtctttcaaccttttcgacaatcagatacacatggcttatgattgcggcaggtatagggcttggcgctgtctttgtgatacatgaaagcaggatacaaaatcctgtgattaaggtggggcttttcagaaacagtcttgcatactcgctttcaaatacggctacatttttaaattatggagctacctttgcgataagctatcttctgtcaatatatcttcagtctgtaatgggatatacctcgcagacggcgggattgatacttatagttcagccgcttataatggcggtgctgtcgccgtatatgggcagactttcggacagaatatcgccgtttaagcttgcaacattaggcatggggctttgcacagcaggtctgtttatgctgatattcacaggtgaggacagcggactatggtatataatcatggtgcttgcagttacggggcttggatttgccatcttctcatcacctaataccaatgctgtaatgtcacttgtcgaaaaggaggactacggagttgcgacctcaatacttgcgactatgaggtctatggggcataccaccagcatggcggtgataactctggtggtgggtatgtatatgggcacatcatcacttgcggatgcggagcctgcgctattgataaagaccattcgcactctgtttataatatttacggcgatgtgcgtggtgggagtgttcttttccatgggcaggagaagcggagataaaaagaaaaatgtgaaacaggactctttgtgatttagccgtaaacagagttctgcttgaatattggtaggcaatgccgtataatatagagtaggaggaggtcagaatatgagtataaaagaacttagaattcagacagggcttagtcagagtaaatttgcgcatatgtttgacattccggtatccactcttaaggactgggaacatgagagaagaaatccacctgcatatgttataaatatgataagaaccattcttgaaatgagaggagtcatcattaatgataattccattgatttttgtgaaatccgaagaaaaagagttgaaagggcaatggcaatagttttaacagccacagacggtccggacgagatttttatggaagcattggagtcgtatatagcaggggaaataactatggaagaacttgaagtccgggtggacagacttgagtatctgggagtgtagaatatgaatggcggacaatattgctatcctgacaatgatgtgttgattaacaaatataatattcataataaagaattgcttcagaaactggaaatacaaaaagtgacggtaaagctgctgggacttgacattaatcccaaaagaataaaagccacttttgatacaaagcatcttcaggcggttcataaatatctttttggagatatctatgaatgggcaggtgaatttcgtgaggaaaactttttcaaaagcgaaagagttttatcgggaggctcggcagaatatgcagattacaggcagataaagctaagacttaacaatctgtttgaaaaatataacagaataaaatggagcaaagaaatcggtttagaaaatgctgtttctgatttttttctggaactatggagtattcacccgttcagagaaggtaataccagaacctgcgtaacatttttatggcattatcttaaatttaagggaatagagttttgtgtggagcttatccgcaacaatcctatgtatgtcagagattctttagttatggcgaattatgaccgaaaagagtatcttcagaagattatttctgacgcacttaattgtttgtcaaccacagaagaatatcaggaatcaggagaagagaaagcagagcagtatcggattgcagaatccggatatcaggcatttcgagacagatattcaatacgcaaatgaacaaccgggcaaccggaatacgagtgcattttgagcggatttttttctgctctgtttttttgcgcactttccctttgaaaattgcaatttgaccgcacttatggtattatgtagtttgtatagttagatgtaattttaggaaagcaaggtagatgtattatgagaattatactggacggaatgggcggagacaatgcccctctggaaatagttaagggagcagttgaagcctcctcaaaaattgatcatcagatagtaattgtaggcagagaagacgaaatcaacgccgagcttgcaaaatacaattatgatgagagtaaaatacaagtagtgcatgcctctgaagtaatagaaaacgaagactcacctgtcaaagccatcagaagaaaaacagattcctctatggtaaagggtcttacaatgctcaaagacggtgagggtgacctgtttatatcagcgggaaacacaggcgcatatatggcgggaagcctgtttatactgggcagaataccgggaatagacagacctgcaatatcaagtatataccctatagccggcggagccttgccgtcaatcatagttgatgcgggagcaaactccgaatgcagaccgtcaaacctgctggaatttgcaataatgggcagcctgtatatggaaaaagtaatggacagaaaaaacgcaagagtaggtcttgttaatctgggcgtcgaagaaaacaaaggcacaacagtaacaaaagcagcccacaagctgctgaaagaagccgatctcaactttataggcaatgtagaggcaagagatgtccctaagggagcctgcgacgttatagtgtgcgacggctttacaggcaatataattctcaagctgacagagggctttgcatggaacctgctcaagacaatgaaaaagaaattcacagacggactttcagccaaaatgggagcagtgcttcttgcaggcaaggttaaggaaatcaaagacgaatttgactattccgaatacggcggagcgccgatactgggagtaaacggacacgtaatcaaaatccacggctcatcgggggcaacagcggttaagaacgctataatcaaaggtattccttatgcgcaggagaacgttgtaggcagaattacttctgcaatggagggagtagacgttgaagagtaggctgcttgagttcgaaaacagaataaattaccattttaaagacagagagcttctcgaacgggcgcttacccacagctcatatatcaaggagcatatgctgtgcaaaaccgaaagcaacgaacgccttgagttcctcggagacgcctttatagacgcaatatgcggagaagagctttaccgcagatgccccgaatcgggagagggcaagctgaccaagcttagagccgccgtagtgtgtgaagaggcgctggccaagcaggcaaagcagatagaaatcggcgaatatatgctgatgggaaacggcgaggagaagcagggcggcaggcagagagtttcaataatggcagatgccgtcgaggctctgatcggagccatatatcttgacggcggatatgacgcggccagagatgtttttcttatgctaagcagcgatatgattgaggatgcaattaaaggcagacttatgaaagactataagtcaagccttcaggaaagagttcaggccgtaggcggaggccagctcatataccgcgtcaacagagaggaggggcctgatcacagcaagacattctatatggatcttttcctcggtgacagactgataggaaccggcagcggcaggaacaaaaaacaggcagaacagcaggctgcaaaagaagcgatagaaagaggattacataatgtactttaaaaaaatatatatgcacggatttaaatcttttgcagatccggttaccatagagtttcacaagggcattacctgtattgtagggcccaacggaagcggcaaaagcaatatttccgatgccatcagatgggtgctgggagaacagagtccaaagatgcttcgaggcggcaaaatggaagaggtcatattctccggaacagcaagccgcaaatccagaggcatggcggaggtaatactgacgatagacaactcaagcaatatacttcccatagaatacaatgaagttgcaatcaccagaagaatgtaccgttccggtgagagtgaatactacataaacaacaaccagtgcaggcttcgtgacatcagagagctcataatggatacgggtataggcgtagacggatattctctgataggacagggcaaaatagcagacatagtaagcaacaagactgaaagcagacgcgagatatttgaagaggctgcgggtattgttatgtacagaacccgtaaggcggaggcagagagaaagctgactgccgcatcgggaaatcttgacagagtaaacgatataattaatgagatagaggggcgtatagacggactgcgcgaggacagcgccaaggcctccgaatatatcagcctcagagaaagatttaaagagcttgaaatcaatataacactcaaaaatgttgaaaacatcgaagagaaaacaaacgaactcataaacgagttaaaagaaacagataaatccatagtggatataaaggccagaaaagaagagctggacaggtcccttgaggctacaaacaccagaacaagagctctggacgagattgcagaggaagccagaacaaagcttatggatatcgtaagcgaaatcaacagactcgaaaaggcgcaggagcttagtaccgaaagactgtccgcaataggcagggacagagagagattaacttccgaaatatcagagcttggcagcaagcttgaaagcgagcagcagaatgccgaaagccttggagacagcaggagagagggcgaggcaaggctggcagaacttaacgccgcgctgcaggctgcaatagacagatatacagtcaaggcggaggaagtaaacaacgcgctgctgtcattaaacaatgaaagaaacagcatatttgaactaagctcaaaggctgcatcaaagagaacagaggcggcaggtcttgacagtctgagagaaagcctcgaaaaaagaaagcttcagatagcatcggagagagagtcggaagcgctgcagggcaaatcggaagccgatctgctgcaggcagagagcagagccgcagagcttagagcagctcttgaaagcatcagagcagaggcaaacaaaatcaaagaaacctacagcagcagtcttgaaacagaaaaacagcttgcaaaggatatagaggcgctcaaaatagacataagccgaaaggaagccagaaaaaagaccattgaagaaatggagtcaaattacgagggatataactttgcagttaaatacattatgaaatcagggcttcccggcatatacggaacagccgcagagcttatgagcgttccaaagggctacgaaacagcaatcgaaaccagcatgggagccgctatgcagaacatagtctgcgctgatgacgaatgcgccaaaaaagccataatatcacttaagcaggcaaaggcgggcagacttactttcataccgctcaaatccatcaagcaccagagagcagccgcagacgtaagcggatttgaaggctttttaggctacggagatgaatgcgtttcatttgataagaaatacacggcggcatttgaatatctgctgggcagagtggttatagtggacactatggacaacgctgttgcaatgtccaaaaaagcaggcgcaggtctgagatttgtaacacttgagggtgaaataatcaataccgtgggcgctataacaggcggtaaatacaaaaacaaaacagcaaatctgctggagagaaaatcagaaataaccaagctgcaggaggaaatcgaagcgctttcaggtcagataggtgccaaagcgcaggctatgaatgaagcggcagatgcaatcagcacagcgcaggagaaaatgcaggctttaaacgacagatacagacagacagagcttgacctcataactgccgaaaacgagaaaaaagcagtagagggcgctatttctgatttcggcagcaggcaggagagatgggacagagagcttaaatccattgaggagcagaaagcatcttccgacagtatgaaaaagtcccttatagacgaggcggaagaagcaggcaggcaggcagagcttgcagaagctgaagtcagcagtcttaccgatatatacgaagccaaaaaacaggaggcgcaaagcgcaagcgaggatataacggaagccagagttgcagtgactgcctgtgaaaaagagcttcaggcatcaggtgcgatatatcagcgtatttcagatgatatagacgatatttccggcagcattgaggcaaagaagctgcagcttgaaaaccttgaaaacgagtacagaagcatcactgcttcatctgaaaacggcggagatatagaagctaaaaacagacagaagcaggaagcggaagaaatcattgcgcaggctgcggccgaaaaagcttcactgacggagcagacagacggagcctctgccgaaaagacaaggatagacgagcagcttgaaaacctgcaaaaccagaaagtaaatgcggacatcaaaaaagccagatacgaaacacagcttgaaagtcttaaggacaagctgtgggaaacctttgaaatatcgtatctgcaggctatggaattcagagcggaggactttgtaatgtccaaggccgtaaaggaaaacagagaagtaaaggccagaatgaatgagcttggcgatgtcaacataggcgctatagaggaatacaaatccgtaagcgaaagatatgaattccttacatcacagagagctgatatacttgaggcaatggactctctgaggtcgattatagaggatatggataagaccataagagagaaattcaaggagaatttcgatcaggttgtggctcagttcgagcatatattcagagaactgttcggaggcggacatgcgcagcttcgccttgacaacgaggataatcctcttgagtcgaacatagacataatagcgcaaccgccgggcaaaaaactgcagaatataaatctgctttccggtggcgagaaaacaatgacagcaattgctcttatgtttgcggtactcaagacaaagcctacgccgttctgtatattagacgaggttgaggcggctcttgacgatgctaacatcgagagatttgcaaaatacctgcagaacttcagcgaaatccagtttgcgctggtaacacatcagaaagttactatggaatatgccgacgtgctttacggcgtgactatgccggagcagggaatttcaagaattctgtcacttaaacttggagataaatttgatttggattaggagaaacatatatgtcactgcgtgaaaaaaaatctttcttcggtaaactttcggagagactgtcagatgtaataaatgcaagatctgtagtggatgaggagctttttgacgagcttgaggaaatcctcataacatctgacataggtatggatacaaccatgagaattatagaggaactgaggggccgcgtcaaagacgcgcatatcacaaagcccgaggttgtaaagataatgctcaaaaaaataatcgtaagatttatagacaaagaggacaggcagaaactgagcaatgagactccgctggttatcctcgtaataggagtaaacggaggcggcaagacgacaacaataggaaagattgccactaaactcaaaaacgagggaaagagcgttatgcttgcagcggcagatacattcagagccgcagcggctgagcagctttccatatggggagagcgcgcaggcgttcccgttgtaaagcacggcgagggagcagacccgtcagccgttatattcgacgctgtggcatcagcaaaggcaagaaacatcgatgttcttatatgcgatacggcaggcagactccagagcaaaaaaaatcttatgaacgagcttgaaaaaatgaacaaagttatttcaagagaatttccggaggctgcaagagaaaccctgctggtgcttgatgccaccacaggcaagaatgcaatttcgcaggcaaaggaattcggagaggttacggatattacaggtatagttataaccaagcttgacggtactgcaaagggcggtatagctatcaccattgcagatgaatttgatatgcctattaaatttataggcgtgggagagggtatggacgatttgaaagagttcgacccggaagacttcgcaggaggaatttttgatgagtaaacctgttgttgccgtagtaggcagacccaatgtgggaaaatcaacattttttaataaagtaatcggcaggagaattgctattgtagaggatactccgggcgttacgagagacaggatttatgccgaaacagagtggaacggcattgaatttgcaattatagatacaggcggcatagagccagacagcgaggatatcattctttcacagatgaggcagcaggcggagattgcaatggatacagcagatgtaattctgtttctggttgacggaaaggacggtcttacatcagcagacagagaagttgcaaatatgctgagaagaagaggcagagaggtaatacttgtcgtaaacaaaatcgacagccataagctgcctgatgatttctatgatttctatgagctgggacttggcgagccgatacctatttcggctgcgaatatgctgaatttcggagatctgcttgatgaaatagtgaacgcttttccaaaagagcagtatgaagaggaagaggatgttatcaaaatagccgtaatcggcaagcccaacgtgggcaaatcctctctcatcaatgagcttgtaggtgaaaacagagttatagtatcgcctatagccggcactaccagagattccatagatactccgtttgaaaaggacggggacagatatatgctcatagacactgccggaatcagaagaaaaagcaaggttacagaggacatcgaaaggtattctgtaatcagagccgttgcggctatcgagagaagcgatgttgcactccttatgatagatgcggcagagggaattaccgagcaggacaaaaaaatagcgggcgttgcccacgaggcaggcaagggaataatcgttgtggtaaacaaatgggaccttatcgcaaaagaaaccaacacaatgagagatttcaagcgcaaaatagaagctgaatttccgtttatgacctatgcgccgagcgtgttcatatcggtaaaggatcatcagagaatagacaatgtaataaatatggccaagtatgttgccgaaacaagagctatgagagtgcctacaggtcagctcaacgcgctgctgcaggatgctatgatgatgaaacagccgccgtcagacaagggcaggagactgagaatttactatgtgactcaggtgggaatcaaaccgcctctgttctcattcaagataaactcaagacctctgatgcatttctcatatgcaagatatcttgaaaacaagataagagagggcttcggatttgagggaacttccataaagttcgtattcagagaaaaaggagagaaagaagactgatgacagagagtatagtaggaataatattaatggcatgttcgtatttcataggctgcatatcaccggcaacaatagttgcaaaggcaaacggcatagatatccgaaaagagggcagcggaaatcccggaactaccaatgtattgagaacgctgggcaaaaaagctgcggctgtgactttaataatcgacatactcaaaggcgcagtccccgttataatcggagcatttgcaggccctgtgtttgcattcggatgcggtactatggccatgataggtcacgtatggccgtttcagtttaaattcaagggcggcaagggagttgcaacaggcataggagttgtacttgctgtaaatccgatactcggacttatgctgcttgtcatatttgcggcagttgttgcaataaccagatatgtgtcgcttggctcatgtatagcggcgtttgtaatgccggcgctggcaattgtgcttgtacctgattttttctggttcgcagttataattgcggcaataataataatcaagcacagagctaatctggcgagaattgtaagaggcgaggaatcaaaactcagcttcagcaaataggagatgatgacttatgaataaaataggagtaataggagcgggaagctggggtacagctcttgccgtaaccctcagcaacaaaggccacagcgtgagaatatgggatatagacaagacccatatcagagagctcagagaaaacaaagagaacgtaagatatctgccgggcgttaaattctgcgacagactggttcctgcggataccgtagaggaagcgcttgcaggcgcggatacagtgctgttttcggctccggcgcagcatttcagaagcgctcttgaatcggcagcttcctacataaacgaagatatgataatcgtaaatgtagcaaagggcattgaacagaaaacgcttatgagaatgtctgaaatcacaaaggaaatgggacagtacaaaaaatatgcagtgctttccggtccgtcacatgcggaggaagtaggcagagccatgcctactacagtggttgcagcatcagaaaatcacgatgttgcagttgcggttcaggaaatgttttcaacagacttcctcagagtatatacaggtacagatgttacaggcgtcgagcttggcggagccttaaagaacattatcgctcttggcgcaggcatatcggacggacttggattcggtgacaatgccaaggctgcaatgatgacaagaggcatagctgagatgaagcgtctcggagttaaaatgggcgcagatgtcaacacctttgcaggacttacaggcataggcgatttaattgtaacctgcaccagcatgcattccagaaacagacgatgcggcataatgataggcgagggaatggcgcccgaagaggcagtaaaaaacgtcggaatggtagttgagggcatgtttacagcagaagctgcatacgagcttgcggacagactgggtgttgaaatgcctataaccaacgaaatatacaagctcataaagggacagattacaggcaaagaggcagtaatgaaccttatgggcagagaaagaaagccggaggattagaaatcgtcaaagttataccaaaatcacaaaacagtgttgacaattatgtgcttatgacataaaatatatttatagataagcaggaggcaatgttatgtacagtcgtaatacaggtaagataaatatggttatgatgatgtgcagctgcgcctttggtcagattctctagacactgcttgagagatgagtttactaaaggcgattttggcgtaagccaacatcgtctttttttatggaggttatgttatgaatgaaaaatcaatcggaaccaaatgtgtacaggccggctacagaccgggaaacggagagccgagacagatacctattattcagagtacaacttttaagtatgatacaagtcaggatatgggtaagctgtttgatttagaggcatcagggtatttctacacaagacttcagaaccctaccaatgactatgtggcagccaagatagcagcccttgagggcggcagcgccgcaatgcttacatcatcgggacaggcagctaatttctatgctgtattcaacattgcctcctgcggagaccacgttgttgcctcaagcagcatatacggcggcacctacaacctgtttgcagttacaatgaagaagatgggcgtcgattttacatttgtatccccatatgctacagacgaagagcttgatgccgcattcaagcctaataccaaggctgtattcggagaaacaatagcaaatcctgcgcttactgttttagacatcgagaaatttgcagcggcagctcacagacacggcgtaccgctaatcatagacaatacatttgccacccctataaactgcagaccttttgaatggggcgcagatatagttactcattcaactacaaaatatatggacggccacggagcaggcgtgggaggctgtattgttgattcgggcaaattcaactggcttgaacatgctgataagttcccgggactgtgcactcctgatgacagctatcacggcatcacctatgctgagaaattcggtatcgagggcgcatatataaccaaggctacagcgcagcttatgagagatttcggttcaattcagtcaccgcagaacgcatatattctcaatctgggacttgaaagccttcatgtcagagttaaaagacaccgtgaaaacggacaggcagttgcggaattcttaaatcagcatgacaaaatagagtgggttaaatactgcggtctcaagggcgacaaggactacgaaatgggacagaaatatctgccaaacggttcctgcggcgtagtaagcttcggagttaaaggcggcagagcggcagccgaaaagtttatggcaaatttaaaagttgcagctatagaaactcacgttgctgacgcaagaacctgctgtctgcatcctgcaagctcaactcacagacagatgacagacagtgagcttgaagcggcaggcgtatcacctgaccttgtaagatattcctgcggtcttgaagatgcggctgacctgattgctgatattgaaaatgcactgaaataggaggggaatattatgcctatcagaatacctgataaactgccggcagccaaggtgcttgccagtgaaaatatatttacaatgaatgatacgagggctaccacacaggatatacgtcctctgcagatacttgtgcttaatctgatgcctacgaaggtagcgacagagacacagcttgcaagacttctgggtaatacacctctgcaggtagagcttgaacttatgcaggttaagagccacgagtcaaagaatacatcaaaggagcatatgctcaaattctataccacctttgacaaggtaagggacagatattttgacggaatgattataacgggggctcctgtagagcttatggactttgaagaggtggaatactggcacgagctttgctcaataatggaatggagcaggacgcacgtttacagtacgtttcatatatgctggggagcgcaggcagcgctgtattatcatttcggaatacctaagagaattcttgacgagaagctgtttggcgtatttcctcacaaggctgacaagaagaatgcaatacttctcagaggctttgatgatgtgtttatggtacctcattcaaggcataccactgttgacagggaagatatagaaagatgcaacaagcttaaaatactggcttcctcagaggaagcaggtgtgtatgctgcaatgaccgataacggcaggcagatattcataacaggacattctgagtatgatgcggacacgctcaaacaggaatatctgagggataaaaatcaggggcttgatatcaaaatgcctcagaattatttcccggacaatgatgataccagagagccgatagttacatggagaagccatgcaaaccttatatatcagaactggctcaattatttcgtatatcaggcgacaccttatgcaatagacagcataggacctgtaatataggaatttcaacggttgcagggtttgacttctcggaaatccaatcctcagaaataccgtaaaataccgcaatataccacagttttttaaaaaattggtgcaaaaattggcgtataacctaaaaaaattggcgtacagcagtgcgaagttaataccgactcacaatatagggttacatacctgatattaaggggtcggtattttttattggacaaaacggacggttctcggacaggcactaaaaaaggaagcctcttagctccatttcccataatcctcatataagttgttacttttaatatatgtatgatttgttaaatttccgataagttcataatattaatatatctcaattctatttttcaatccatttcgaaccttttttcacaacatgaaaatcacagcaatctccgccggtggcaagtgtctttgtcctgtaaagaacgcctcccatcatatcaatggagatatagtccatctgacacatatgcttaataagttcggggtgtccgtattttctgccaagtgcacacaggccgcatttgcggtaggtgcagaaatactctgtttcatctctgccgggtgtgtagtcggtctgccagttgtattcgctgtcggagatttcattggcaaccttaaacgctgcaactttcttcttctgcttttcagctacgaacgggtcttttgcaccgaatgcctttttatatagaggtgagttcatagtatccgtaatcatacgggagaatatctcttcgtccattctgccgttacaggcttcataggcggcaccacgacagatgtggctcttatcgaaaagggcaacgtgaatatcaaaaaagagggagcaaaggtaggaggctggttcacaagagtcgcggcagcacagatatccactttctcatttggcggagacagccatatcagagtttcaaagacaggtgaaattctcatagggcctcaaaaggtatatcctgtatcatatatgtgcgacagatttccgtatcttgaaaacgagcttaagcattttaacagaaacggtgaatacaaggcatattttccgcacgaagccgagtcatatattttaaatgacagctttgacgaggctgatttggaggggctgtccgaaacagagcgcaaggttatagccgcgcttaaaaacggaccgcacagcgttgactatctggcaaagcgcgcaggcgttgacggagaggtgcttatccttgaccgcatcatatttttgggatatatacacagaataggatttacgaccaccgacctgctgcacgtaaagggcacatacagagagtggaattccaaggcggcaatcagacttgctggtataatttccgacagactcgagctttcggtagaggaatttataggcaggacagaggagcttatgcaggagagaatggcggggatatgcttccagagctgccttgactttgaggatatcgacattcagcttgactcctgcaaagagggcaggttctttgtaaagagcgcaatagcgggaaacagcagactgcttgatataggtataaaaatgaagaggcccgtactccttataggcgcgcctgcgcatgcgtggaaagacactatagcaaggcttacaggcacagatattataataccgccttatgcatcggttgccaatgcggtaggggctgcggtatgcaaaatcaccgaaaaaatagagatgaccataatcagaaagaacgatgaaatattccttatgagcagcgagggcagacacgtttacagcagtgaggaggagtgtatgttttatgcggttcatctgggacgtaaggaaatagagcacagactgaaagcggcaggcgttcagagatgggaaatcacggaagaaatgcacagtaacgaagaaaatacgcataaaacattgataataaccggtgttggtatataatagatgtattactttagacgggagatgattttgatgaaaaaaatactcagactgcaaagcgcgcttttaaaggaaattgacaaatatgagaaactcattcccgaaagagatcattttatcgactgggagagagttcatataacaagctgcgccaaaataggatatataatggcagaaaaacgcggagttgatccgatacttgccgcggctgcctgcgcatgtcacgactacggcaggataataacaggcaaacagccgggacatgctgaagcgggatatgagcctgtgcaggtgttccttaagaacacaggtctgtttaatgacgacgaaatcagccagattgcaatagctgtcaaaaaccacagcaaaaaggctgaaataggaagtccgctggaggaaatcgtaaaggatgcagacgtacttgacttttatcagtacggatatgatgttgcccgcaaagagcagcaggacagacttgaggccatactgggtcacaaggtaagcggacttaaattctccgaggattaataaactgaaaagggtatagcaggagcggtgtatgttaacgcatatgccgttctttgttataacataggaaatatcgacttgtagatatttcctatgtttcaaagaaagcaccttgaaagttatcgcaccttgcgtgcgatatgtggaaataggaaatttaattccgtatatttccactttttttatattttgcgtggcttttcgattatttctgtgataaaataatgtaatcacagaaaggacttatttatggcatttttacctatatcaaaacaggatatgaaagacagaggctgggagcaggctgactttgtgcttgtcacaggagatgcgtatgttgaccatcattcctttggcactgcgataatatcgagagtcctcgaaagctgcggctacagggttgcaatacttgcgcagcctgactacaaatcatgcgaggatttcaaacgcttcggcagaccaagacttgcctatcttataaacagcggcaatgttgactctatggtcaacaacttctctgtatttaagcacagaagaaaaacagacatctatgcgccgggaggcagggcaggcaaaaggccggacagagctgtcattgtatacagcaacagagcaagagaagcctacaaagacgttcccgttataatcgggggacttgaagcaagcctcaggagatttgcgcattacgactactgggaggatagagtgagacgatccatacttatggactcaagagcggacctccttatatacggtatgggcgaaagagcgataatcgaaatagccgaggctcttgacagcggcatagaggcaaaggatatatgctggattaaaggcacctgctttaaaacagcggagcctgacgatgatgtggatataattccgtcatttgaagaggtaagagatgacaaaaaagcatactgcaaaagctttgcaatgcagtacagaaacaacgactgcataagcggcaggaggcttgcccagaaatatgacagcaatacctatgtggttcagaatatgccacagatgccccttgagagagaggaacttgaccacgtttacgaactgccctatgagggagagtatcaccctgtatatgagaggcagggcggcatacccggatttaacgaagtcaaattcagtatagtaagctgcagaggctgcttcggaggctgcgctttctgcgctctgacataccatcagggcagagaggtaaggtcaagaagcgcagagtcaatagtaaacgaagcccgcggacttacagaaaaaaaggacttcaaaggatacattcacgatgtgggaggtcctacggcaaacttcagacacccctcatgcagtaaacagcttgaaatgggaatgtgcaaaaacagggactgcctgtatccgaagccctgcagggaactttatgtagaccacagcgactatcttgatgtattaaaacaggtgagagcgcttccaaaagtcaaaaaagtatttataagatcaggcatcagatatgactatcttatggcagacagggacaggacatttataaaggagctgtgcgcaaatcacgtcagcggcacactcaaggttgctccggagcattcctctccggaagtgctttcatatatgcacaagccgtctatagatgtatttacaggatttgcaaaggaatatttcagagaaaacgacagactgggcaaaaaacagtatctgataccgtatctcatatcgtcgcacccgggcagcaccctcagggatgctgtggagcttgcggagtttttaaacagatacggatttgtgcccgatcaggtgcaggacttttatccgacgcctgcaacacttgcaacctgtatgtattataccgaaatgaacccgtttacaggcgagaacgtatacgttgcaaaggatatggaagaaaagaaaatgcagagggcgctgatacactataacagacccgaaaaccgccagcttgttaaaaaagcactgattaaggcaggcagagaggaccttataagcgtgctgctgccgcctcagaacagaaaaggaaaaaaacgcagatgagtttaattgcaaagataccggatattttaaaggaagcacaggaagaatacgaaaaatgcagacagaaggcattcagagctgtttatcagtatggcgatgatgacagcggcaatattgtttctgagggtgataaccttgaatttatgaaattccttatagaaacgatggatatgaaaggcaggataaatatcatatatgtagacccgccgttttttacaaagctaaggtatgaagcagtggtgaaaatgcctgcgacagatgagaatatttcaattcccgcatatacggacaaatgggaagagggggaagcagagtatctgcgtatgctgtgctcaagacttatagctatgaaagagcttctcacaaaggacggctgtctgtgggtgcatcttgactggcatatttcccactataccaaaatcctgcttgatgagattttcgggcacaataactttgtaaatgaaattgtctggacatataaatcgggcggaagcagcaaaagacatttctcaagaaaacacgacacgctgcttttttacagcaaaacaaaacaatattatttcaagccccaaaaagaaaagtcctataacagaggctttaaaccgtatcatttcaagggagtggaggaattctgcgacgataccggctggtatactctcgtaaatatgaaagacgtatggaatatagatatggtaggcaggacatctgccgagaggacaggttatgcaacccagaagccggaagcgcttatgatgaggatacttgagagctgttcaagagagggcgatatatgcgcagacttctttgcaggctccggaacccttgccgctgcggctcataaaatgaacaggcactttataacctgtgatggcggcacgctggctacttctatgtgcaccaaaaggcttgcagctaatatggcttcatttactgtaatgtcggaaaatgatgatatatcagaaccaccggataccatagatattaaatacagcagtcagacaggggagtttactgttgatgcgggagagtatataaattcacttgaagagggcagcgaagctgtagcaatgtggagcatagactggaattatgacgggagtgttcataaggcggcagacgtgcagcttcggagcaaggcaggaattgcaggacagctttcaggagccgtaggagaagaaataagtgttgcgtttacaggtataaccggaacaagaaagcaatatgttatattgacaaagaaatatgaatgatagataatagatatggatatgcggcattggcctaatggcagggcatctgcttcccatgcaggagattaccggttcgagtccggtatgccgctccatatatatagtgcctgagttgttggtttttcaatggttttgggtgttttttgataatttgcagttagtgcaaattatatggctgaaaggtggtttgaagagggataccttttacattgagacattgctgaagcaggggtgggaagttgccctgaatgggccgagagacttgttgttgcagagctttaccgcataaaagacagaaaagaataagtatcacaactgcaatcggtctataccggtgcaatggctgaaaatagcggtttattcccattttcccaatcaaagagattcccgatttgagcctagttaccgcgacatatgtataacgcctgaaatcgttaatttttcaacgacttcaggcgctttttacagtctttgcatttatgacttctttgcaaggtccagtaaactgtcctgtacaatttttgaaaggctcagattgtttttttgagcaaaggtatcaagccaggcgggaatagttatattccttctaacagcctttgttccgtatttttctgcataaacagttatatcaagaacgagaagatttacaaagctgtctttgtctgttttaacacgccgtgagcaagaaatcccccacttctataagtggtgggatgaattgcgattaacacggcgatttcttgactcctgcatctttctgtactatgatatatttacaatcagtcgtatctaacagacaagtggagctaccgcagatattattaagcagtacataatgtcacaggggaagaaaaatggcaaacaaagcaattaagtatcg

SEQ ID NO: 2986 - DNA, 15549 bp, Unknown
  16S sequences of unknown bacteria
cacgtcggggcatgacgagagaagcatcgcggaaaggtcgggacacgtcaaaggctccggcaaagcggcggcaatgacatcggaaaattccggaatcaccttttccggaaagtcggatgtgagtatcgcgtaaagctccgagctgattcgctcgaccgaaacgttcttcataagtccggcgcactgatgcatcgccccggcagtttcccgttctatcgtgaatccgagcacggcgctgaagcgaagtgcgcgcaggattctgagcgcgtcctcggaaaagcgttcgtcgggggcaccgaccgcgcggatcagcttatcacaaaggtcgtactcgccacggtacggatcgcatatttcgcccgggcgcgccgccattgcgtttaccgtgaaatcccgtcttgcaagatcgtcgccgaggcttccggtgaacgtcacctcgtcgggtctgcgcatatcggtatatttcccgtcgcgtcgaaacgccgttacctcgcaggaagcggcgctttcgccgccgtttttcacgactaccgtaacggtgccgtgcttcagtccggacagcgctttcaccgaaaaatcaggcggggtcatgatccgcatcgtctcctccgggcgggcagacgacgcgatatcccaatcatgcggtgtgcgtccgagaagcgaatctctcacgcacccgccgaccgcgtaggcttcgtatcccgcgttttcatatgcgccgagaatgcgaaggacatattcgggaaattcaattttcactctgccgcctcctttaccgtcggaaatcacgcttttgcacgacagttttcggcggcgccgaaaacgtcaccgaaacgttactgcaccgccgtaaacatttttattgctttgaaaacattgcgtccgcttcgcggtcgagagcgtcaagctgagcgccgagcgcctcgcgcgtcttcgcctgcgaaaggatgtagacctttatcttaggctccgtgcccgacggacggacgatatagacgtctccgttttcgagaacgtaataaagcatattggtcttgggaagtcccgtctcgccgacgcttccgtcggagcgtctgaccgtggaatcgagatagtcgcgcgtttcggcgaccttcacgccgcagagcgaagctggggagttttcacggagtcccttcatgatcttcgccatctgtccggcggcatcaagtccggttatctgaatgttcttgactctctcgccgaagtagccgtatctctcgaacagctcatcaagcgcatcgatgagggtcatgtttttcgccttgtagaacgccgccatttcgcatatcagcatggacgccacgacagcatccttatcgcgggcatacgttcccttcaggtatccgtagctctcctcaaatccgaggagaaacgtaccgtgccctgctgcaaggtgctcctttatgacctctccgataaatttgaatccggtgagtacattataaaatttcacgccgtgcgcatcggcgatcttttcggcaaggtttgcggaaaccaccgattttaccgcgtaggcatcggacggaagctttccttccttctcatatgcggtgataatataatcgagaagaagcgcgcccatctgatttccggtaacggtgtggaattctccgtccttgcccttcgccattactccgacgcggtcgcagtcgggatcggttgcgacgacaagctcggaggaaaccttttcggcaagctctatgccaagcttgaacgcctcgggaaattccggattgggataataaacggtcgggaacgatccgtcgggtgccatctgatcgtccacggtgtagagattctttactcccgcacgtctgagcacctcgggaaccataaccgcgcccgctccgtgaagaggagtgtatacgattcggagatcgtctgcgactgccgttattgcgtcgggatttaccctctgttcaagcacgcactccatataaggctcgtcgatcaggtcgctgaccgtgattatcttcgatttgtccgccttttcgggagcgggaacgtccttgaagatatcgatgctgtccattgcgtccgaaacgcactttgcgtgatcgggcggaagctgtgctccgtcctcccaatacgccttatatccgttgtatgccgaaggattgtgagaagcggtgatgtttattcccgcgatgcagccgagcttgagcaccgcataggaaagcacgggggtcgggcggagagacggaaaaaggtataccttgatccccgacgccgagagtacctcggcgctgcggcgcgcaaaagcatcactgttgatacggctgtcatatgcgatcgcaacgccgcgatctgccgcattttccgcgagaataaggcgtgcaagtccctccgttgcgtgagccacggtatactcgttcatgaacgcgcaaccggcgcccattttagcacggagtcccgcggtaccgaaggtcatgtatccggcaaagcgctccttcttttcgtcctcggtgagagcgacaagctcgcttttgacttcgtccgaaacctcgggggctgccatccatttattgaattcggtaacgtatgcttccatgtgatttttcctttatcattttatttttttgccgtatcagagttcgccgagcaaagagtagctgtcgctcaggaattcactcagttcatccgcgctcagttttctccggctgagctttgcaagggtgtatacctgctttgcgatgcgctttgcgtgagcctcatccgcatcgacggaaagctttgttattatcgggcacgatgtattgacgatcagcgtggaatcaagcagtgcgtcgggcattgcctcgcccgccgacatcgcatacatcttcatcatatcctccatgcggcggctctcctcggacacgttgagaacggcgggagtcgcggtatccttcaacttcttgaattccaccttcagcttttcgccgccgaggtcgcgaaaaagctttgcaacggactcgatctcttcggaatcctcatcggaaagcgcggacgcaacctccgcgtccacgcgaaggaatttgacgccctcgcggtcgccctcgacgatctgtgcaaactgcgtatcaagcatgttcggaagcactaccacgtctatgccctgtgcggcaaacatggagatatacgcgctctgcgatgccttgtccgtcgtatagtataccttgttttcgttggtttccttcgcgccgtcgaggtattcgtcaagcgtaacgtaggttccgtccgacttttcgtaaaggatcgaacccttcacgcggtcatagaatttgcggtcgcggatcgacgcatacttgacaaaggtcttgatgtcgtcccaaagcttctcgtacttttccctctcggtcgtgaacatcgaattcagcttatccgcaacctttttcgtaatatgtgcagctatcttcgtcacatatccgctgttctggagatagcttctcgaaacgttcagaggaagctcggggcagtcgagaacgccgcggagcatcagcagatattcgggtattacttcctttatgttgtccgcaacgaatacctgattgtaatagagcttcacctgtccctcgatgctctcgaattcgctctttatcttcgggaaatagagaattcccttgaagttgagcgggtagtcggcgcggaggtgaatgtggaaaagcggctcgcggtagtcggcgaacacctttttatagaactcgctgtaatcctcttcggtacattccgaaggctgacggagccaaagcggattcgtatcgttgatcggcttttcttcctcgccctccttcttttcgtccttttcgtcgccgtccgtgatctcctcgaagaagatcggcacgggcatgaacgagcagtacttgccgaggatctctttcagcttataagccgacaggtattcctcaccctcctcggaaatatgcatgacaaccgccgtgccgcgctcgtcaaaaagctcatcctcggcgctgcaatcggtgaatatctcccactcaccctcggaagagcatgtccacttgacggcaggcgctcccgtatacgaacgtgtatacacatcaacggtgtcgctcaccatgaacgacgaatagaagccgaggccgaagtgaccgattatgccgtcacccgaaggatcgtcgccctccttgccctcgtatttctcgataaagtcgagcgctcccgacagtgctatctggcagaggtattttctgagctcctcctcgtccattccgattccgttatcggacacggtgatcgtcttctgcgtgctgtcgagtacaacctttattttcagtgattcgatatccgtatcctttgcttcgccgagagaataaagtcttttcagctttgtagccgcgtcgcacgcattggacacgatctcacgaagaaatatctccttttccgaataaagccatttctttatcacggggaatatatgctccatctgaacggatattccgccgcgtttgttttcttccgacacgataatcatccctcccaaataaaataatattctatccatattattatattgtcatgcgcccgaaaagtcaagcgaacaagcaaaaatacccgcttcctcggcggatttattttcatcggacgaaactgacgtgaaaaataaaaaggcgaagccggcacattgtgtccgactccgcccgagagatcctttccggatgttttcagcaaaatatccacgccggaaattttgatgaatctacagagtgatattttcgcggtcggcaatgaagttcaccacggaatccgcggtgtttgctccgatcacgccgtccgcacggcggatcacttcgtccttcgcatttgagaccgcatagcattcgtcgcaggcttcgaaaagagaaatatcgttcagattgtcgccgaagcctatcatgcgatcggctccgatccgctttttaagcgaagaagcggcagcgtactttgacactcccgcggcgcacgcctcgagataccaaaaatcggtgttgtaaatgtcgcggtaaaactcgatatgaagctcgctttcgcgcgaaagctcatcgtaaacggatgaaagctcatcgtaataccccgcaagcgaaaagtacaccgcgcaccgtccgaggcagtcgccgaagccgtcggtacgggtaaagaccttgccgtacttctcctcgcgctcgacgcggaactgtctcgagtgaggcgtatccgtgcgctcgtaaaaggtcgaaagccgccctccgtcaatcgtataaagaaagcccgacgttcccgaaaccgcgtcgaaaagctttttcttcgcgcactccgacatcgcgtttatctcaacatagcgtttttccgagagatcgaacgtgcacacgccgttcatcagtataacggggacggtcaatcccgtatccgcaagtatatgcgataccgtggcagccgttcttgcggtggcggcgcttatgagaatcccgcgggaggagaaatgccgaagcgcttcccgcgatttttccgacagcgatgcgtcggaggaaagaagagtgccgtcaagatccgatatgtacagtgttttcatatcacgattccccttcgcgtccgagctcttcaagaaaccgcgcaaactcatccgaggtgttgcgcgcgtatttttcaaagagatcgcgggtaaagaatgcagagcccgcctcgccctccgccgaggcgctgtcccgtgcgtgaaggaggaagcgctttatctccggcgcgggatactccggcatcgagaaatacgcgctctccggcagagacaccatttcatcgaggatgcgcccgcaccacggattggtgcggtatatctcgcgtccggcaagggttatctcacgcctgtaatcgtgaaaccaatcttctcccgtatatgaatccctgtgcattttctgaggtccgacatcccatgtgtaatcggcaaaaagatggaacacggttccgagcagaaacgggtcggaaaggtcaagcccccgtgcaaaatcgcgcagagccgcggggcgcgccgccgtagggatatcacggaaatgcgtatggtccttgaattcgcgcacgtcaatgcagtccggtgcgatgcagccgacgcagaacaccggatccatttccggcgcgtaatccgccgcgcagagaaggtgtatcatagtagaaggcacgcgctcaccttactttctcgaaggatcgtaaaccgcacgctctccgccgataaacttcggtcttgtgcgtgccgccgttacaagtgcttcgccgatcatgttatgctcaagtcttacaggaacggcaacctcgcgaagctgcataccgatcatgaccgagccgatatcgagtccgagatgcgctctgacgtgttcaaccgtacacgattcggaaagctcgccccagagcgcggtcgggaagctgcctcccgccttgggccggggcactgcgttgacctcgtcaagcatatatttttcggctgcctcgcgttcgagaacaacagcgcggttcaggtgctcgcagcactgcgcgcagaggtaaagagagttttcgcggcacgcgcggagcactccgaggcacgcgcttctgccgatatcgggagcgctgttcgttcctggattcgagccgagtatctcgctcgtcgagcagccgacgacgaagagcgacccgggcttcggctttgcgatccgtattatctcgccggcggcttcataagcctgagcttcgtattttgaaagttccgacatgatttcagatataccgcaaggtgcggtttccctttcttttatattgaagaacacacggagaaaaatccccgtgcgttcctgtctgtcttatttttcgagtgcaagacggtttttcaggcggagtctgtcaaatgcgaatccgagagcgatgtatattgccgcggaagaaacagcctgtgccgcattccacggaacggaaagcagaggtgttgtccagcttccgtagataaagccttcggcgacataatatccgccgacggttacgaccgcagccgccgcacatgccgcaatatttcttccgcatacgacggtgctcttcttacgggtaaagaataccgtaagagcagcctttatgaagagagtccacggtgcccagacggcagcaccgccgagaatatcggcaagtgccccgccgattgccgcgcctgcagcggcgaacggaagaggaagaatgcttgccgcaaggtatatcgccatatcgccgggatggatatatccctgtccgcccattatcggaatcttgataaacatcgtcagcacgcacgtcagtgcggcgaacatggcggcggcaacgccgcagcgaagattttttgagcttttcatttttccttcctttccttttgccgcgaacttactgtacaagatcgcagaattttgcttttataaaaccggcgaggtcttcgggtgaaagaataagctgaacgccgcgcatgccggcactgacgtaaatccgctcgtgattttttgcgctgacgtctataaacgcgggatacgctttcttcattcccacaggtgagcatccgccgcgcacatacccggtcagcgaaacaagctccttcacatggataagctcgacgcgcttgtcgccggacgatgccgcacatttcttgagatcaagctccgcgcacacgggaatacagaaaacgaggatccccatacgctctccgcgggtcacaagagtcttgaacatgatatcggggtctatcccgagcacttctgcggcatgtgcgccgcttaggtcgctttcatcgtattcgtaagtacccgtttcaaaggggatatgcgctttttcaagaagccgcatggcattggtggtcggcgttttttcttttttcatctcagcctcgcagttttacggactcggtgctctgcgccgtttgtccttacacatattatataataaacttctttcaaataaaagagaaaaaacacacaaagaatgttttttctctgcggaattgtctgtttattttaaagaattgcgtcaagcaagtacaaaaaaagacgctgcgtcaaagcagaatctgctttgacgcagcgtctttataaagagaaatgaagaaatgaacgaatcagaggtatttcttgaccgtctcggatgcctcttcaacagggatggaagaggtcatgactatgtttacgccgcatttttcggaaagcttgttcatctcgccgaggaacacatcaaacgcatccgcatcgtttccgcaaatcttgagcgcggaatctatgaaaagatcggtaacatcatggttagaggcaaatatgcccgcgatgaatccgaaaagggactgtgcatcgcatacgaaatactcatcggaatcaatcagacggcactgatattttatatcgaatttgagcttatcgcccttttctatacaaatgacagaaccgttggaagagtcaatcgtcgaattcaccatctcgataagagtcttggtcttgcccgtacctttaacgccgataataagtttcataaattacctccataatatgatcttgtttcggtatactaagtatatcacacttttggtaaaagttcaagagtttcggcattaaaaatatcattttttcatagaaaagatataaaaaatatcccgtcctcatctcttttttgttttttgacattccgccgacggtttcagtccgatcatgtatagcggcaaattatcatttaaccgtcatgtacgcggtcgaagcgtaagcgttgtgcttcccggcaagagattcataccgcgaggcaaatgatcaaaaacggggcgccgattctggcatcaaaaagtctccgcctgcaatttatatattgttatacgtcacgatgtttcggcaatcggttgacaaacatataaaaatggcttagaatagttatactaaacaaaaatccaaggaggcttgactttgatcaacgatatactgacaagaaacaaggctcttttttccgacggagctcacaccgagcttcgcgctcaggaaaaccgcagccgcagtgtgacactgctttccggaaatctcacgtcgaacgcgcgcagcgagatatccggcatgagcgcccgcgtctaccgcggagggctttacggcttttcatcgattgcggatatatccgacgatgcgtgcaggacggtgcttcgcgccgcagatgagaattcctcgttcatggcgtcacatataaagtccgacagaaatgcgtttccctccgtacctcacacgcttgtgacatcgaaatacgacattgccgatgtcacccagaaaagatacgtcgatttcagctccgagcttgactcatatataaaggaaaaatgtaagaatctgaccggacgccgcgtagccgtccgcgaggactccatggaaaagcttctcgcaacgtccgacggtgccgacggacacactgcgatctacaggagctacatctaccttttcatgagtgcggaaagcgccgacggaactcccgttgagctgttcagtccgatcggcggattcggaaccttcgacgacaatttcacgtcgcccgacgcgctttacggcgaagtcgatcttctgtacgagcgcctcatgcagaagcgcgagggcgttcacgccaaagcgggaatgaagaccgtcattctcggaggagagcttgcgggaatgctcgcacatgaagccgttgggcacaccgtcgaagccgatctcgttcagggaggctccgtcgccgcccattctctcggcagacaggtagcgtccgaaaaggtaactctcgtcgattttgcgaacacggcattcggcaagaaagcgccgcttcccgtttacatcgacgacgaaggaatcgtcgcagaggatgtaacgcttatcgacaaaggaattctgacgggatacatgaacaaccgcgaaagcgcagagcttttcggtatgaagcccgccggaaatgcacgcgcgtatctcttctccgacgagccgctcatcagaatgagaaacaccgcgatcctccccggaagcgacaagcttgaggatatgatcgcgtccgttgacgacggatactactttatcgactcgaacaacgggcaggcagacatgaccggcgagttcatgttcggtgtctgcatgggatatgagatcaagcacggcaagctcggacgcgcgatattcgacacgacgatctccggagttgcgtttgatatgctcaagagcgtcgatatggtcggcgatacgatggaatggtcaagctccggcttctgcggcaaaaagcagccgatgcccgtcggtctcggcggacccgcgataaagtgccgcgtgctctgcggcggacgataaagcgtccccgacaaataattattcagaaaggctttaatgatatgcttgatataaaaagtgccgccgatgcctgcgaaaaagcgatcgccgggctcggggcaaagaaatattcgttcagcacggtcgagggcgagacgcgggaattcaacgttgacggcggcaaattcacgcttttccgcacgctgttcgacaatgccgtcagcatcacgctttacagggacggcaaaaaaggaagcgcggtaacgaaccgctttgaagaggatgcgatcgtgcgtgcggcggcagatgccgacagcgcggcgcaggctgcggatgccgacgaggcatgggatatcgcaccgaaatacgatttccccgtaaagcatgacggtgtatacgatgccgaccttgatcttctcttctcccgcacgcgcgagcttctcgatgacataaaggcgcgtcatccgaagatcatcgtggagcagctcatcattgcgcattcccgttcgcaccgtatctacaagaattcaaacggcacggtgtacgaaaacttcagcggcgaatacgaggtctcggtcatgttttcggctcacgaaggagaggaatccacgtccttcttcggaagcggcttcaccacgctttcgcttgaccgtccgtttatcgagctttcatcgctcgagcgcgaccttaccgacgttgaaaaccagcttaatccgcgcaagcttgaaggaaaattcaccggcaccatgatactgacccccgccacgctcaacgaattcatgggcaacataatcggcaatttcgcctccgacggtgttattctcgacgagacgagcatctggcgtgaaaagctcggcgaaaaggtcgccgacgagcgcataaccgttacggtcgacccccgccacgaatccgtggtatgcggcgaaaacatgaccgcggagggcttcccgtccgcttcctttgacctgataaaggacggtgtgctgaaaaacttccacctgtcgctttacgtttcgaacaagaccggcttcgaccgcgcgccgtgctcttctcttccctgcataatcaaagcgggagacacgccgcttgacgagataatcgcatcgaccgaacacggaataatcgtcggccgcttctccggcggagagcccggaatatcgggtgatttctccggagttgcgaaaaacagcttccttgtcgaaggcggaaagatcaccggagcggtatccgaggctatgatctcgggcaatcttgcgcagatgctcaacgacctcatcgcagtatcgcgcgagaccgtatccgacggcgacggaaccgcgccctatatggctttcggcgggatcaccgtatccggaaagtaaatctgcggtttacggcgcgagcattgagatcaaaaaagaggatgagatatgtttctcatcctcttttgtattgtacccgattctgccgcaaatcggcgagtgcttcggtaaaaataaaacgggcgagccgaaagcaaacccaaagccactgaagacaattaaacctcccgatataatggcagtggtttgcgaccgcattgccgaaataaaggaaggaataattgatgaaaattaaatcggcgggtttgactgcgctttattctccgaggtatgcgcggcggacggattcgtcgtttataagctcgtcagcctcgcctgcaagcacgatcttacccgtttcgagaacatatccgcgatcggctatcgaaagcgctttctttgcgttctgctcgacaagcagaaccgtcacgccgtccgagcttatcgactgaattatgtcgaatatctcgccgacaaatatcggcgaaagtcccatcgagggctcgtccataacgataatacgcggctttgacataagcgcgcgccccatggcgagcatctgctgctcgcctccggaaagggttcccgcgatctgctttttgcgttccgcaagacggggaaatctgtcgtaaaccttgcggagatccgccgcaactccgcccttgtccttgcgtgtgtatgcgccgagcttcagattttcaagcaccgtaagatgcgaaaaaattctgcgtccctccggaacatgagccattccgagctcgactatcttatgagcgggagtctttgtcagctcatgtccttcgaacatgatcgaacccgcttttgccttcagaagcccagttatcgtatggagtatcgtcgtctttccggcgccgtttgcaccgataagcgcgatgacctcgccctcattgacatcgaagcttacgccctttatcgcggcaatcattccgtaattcacttcaagatcgcgtatttcaagcattgacatgatattcccctcactctccgagatatgccgtaatgacctgcggatcggcaagcacctcagaagtttctccctcgcacaggagcgttccgaaattgagcaccgaaagacgctcgcatataccggacacgagcttcatatcgtgctcgataaggaggatcgtcatatcgaatttgtcgcgcacgaaccgaatagtctccataagctccgcagtctcgttcgggttcattcccgcggcgggctcatcgagaagaaggagcttcggcgaggtcgcaagcgcgcgtgcgatctcaagcttgcgctgctttccgtaaggaaggttgcatgcaagataatcgtgctcgttctgaaggtcgaacaccgagagaagctccatcgcgcgctcgtccatcttacgctcatcggaaaaatgacggggcagacggaacaccgcctctgccgccgacgcggacatcgaattgtgaagtccgatcttcacgttttcgataacggtaaggttattgaacagtctgatattctgaaatgtacgggcgattcccttacggtttatctgtatcggcttctttccgctcaggacttcgccgtcaagggaaaaggagccggacgtgggcttgtaaacgcctgtcagcatattgaacacggtcgttttacccgctccgttgggaccgataagtccgtaaagctcacccttttcaattgtcatcgagaaattctcaacggcgtgaagtccgccgaaaattatcccgagcttatctacttccaaaagcggcattactcagtcccttccttccgattcttactaccgaacgaaagcagtccgcggaccgattccgtcagccttgtctttgcgttcatgatcttctcgttcgagctcatgagcatcattcctataagaacgatcgcatatatgagcatacggaaatccttcatcgagcgcaggcattcgggcaggcagtagagcacgacagccgcaatcatagaaccgcggatcgagcccattccgccgagaaccacgaacacaaggatcatgatcgacatattatatccgaaattgtttgtagtcgctttcagtgtggaaaggttgtgtgaatagagcgctcccgcgattcccgcaaagaatgcggaggtgacaatggcgataagcttatactttgcgatattgattccgacggattcggcggcgatacggttgtcgcggatagccatgatggcgcgtcctgcgcgggaatccacgaggttcatgataacaatgagggttatcatcacaagcacaaacgcaacggtaaaacctgagtccctcggcgtaccgtcgattccggcgggaccgtttatcagccatgttttcgtcgtctcgtcgagattcattccctgcgtggacgagattgcaaggtgaacgccgtttttatcggttgcaagatagatattgtttacgaaggtcttaattatctcgccgaatgcgagtgtgactatcgcaaggtagtctccgttcaggcggagtaccgggataccgactatgaatccgaacaccgccgccgcaagagcgccgataagtatcgcaagcggaaaacgtatccatgtgctcgttatcgcggtctttgtgcatacggaaaagaggctcgatgcatacgcgccgacgcacatgaaacccgcatgtccgagagaaagctcgccgaggatgccgaccgtgagattgagcgataccgcgagaataacgtatatacagatcgggacgagaagtccgcggaaccagcttcccgcgccgacggcgactgcgatattgctcgcggcaaaaccggcaagcgcgatcgcaagagtcaccagatttttctttgtctgaggtctcaattcattgatcttcattgctctccctccttataccttttcgttgatcttcttcccgaggatacccgtaggctttacgaggagaactattataagtatcagaaagacgatagcatcggacatctgcgaggatatgtacgccttgctgagattttcaatcacgccgagaagtattccgccgatcatcgcgccggggatggagccgattccgccgaacaccgccgcaacaaaggctttgattccgggcatcgctccggtataaggactgagcacgggatacgaggagcaaaggagcactgccgctattgccgcaagagctgaaccgattgcgaacgtaagcgatatcgtgccgtttacgttgacacccataagctgagctgcgccgcggtcctcggagaccgcaagcatcgcctgccccgcctttgtatgattgataaatatcataagagccgccattataacaacggacaccgcaatggtaacggcggtctcacccgtaaccgtcagtccgggcacgatctcgaacgcgggaagcgacacgacagaagtgaagttgaccgccttcgagccgaatatgagcagtgcgatattctgaaggaggtagctcacgccgatcgccgtgataagcactgtaagcggggatgaattgcgcagaggcttatacgcgacacgctcgatcagaataccgagcagcgtacaggtcacgaccgcaataagaaccgcgaaaaacggcgatagattgagcgtcgatatcgaaacgtatgcgacgtacgcgcctatcataataacgtctccgtgagcgaaattcagcattttcgcaattccgtagaccatagtgtatccgagtgcgatcagggcgtatatactgccgagacttataccgcttatcagaaactgaagaaaactcatccgaaattccacgctttcctgggatatgtataaagatgcagaagcacatacgggatatatgcacttctctccgtgaatacattttataattgtatcacatttttttcgtgatttcaagaaaaactatcattttttttgatatttcacaaaaattcgaaattattttcggcttgcgcaattactccgaaaaagtttcggaacggctcacatttcctacaaa

SEQ ID NO: 2987 - DNA, 5024 bp, Unknown
  16S sequences of unknown bacteria
ggaggggggctcccctcccgacttcccatcgtgcccggcggctttgccggcgggcgcggggcgatttccgctctctaccggaacccccagtcccgccttgttcgcaccccacgccccagccgttcctccaaccttggcacggcggaaatcgcttcctttgaggccgcggacgtgtgcgaggcgccagccgagtgcgcgcccgcggcccacggggcccggcccttccgcgcgcaggcggcgccagccgtctgcgtgcggaaggaaagcgggcccctcccggaaacggacgcacgtccgtttccgggacagcgcgccagcgcgcctcaccggttcgccttctcgtatgccttgacgatggcctgcaccaggctgtggcgcacaacgtcccggtgcgtcagggtgcagatcgcaatgccctccaccccctgcagaacctcgatggcgtccttgagccccgacttcttcccagccggcaggtccacctgcgtcaggtcccccgtcacaatcacgcgggagttctcgccaaagcgcgtcagaaacatcttcatctgctcgcaggtcgtgttctgcgcctcgtccaggatgatgtagctgtcgttgagcgtccggccgcgcatgtaggccagcggcgccacctcgatcaccccgcgctcaacgtatttctggaagttctccacccccatcaggtcgtagagcgcgtcgtagagcggccgcagatacgggtccaccttgttctgcaggtcccccggcagaaagcccagcttctcgcccgcctccaccgccggccgcgtcaggatgatccgctccacttccttgttcttaaaggccacaaccgccatggccatggccaggtacgtcttgcccgttcccgccggccccaccgcaaaggtcaccgtgttctccttgaccgcctttacgtatttcctctggcccagcgtcttgcagcgcacctgccgcccccgcgccgtcaccgccacgacgtcctgcatgatggcgtcgatctggtccgcctggccctccttggccagttccaccgcgtagttgatgcgggatttgtcgatcttttcccccttgcgcagcgtcgcgatcagcttttccagcaccgtcgcggcaaggtccgcctgctcctgcgtgcccgtgaccgtgatctccgtccccatggcgcggatgcgcgcgcccgtgcgctgctgcacggtctccacattctcgtccagcgcgccgaagagcagcgccatctggtccatattgtcggccgaaagaacgcgctttgcgtcctccgctccttcgtaaagcgacatgtcttgccattcctccgttttcttcccgcgcgcagggctgcgcgcccgctcagggcgccgcagcctccgcctcccggccgatctgcatcacggcctccagcgtcgccgtagcgcggagctttccactttctatcatactatattctacccgtttgtcaacaagggttgcattgcccggcaatccctccagcgccgcgcgcagggcgcggtcgcccgcctcctcgcgcacggccctggggtcccggcgcgcaaggctctcctccgtctccaagaccgtccgccgcaccagtcgcgccgggtagaagagcccgcccagcagctcctgcgcctcttcctccacgcggtaggtcgaaaacgggatctccagcgccgcgggaaacctcgcgccgtccacctccaaaaacgtctccaccacctgccgtccggtgtcctccgcctcctcggaaaagagcgccgcgtcccccacgccctgcgcccagacccgcgccgtgacctcgccccccgcgtgcggcgcggcctcggtcccccggatcagcacctgccccggcaccaccgtgtcccccggctgcaccagcgcctcgccggagagcgtcaccacccgcgtcaccagcccgccaaagctcgccacgacgtccacgcgcgcccgatcgtcgtacacctccggcgcaggcgtggcctgcacgacatagagctccatcgccccaaagccgctgcgccgcacgccggcatacaccaagcccgaaaaatcgcgcttgaccgcctgcgcgatcccgtcccggtccacgcccggcgcccagactccggggcgcagccccatctcctccagcagcgccttcatctgccgctcctgcgatgcgtccttttcgcccgtgaccgtcacgcgcagcaccaggttcgacgcgccgtagagcagcacaagcgccagcacgcccaccgccagcagcgccgcatgtccccgcgcccaggcccgcgcgcgcagcgcgccgtagcgcttcaccacgcgcacgcgcgccccgccgccccgcagcgccgcgcgcaggcgcagcatgtccctcgcgcgcacgtccagctctacgccgcccggcaccgctcgaacccgccgcacccgcaccgcccgcgcgatgtcgtccagcctgccgccgacccccgaaaccaaaatccggatgcgcacccagcccaaggccgtttcccccttctctattcctccaggcgcacgcaccggatgcgcccggtcacgcgcagatcctccgcgtccatctcctccagcgccaggtcctcgccctcgacgcggagcgtgccgccctccagccgcagccgcagctcccgcagcccataggtcaggatgccccgatgcccgcgcaccgccaggtgccggccggacccgtccagcgtgatccgcgcctcccgcgtccacttctcccgctgcatgcgctcacctcccctttcatcctattccccgcctgcgcaaaaaatcgccctgcctgcaaactcttctcctcccccctgcgcttctcccttcccccgcgcaaaccccgccggaggggagcccccctccggcaacctcccccgagcgcccgccttctccgctgccagaacgccgcttcgcctccccagcccagcccttgccgggattccctgctcctttgcccgggatctgccggcaaaggctcctgggaaaaaatcccgtcacaaaaaagagagggccgtagccccctcttttcctcctcttccctctacctgcgcgccattcctgccgttctccgctggcttgaactcgacgcgcgcttctcctcttccagcaccgcgctggacgccttcttgctcgaggaggaagaggactttctccccgacgacgagcgcccgctccccgatgtgtttgctgcgtaggccgcgctcgcctcgtaatatgccttgcgcaggtcgttttccgcctcccactggcgcagcgccgcctcctggctctgctgcgcgttgaagcgctgtgcctcgagcacggcctgctgctggctctgccacatgctgcccgcgtactgggcggcgctggcgttgcggcccgcctccagttgcaggagcgcgtccgcatagtccccctgcagggcggcctcgttgcggttcgcctcgtattcgttgcgctgcagcatgtccgtggcgtagctcgagcggccgaagccccgcgcatttgccgccgtctccaggcgcgcggcggactgcacgcggttctcctcgttggccgcctgcgccgcctccaggcgccgctgcgcgctctggcgccccgcctcgtactgcgcggcgtagatctcctgcccgacggccagccagtccgaaaagctcctctgctcgggcacgtccacgagctggggcgtgaactgcggcgcgagccctccgcccgcctccgcaccggcaaagctcccggcgctcgtgaatcccagcccgctcaccagcgcgtccaccgcctgccggttctgctggtaggcgcgctccgtgtacgcgccccacttgccgtccacgccgcccgcgcccaggttcgcgcccaatgtcttcagcgccgactgcaccgccagggtgtagttcgcatccttgctcttgtcgtagctcgccatgcgctccctcctccgcttctcactccaacaccagggccgaggcgaatgcgccgtagcgcgccaccgcgatctctccgcccgatacgctcgcctccaccccgatgttcgtcacacccttttcccggttgatgagcaggaacggcgcggaaatcgtgctcgcgccgtccagcttctgcgcaaacgtcgctgcagccgtgccgttctccttgatgacgcaggtgagcaccgcctgcgaacccgggttgctcgccccattgcccgtgatggagaacagcaccagaatctgcgcgttctccccgtgcgaaaggtcaaagtcgcacaggacctccggcgtctccttgacgagcgccggcgccgtgttgcccgaggtgtagccgcgcaccgggctgcgcgcctgcacgctcgccttggagaatcccttgatgatgaagctctcgttgacgtattgcaggaacttgttcagcttctcctgttccttggccaccgccgagcgcgaggccgccgggtatttcccgttcgcctcgcggtattgcatgtcccgcgccgtcgccccgcaaaggtccaggtgcggcgtggccactacgtccactgtgaacgaatcgctcatgtcgttcctcctctctccgccttctccccatgcccgcccaacctcccccctccccgccatttttcgttggcgccggccctgccggcgccgcgtatccagagattcgccgtcaggcgaatctctccacttggccgtgcccgttccgcctcccgccatccttctctctatgcccgcccagccttccgctccccgccctttttcgttggcggcgcgaagcgtcgccgcgtatccaaaagattcgccgtacccgttccgcctcccgccatccttctctctatgcccgcccagccttccgctccccgccctttttcgttggcggcgcgaagcgtcgccgcgtatccaaaagattcgccgtacccgttccgcctcccgccatccttctctctatgcccgcccagccttccgctccccgcccctttcgttggcggcgcgaagcgtcgccgcgtatccaaaagattcgccgccaggcgaatctccccgctttggttggggaggattgtcaaggagggggccggcccc

SEQ ID NO: 2988 - DNA, 10942 bp, Unknown
  16S sequences of unknown bacteria
ttatttttgcgacaaaagcccctatatttcagccttttatcgcaaaaatccgatttattcagagtatccttgtattacgaaattccgaagagcagctttgagtaggtaggatatctccagtatttttcgtccgttatggattccgcttcgtcgcatatcttgcgcagcttttccatgaggattatgaccttgcccttgatagcgaacgacgcttccgtcatatctgttattttgtccgttgcgtgaacttcgctctcaagctcttccgtgagagacgcaatggaggacgagagagaagaaagtcttgcggcaagcttttcttcgtattcggtggagatggcggtggagagagtgcgcttcatcacgcccgtttcgctgacagcctttgtgtattcgccgactgccggaagaatctgcttgtaaatcatgtcgatcattacgttagcttcgatttttatcgtctttacgtagttctcgagcattatctcgtatctcgagcgcatctctgtctctgtgtagacgtggtgtatcttgaacagctctatgttcttctcggtgagatacatcgtgagagcttcgggagtggagcgcaggttgagcagtccgcgtacatcggtggcttcttcaatccattcgtcgttgtagccgtttccgttgaagattattctcttgtgcttcttgatggtgtcgcggatgaggtggttcagctcttcctggaagttggcggaggtttcgagaatgtcggcaaactgtctgagggattcggcgactgctgtgttgaggacggtgttgcagtctgctatggagcttgacgagcctaccatgcggaactcgaacttgtttcccgtgaacgcgaagggggaggttctgtttctgtctgtcgtgtctttcgggagcttcgggagaatgtcagtgccgaggtgaagtcttgcggcttccttcgggtcgtagtgcttgtcggattcaagtgcgttcagtatgtcggtaagctcgtccccgaggaatatcgagatgacagccggaggagcttcgtttgcgccgagacgatggtcgttgcctgccgttgccgcactgattctgaggagagcctgatattcgtcgacagcctttatgacagcgcagaggaacagaagaaactgagcgttgtcgtgcggagtgtcgccgggggtcagcagatttacgccggtattagtgcctatcgaccagttgttgtgctttccggatccgttgacgccgctgaaaggcttctcgtgcagcaggcaaacaagaccgtgacgttttgcgaccttcttcattatctccatggtgagctgattgtggtcggtcgctatgttcgcctgagtgaatatcggggcaagctcgtgctgtgcgggtgcggcttcgttgtgctcggtctttgcgagtattccgagtttccaaagctccacgtcaagctcgcgcatgaaggcttcaaccttcggcttaattacaccgaaatagtggtcgtcaagctcctgtcccttgagggattttgcgccgaaaagagttcttcccgtgaagatgagatcctcgcgctgatcgtaaagctctttcggcacaaggaaatactcctgctccggacctacgcttgttctgacgcaggtgacgttggtgtgcgggtcgaacagcttcaatattctgagcgactgcttgtttatcgcctccattgagcggagcaggggagttttgttgtcaagcgcttctccgccgtatgaacagaacgcagtcggtatacataacgtgtcgtcttttatgaacgcgtatgaagtcgggtcccatgccgtgtagcctcttgcttcaaacgtggctctgagtccgccggaggggaaagaggaagcgtcaggctcaccgcgcacaagctcttttccggaaaactccatgataatcttgccgtcgcctactggggagatgaagctgtcgtgcttttccgcggtaactcctgtgagaggctggaaccaatgagtgtagtgagtgcagccgtgttctacagcccagtccttcattgcgtttgccacgatgtttgccacaccgagatcgagctgcctgttttcgtcaattgttttctttaaagacttgtacgtatctttcggaagtctttctttcatcgttgtgtcgtcaaaggaaagacaaccgaaatattcgctgaccgtagacatcggataaactccttcatagtactgatttttggtattcaagaaaaaacgacaatgacagctatggtgagaacccgcgaatgtctttgtcgttataagtaaattatactcaccttttggaaccgtgtcaaggctttttacgctcaaaaaaaacgaatcgtagatttgcacaacttgagggaccattttgtcagtcgattgtgaaaaaaaggaaaacttgagaaaaaccgctttctttggcttgacactcggcgggcggtggtttataatagtaactataagcaagatattaacgtcaggagtataatccgcatgaatacaaaaagccgagagcttagatttctcactacaaccgcacttttcgcggcacttctttgtgtaacagcaccgttttccataagcataggtcctattccgatatccctcgctacatttacggtttacgtcgccgctctcgtatgcggatggaagggcggatgtctcgctgtagccgcgtatcttgtgctcggcgcggtaggtcttcccgttttctcgggcttcatgggcggatttgagcgccttgtaggtcctaccggcggatatctcatcggctacatcccctgcgcgataactgtaggtcttttctccgatatggcgaagaagcaccgcgttctgtgggatatcgtcggcatgatactcggcacggctcttctctatacgctcggcactgcatggttcatgtttgtgtccggaaataccttaaaatacagcttggcggcgtgcgttctcccctttatcgcaggagattccattaagatagctgctgccacacttgtagcggaagtagtcagaagccgcgtaattcccgcagtgacaaaacacaaatcatattaatttcgacaaaaacaagcctccgaattcgaccgcgttggtcatttcggagatttttgtcttgtcatgatataaacacggttttattcataattcaaaccgttttatgtgatataatattaaagtaaatctttatgtaaatcaatgattgttccatcgaaaggacggcttatgactgacgtttacgaaaacccgctgtgtaccagatacgcgagtgatgaaatgaagaagattttttccgccgacactaagttctctacctggagaaagctgtgggtggcgcttgccgaaagtgaaaaagaactcggaatcaacatcaccgacgagcagattaaagaactgaaggacaacatttacaatatcgactacgataaggctaaaaagtacgagtccgaggtaagacacgacgttatggctcatgtcaagacctacggcgactgctgcccgaacgctgccggaataattcacctcggagcgacatcatgctacgtcggagacaacaccgatataattctcatgcgcagtggactggagcagattaaaaaacttcttgtaagctgcatcaaggctgtcgcgcatttcgccgaagaacataagtccctcccgacgcttgcatatactcatttccaagccgctcagcctaccacaatgggcaaaagagctactctctggcttcaggatctcgtatccgaccttgataaactcgagtatacaatctcacgtctcaagcttctcggctgcaagggaacaacgggaacgggagcgtcattcctcgagctttttgagggagactacgaaaaggtaaaggctctcgacaagctcatcgcagaaaaaatgggcttctccgcttgctactccgtctccggtcagacatattcgagaaaggtcgactttgacgttttagccgttctctccggaatcgcacagagcgcagctaaattctcaaacgacatccgcttactttcccatcttaaagagtttgacgagccgtttgaagacaagcagattggctcttccgcaatggcatacaagcgcaaccccatgagaagcgaaagaatagcgtcactgtcccgctacgttatggcggatataataaatccctcgataaccgcggctacacagtggttcgagagaactcttgacgactccgcaaacaagagaatctccgtccccgaggctttccttgcgacagacggcattctcgcgctgtatataaatgtagtgtcaggcggaaccgtttatcctaaggttgtggcaaagcatctgaatgaagagataccgttcatggctaccgaaaacattctcatgtactgcacaaagcgtggcggagacagacaaaagctccatgaagctatccgcgagcattccgtagcgtgcgctaagcagataaaattaaacggcgcggaaaacgacctgcttgagagaatcctgaatgacgaacgtttcggcttgacaagcgaagaaatgaacgagctgaccgacccgagaaccttcacaggctgtgccgaaaagcagacggaagagtatctcgaatatgagataaagccgcttctcgaaaaataccgcgatatggacgacgcgaacgtttcaattaatgtgtaaacccatcaaatttatataaatactcacgaatcaaacggaggaaacaacaatgttaactgctgtagttggaatgaactggggcgacgaaggaaagggcagaatggtcgaccttctttcgtcaagctatgacgtagtagtaagataccagggaggaaacaacgcgggtcacaccgtcgtaaacgaaaagggtacattcatccttaaccttcttccttccggaattacccgcgatgaaaccgtatgtgtaatgggacccggcatggtaatcgaccttgagcatcttgtaaacgaaatcgaaaagaaccgcgctctcggtctgaacatcaaccccgacagactcaaaataagtgacaaggctgtaatttgtatgccttatcacaagcttcttgacggtcttgaagaggacagactcgcgggcaaggcttacggctcaaccagacgcggcatttctcccgtatattccgataaatatatgaagaaggcgttcaaaatgggcgacctccttgatgataaagctatcaacgacagacttgcgggcgttctcgaatggaagaacctcaccgttgaaaagggctacggcgttgctcccatcaaggaagaggacgttcgcgcatggcttgagaagtacggcggcgtgctcaaggattacgtatgcgacacaacggaatacctcaagaacgcaattgacgcgggtaagtctgtaatgttcgaggctcagctcggcgcgctcagagacatcgacttcggtatctatccctacacctccgcttcttccacaatcgccgcatatgctcccgtaggcgcaggcattccgttcgctcatcttgacggcgttgtcggcatcacaaaggcatattcaagctgcgtaggcgcgggaccgttcacctgtgagctgtttgatgaaatcggcgataagataagagaagaaggtcacgaatacggcgcggctacaggaagaccgagaagagtaggcggatttgacgttgtagcaacaaagtacggcgttcttatgcaggcgcccacagccatcgcactgacaaagctcgacattctctccgctctcgataagattcccgtatgcacaaagtatatcgtaaacggtgttgagacagacaaattcccgacaggtgaaaccgctctcaacgaagcaaagccggtttacgaatatcttgacggttggaagtccgatatctccggctgccgttcattcgaggagcttcccgaaaacgcgcagaagtatatcaggttcattgaaaaagcaataaactgccctatcaagtatgtttcggtaggtgcggaaagagaccagtatttcgtaatggactgagcattgtaccgtaataaaaaaataaaagtaccgtgttcattaaaataaaataatataacgagaggtaattaccatggcggaaaaaatcgaaaaaaccacacagctctacgaaggaaaggctaagaaagtttataataccaccgacgaaaactgttacatcgtatcctataaggacgacgctaccgcattcaacggcctgaaaaaaggcacaattgaaggcaaaggctccatcaacaacagagtgagcaactatcttatgtctcttcttgaaaaggaaggcatccccacgcacgtagtaaagcagctgaatgaccgcgaaacagtcgttaagaaggttaagatagttccccttgaagtaatagtccgcaacatcgcggcaggctcactttcaaagagactcggcattcccgaaggaacaaagcttgcgtctcccgttctcgagttctgctacaaggatgacgcgctcggcgaccccatggttaacgaataccacatctacgctatgaatatcgcaactccagaagaactcaaggaaattgccgactattccttccgcgtaaacgatttccttatcaaattcctctcaaagtgcaatatcgacctcgttgacttcaaaatcgagttcggacgcacacccgacggcaagatcattctcgcagacgaaatttctcccgatacctgccgcttctgggactccacaactcatgaaaagctcgacaaggaccgtttccgtcgcgacttaggcggtgtagaagacgcatatcatgaaattctgaagagactcctcggcgaagaagaatgatagaatctaaattcacacaaggcgaagaaaaacatatccacgaagaatgcggagttttcgcggtttattcccccacagtgcgcgatgttgccgaagacgtttattacggactttacgcgcttcagcatagaggacaggaaagctgcggtatcaccgtatcaaaagacggcgttttcaaaatgcacaaggacgtcggtcttgtcactgaggttttcacaaaggacgagatagaaaagctcggtcacggaaatatggcgataggtcacgtaagatacggcacaacggggaattccggccgcacaaacgctcagcctatcacaataaaccacgaaaaaggccgtctttccgtagtgcataacggcaatctcacaaacgccgcggagctaagacatttgcttgagatgaacggctccatattccacacaacggcggataccgagataatcgcgtatgttgtcactgcggaacgtatctcccatgaaaatgaggaagaagcggtttctgcggctatgtccagactcaaaggcgcgtattcgtgcgtactcatgtttgacgacaagcttatcgcactgagggacgaacacggcttcagacctctctgctatggcaaaacctccgacggttctgtgatagttgcatcggaatcatgtgcgcttgacgcctgcggagctgtgctcgagagagacctatgtcccggagagatgctcgttatagacaaaaacggagtgcgttcgattaaagaccactgcggggctgcaagggagagaatgtgtattttcgagtatatatactttgcccgtcccgattctgttatcgacggatacagcgtccacgaagcgcgtctcagagccggaagattcctcgcggagcagcatcccgttcaggcggacatcgtaatcggcgtaccggactcgggcattgatgcggcgataggcttctcaaagcagtcgggaataccgtatgagattggattcatcaagaacaaatacatcggcagaacgtttatctcccccggacaggcttcacgtgaggacaaggttaagataaagctcaaccccatatcagagaacatccgcggaaagagaatagttcttgtcgacgactccatagtgcgcggtaccactcttgcaagaacgataaagctcgtgagagaagccggagcacgcgaggttcacgtcagaatcaccgcaccgccgttcagacacccctgttggtacggtactgacatcgactcggaggaaaatctcatcgccaacaagcacacggtggacgagatttgcgagataatcggcgcggacagcctcggatatcttgacgaaaaatatctccccatcctgccgtctgacgacagaaagcatacctactgcacaggctgcttcaacggagactacggagcggacgtgccgtctgttacctcaaaggacagatttgaaagctaaaataaaaaggtcggagcgtaaaaaactctgaccttttgttttgctttgatgaggaagcctctgatttaatgttatttttgcaataaaagcccttatattttagccttttatcgcaaaaatccgatttattcagagtatcctcagatgtgagagcggaagccgtttccgataatctcactggagtttgatatggtaatgaacgagtcgggtgcgatgtgtctgatgaagttacgaagtcttactgcctgcgaacgtcctacgattgaagtaacaacgaatctcttgtcgtgagtgtacgcgcccacagcttcttcaattgttgcactgcggttgaggtccttcataatgaattccgttatcttatcggggtcgcggcagacaatggtgaacaccttgcacttgttgatgctttcgataacgctgtctataacaaggctcttcgagaaccagccgagtacggagaacagtcctgtcttgatgctgaacgtgaacgcgaataccgcaacaaggaagtcggcaaggagaagtgcggttccgatgtttatgggagcgtatttgttgagtatcatcgcaataatgtccgttccgccgcttgacgcatccatgttgaatatgatagcggaggcgagagcgggaagaataacggcaaagcagcattcaaggattggctcgtcagtcagcggaccgctcatagggaagagaaactcaaagagcgacattgagacagagagcattatcgtcgtgtacgcggtttttatgccgaacgatttgccgagaaccacaactccgagaatcagaagcaggatgtttaagatgaacgtgatggtggacgccgagaggggaaccgctttagccataatgactgcgataccagtcactccgccgaaagagaagttgttcggaaaacggaagaagtagataccgaagcccattaagaatgaagcgaacgtcaaaatcgcgtattcatgcaccggcctcggtatgttgagtttcttattcatttttgtttgaaccctcattttgttctaaaaaaaatctttaattgagctataaaaggatatcataaaaagccatttctgtcaattcatatttttgatattttcgatagcgaattatgagaaaggtttgtatatattagaggttgatattcgtctttgctttctataaaatagtaaatgtcgaaatttgcatattttcgaggaagcctctgatttaaggttatttttgcgacaaaagtccctatatttcagccttttatcgcaaaaatccgattagttcagagtatcctcagcattcacacctgatgaacagacggaatatatataatgattaggatgtaataatggaaaaagaaatacttgcctgccgttctttgtcaataggctacgacggagcggcgctatgttcagggattgattttactctcggagaaggggagtatatgtgtgttgtcggtcacagcggaatgggaaaaacctgcttcgcgctgactctcatgggactattaaagccggtcgcgggagaagtggaatatatgaactctctgaaaagggaagagataggctatgttccgcagagtgacgagatacacggtcctctcagcgtaagagacgttgtactgtcgggatgtctcggcggaatgcggagcttcttcgtcacaaggcgtgagaaaaacctcgctgcggaagcaatggaacgtctcggagttacgcacctcgctaaaaaaagatacgcggagctgtctggcggacaaaaacagagggtgcttctcgcgagagccatgtgcggcaaaaagagacttctcatactcgacgagcctatgcacggacttgacgctgttgcaaaggatgaaatgttcgacgagattgacaagattcaccgcatcgagaaaaccgccgtgatactcatcgaccacgaagcccttgacggaacggttctgcacctgtcagatactcagctgtactgcggaaacgtcgaggactatataaaatccgttcccggacaattctatttcgctggaagaataatttagcagataaattcatcagttttaggagaacaatatgtcaggaaaactcagctacaagcatacgatatttgcgtgctacgccggatacatcactcaggcgattgtcaataacctctccccgcttttgttcgtcatattcagggacacgttcgatttgccgctgtccgagataaccctgctcatcacgataaactttcttattcagctgtgtgtagactgcctgtccgctgtgtttgttgacaaaatcggctacagaaaatgtatagtcgcggcgcacgtgtttgcagtggcaggtcttgcttcacttgcgattctgccgtttataatgcctccgtttgccggacttctcgtgtcggtattcctctatgccgtcggaggtggacttatcgaggttcttatcagtccgatagtcgaagcctgcccgaccgacaacaaagcttccgtcatgagcctgcttcattcattctactgctggggaactgtcgccgtgattcttctctcgacgctgtttctgaccctcgcgggacgtgaaaactggagaattcttgcgcttctgtgggcagtttttccacttgtcaatgctgtattcttcacacaagtgcctatcgctccgcttaccgaggaaggagagggcatgaaaactcgagagctgttcaagagcggacttttctggatatttgtcgtgctcatggtagcgtcggg

SEQ ID NO: 2989 - DNA, 6499 bp, Unknown
  16S sequences of unknown bacteria
aatagtacagccagcttcatacttgccaaatcatttttgcacaaggataaaaacctgctcacatcatgactatctaacaggtttagctgaccgtacaggacaggtagcttatagcgcatgcgcatattggtcacgcgcccgtcaaattgagctgcatcaatggaatgttccgcaaaaaagcggcggcaatgcttacggaaatcgtagttcattgtggaatcaaacatatctccgctcagccagtgctgcgcactctcccaaacttcaccgatcagcaggcagtcgcgctttacggcttttacagcttctctaaatcggcgccagaacgcgtcattgatttcgctcgccacgtccagccgccagccgtcaatgccaaattcccgcacccagtactggcccactttgcagaagtactcaatgacctccgggttttccgtgttggttttcggcatcatccgctcatatccgaagcactcgtattccgggtattcctctccggtctccggtcggcgcacagggaatttcaatccataaaaccagtccttatatgcggaggcttcccccttgtccacaacgtcctcaaaagcaaagaaacgccaccctacatggttaaatacaccatctataatcacacgcaaccccatatcgtgacaggtgtccacgagacgacggaaatcctcatccgtaccaaagcacgggtcgatgtggaaataatccagcaaatcgtacttgtgatattcccctgcggcaaaaatcggattgatataaatacaattaaagccaaggcttttgatatagtctaagttctccgcgattcccttgatcgagccgcccagctttccgtgcgttatttgccctttccatatgcactcactgggttcaccgctgattgtacgccgtgctgtcgcaaagctgtctgggaaaatattatagacaactgcgtctttagcccattccggaacctcggcaatatctgcccggtgattaaacggaagctgataatattctgagcggtcatccactcgctgatgagcgaagaagtcactgtaatacaacagcttttccttcccatcgtccagttcaaagtaatagcagatccgcttataagggcttttcaaaatcacttcataataatcaaaccattcatcctgcgctacaaccttcatcggtgtacttgaaaaaatcaccggtgtctgacggcaagccctatccgcatagtaaagtgtacaggcgcgaagagcatcccggccgcagcgcagccgaaacacaacctcctgctcgctgatcccatgtgcatcagcagacatgggcacatgtttaatcgcgctgagattcattatctgcttcaccccattccaattaaccttttacgccgccagcggttaagccggaagtcatgtgccgttgtacagcaaagaaaataatcaaaatcggcgcactcacaaccagcgatgccgcagcaaatacgggccagcttccactgatttctgtcgcctgcagcgaatacaggccagccgccagagtatagttttctgcgccagtcataaatgtaattgcaaacagatactcgttccatacataaatcaaaatcatcaccgctgtaacgagaatgctgggcttcgccaatggcagcacaattttggtaaccagctgaaaactgctggccccgtcgatagcagcggcttcctcaatttcgattggtatggtgtcaaaatatcccttcatgttccaaagcccgaacaccgccatagtacctgtgtaaacaagtatcagcccaatcctgctgttcaccagccccatggggctgagtaatttgtaaattgcaaacatagagagaacggatgggaaagaatacagcagcaacaaaatttcgagaattgctccccgccctgcaaagcgtttgcgtgaaaacacatatgctgccggtatagccgctccaagagaaattactaccgtacacactgccagaatcatgctgttcttgaaccacagcatgacagattgttctgtgaacacagctttgtaattgtccagtgtaaattgctcagggataaagcggaagtccgaactcagcaggctattctctgcattcagagaaacagacagcgcatacagaatcggcaccagcgtggcaaaacacagaacaataaagaagatgtggagtgcgctatgtcccagcaagtggcgcaacttctttttctggtgtaatgacatcttcacccctccttcgcgcgctgccttgtcaacagagaaaagacaatcagtacaatgaaaataataatagacactgccgagctatagccgtagttgtttgtgataaacgcattttcataagcgtaagtcaaaattgtatgcaggttcgagcctgtttttgctcctgcctgttgtgtgagcaaataaatcacgtcgaactgcttgaaagtagtaaacactgtgataataacagccggcgcaataatcggcttaatcgatggaatagtaaggtatactgtacgctgcatccagttcgcgccatccaaaatcgcgctctcgtagcagcttttatccacagcctgcaatgcgccgtccataatcataatcataaacggaagcgcaagccacaggtttactactgtacagcagataaaagctgaaacatcatttgccagccagcgttgggcctccagcccgagcttttccatccactggttcaaaagcccaaactgtgaattgaacatacctgttttccagagcaaaatagagacataaccgggcatagcccacgggaacatcaacagtgttttataaacacggcggaacttaaagtcttgaatattcaataaactggccagcacaaaggcaattacgagctgcagcaccatattgacaactgtccacaggatcgtcaccagcagtgccgacaggaagccggaatcgaacacaaaaagtgcgtccttatagttttcaagcccaataaagtcaaagttgaaccagtggtatacgttcatgttggtgaacgaaatatatcccgtatataaaatcgggaataccacgatcagtaaaattaaaagcaaagaaggcgcactgcatagatacgcccataatgtgtttttccggcgtttcttcatagcctttcgctccttacttcatggatgcgatcaaatcaagcgctttctcctgtgcggccttggcactttctgtcacatccttaccgctcatattgatatcgaccagcagattttcagccacagtccacatcacatccatctctgggatgttcggcatcggcaccgcgttttgagcggtttcatacattgccattaccatatcatcctgtgccacggcaggatcatcgtagcagctctcttttgcaggtgcgcatccacttgcctgagcaatggcaattccgatttcatcaccagttaactgctgaaggacctttgcaatcgcatcatgctttttctctgcggcaactttcaacacgtgcagcccctgtacaccagaatacggtgcaattgccttccccgtttcgtctacaaccggcataggcgccagccccaggtcaattccgctttctctggcagtcggcaccagccaaggtccgccaatcgtggaatgcgcttttccttccctgaacagagtattaactgtagcatattcgccttcgctgggcatatattccacaaatttcttatgatattccaacgccttaatcgtttccgggctgtcaaggccaggctgaccttcttcattgatgatatagccgtcaaatgcatgaatccaccccgcactataatatgcagtgctgtgctgctccacaaagccatagtgtccgcccattgtggtatcctgcatatattgataaagctcttctgtcgttttcggaacttcttcatcgctcatgtagcggcggttatacatgtacagcagcgtttcaaaatacagcggcagctgatagacttcacctttataggttgccgcttccaccgtcataggcagataggcatccagtacggacgaatccacaaaatccgtgattggtgccaaaatgcccatttccgcatatacccctagtttatcgtgagcgaagaagtacatgtccggggcggcttttggatcattacctaccattttcaaggcttctgtcaagccatctttccgctccagcttcacaacaatatccggggccagcttatccagctccgcttgcagagccgctgcgacttcatcttccttatcatgccaaatcgtaatcgtcacagggccatcatctgtttccgcagcttgggagcatccggcaaaaagtgttgccatgaggcatactgataaaagaagcgcaaaaaaccgtttcattcgttcagctctcccttcataataaagtaaccggcgcaggtaaaggaaatccccttttacctgcgccgaatgctgttaggatttctttttctttacgataactacaccagccaccacagcgataacggcaactgcagcaactacgattactacaggattcacaccgctttctgccggctgttcctcgacagcaggttcagaagagtcagatgctgcgggttctgtctccggctcttcataagaaacagttgcattttcggcatctgttaccacgacccaaacatccttgcccacgtctacggacaaatccgttgtctgtacgcttccttcattcccgttgacgatgatgctgttaatccagccaggcaccgtcagtgaaagccatccattgcccgcatcctgcagggcttcgcccggccatgcagaaaatgcatttgtaccatccggcgcggaccatgcccaaagatgcggttcgctccagtctgccggagcctggacatacaccgtgatatcttcggctactggtgcatccgggtcattgtatgtaaactcggcagctccctctgaatccacggtcacccatacttcagcggcatcaatggtaagatcttctgtctgaacctcgcctccgttggcattgatgataacactatttacccaaacaggcacctccgccgtgtaccagccattttctccggctgtcatcgcctcgcccggccaagcctcaaacgcattagtcccgtctggatcgagccatgcccaaattcgaacatcctcccagctttcatctaccttggcatgaacttcaaacgtctcaacatactctgggatttcacctgttgttttagcatcatagctgatttccaccgtatcggcgtccgtaattgtaagccatgtatttttggcctccagcttctggtccgccgtttggacagcaccttcgtttgcgttgataatcacatttcccgcagtagccggaatccagcaataataccagcctggattattttcatcggctgtcattttttcgccgggccatgcttcaaaggcattcgtaccatcgtcggcccacgcccacatgcagggggccgaccaatcttccggcacctgcgcatacacgataatgtgttcatcatcagccgcaaaagccaatgtgggaaccattaacaggagcagcatgagtgaaactaccaatgatgtaacttttttcgctgttttcatggatgatcctccttactatttctgctggattcaaggcctgaattccttttgttgcttataccatagcacagttaccaattcacttcaacgaaaatttaggaaaccgtttaactatttatttgtaatattatcacatattaaaacacaaaataccgcgcacaatatacaaccatctattaaaagttcttctgttttaatcaatttgtaataatttaaagcaagatttaagaaaatatattcgtataaataagaaaaggaggacgaagcgcaaggttgaatcctctttcttttgctgaatactaaattatcaacatcgtcggcggctgccgaggttaagggatataaaaaccaaagcttccgggctaaggtatagacgaaggtttattttttacaatctacttcctgaaggattataaagacgggtgaattctgctgttctgcttgtcaaagcggcagatttggtgaatattccaaaaagtctttatgcagaagaaagtccactgctgttattcaggcgcggggtaaaagcataggctgcggccatctcagccgcagccttctgcgttatctctatctccaaaaccatttttgttatcacaatttacttcgtgagcccgttttcatcttcatcgctagtgacgattgtttcttcacgctcttctatccgtgtgctgtggcgaacctgatacatgccgctcaataccgtctgaaggcagacgggtatgaatattctaaaaagcttcatatagaaggaagctcactgcggttcgctgcaggcgagggcctttctgatataagccgccgtcagacgaaggttctcataagcttatagatatgaaaaaagccactgtccactttgtgcagacagtggcttatgtggtgcacttccagggactcgaaccctgggcccgctgattaagagtcagctgctctaccaactgagcta

SEQ ID NO: 2990 - DNA, 8737 bp, Unknown
  16S sequences of unknown bacteria
gagcacgtagtagccgcccgagccgacggggtcgcccatcgcgaactcggcgaattcgggcacgagcaccatcgagatgatgcagcagccgatgaaaaaggacacggccatggtgatgacgatggcgcggttgtggaagtactccaggtgaaacaccgggtcctgcgcgtgtttctcgacgatgcggaagatgaatgcggagatgacggcgcagacgaggggcacccacgcgccgggctggacgatggtcgcgccaaagtcgaagaagtctatggccttcaggccgagcagcagcatgagcacgaacagggcaaagaagatcgacccgaacaggtccatgcggccttcggtctcgaccgtgctcgtgggcaggaaggcgatcgcgccgatgatgacgagcagacagaagggtatggccagatagaacatgacagcccagttgtcggtgcccacgagcccgatgatggcgctgccgcatgccgcgcccaggacgttggccacgccgacgatgccggcggccattcccagtgccatgccgcgcttctcgggcgggaacgacgtgcccatctcggcgtttgcgacggggatcatgccgcccgcgccggcagcctggacgacgcgcccggcgagcaggatcccaaatccgccgaagtgctcggaaaggccgcagatgagcgagcctgcggcaaagatggcaacgcagacggtaaagacgagcttgcggccgtggcggtcggcgagcttgccgatgatcgggatgagcgccgcgtagaacagcgtgtagatgttgatcatccagatgcccgtggaatcatcgacgccaaagccaagctgcacgacggtgcgcacgggggagaccatgccgacgtaaaggccgccgatggtcaggccgagaaggtatacggcgagtattgcgccgaagtgcgcgcgatgggtctgcgcctcggcatctgatgcatgtgctgacatagggatggtccttatgatgtctgtggcagctcgcttgcggggcggctagccttcggggagctcgcgcgtgacgaactcgatgaaatcgtagtgctcgaagaccttgttcgcctcgttgatacgggaaagcgcgtcgcgcatgcccgcaagtgccgccttgcgcttcttgaagcggatcttgctcgccttggcgtactgggcaaggcactcgtcgaatgcctcgacgagcgggtccacctgctcgtggtagcgggcgttggcgcgctcgtggtctccggcctgggcatcttgcgcgagcgagacgatctggtcgtgctcttcggaaagcgcggtcacgacgcccaagatctcggagagcttcttcttgtagtcgccgttgtcgacgggctcgtctttctcgagcgcgctcacgaccgcagagcggtacgtggcaaacagcgcggtggcgaccttgctcgacgtcttcgcgcggcgccagtagaacatgacctgcttgtgggcctcggcgcggatctcttcgtcttctaccaggtgaaacgtggtaaatgcctgctcttcgccggcgaagacgctcgggttccactgctcgcgctcgcgtgccgtggccacgatcttgtcgaactcgtcttcgtcgacgttggcgtccgtgatcgcgttgaggtcgtttccggactgctcgatggcgtcgagcaggatggccgtgcgcttgagcgcctcgccgatgtcgatgcgcgcgggctcgtgtgcgggggcgtcctcgtcgccttcctgctcggaggcgggagagggctcggaggcggtggctggcgtttcggcatctcctcgggcggcggtctcctcggcgatgatctgcgcgacgaggtcctctgcgctcgtctccgcgggaccttgtgtgcctgtgccgtcaaagatgtcgttgcgttccacgttaatgctccatttgctcgatgttgtgactgcgatagctatagtatcgcgttacgacgcgctgcgaggcgaaaaatgggtgcgagtcagacggtttgcgccgtgcggcgcgagaagggatatgcgcgtccgacctgcgataaatgcgcgacgcggagatatgcggtatggcagctcgcgcgtcgcgaaaagaatctcagaaaaatgctgaaaaatagtttgcattggctaacaaatacggtatagtacctgccagttagtaaagactaacttcctctctcttcgccccagcgtccctcccccttccggatgctggggctctctcgttttcacgggcgcacgcccgtaagcggccgtggcagcgccgcgtgtcagccgtaccaggcctcgccgaggcgccggatcccctcgggaatgtcctcctcgcggatctgcgagaagccgaccagcacgtaattgcgcatggggcgggcgcttcccacccagtagcggttggtgccgtagacgcgcacgtcgtgcgagcgcgcgaggttgatgagctcggactggtcgcgtttctggccatcgcccagcaggatgtggagccccgcgtcggcgcccacgatgcgcaccttgtcgcccaggtgttcgtggatgctcgcgatgagggtgtcgtggcgcttgcggtagctgctgaccgtcgtgcgttcgtagcgcgcccattccgggctgctcatgaacaggtgcatcatctcctggtcgagccacggcagcgcgcagaagcggtagcgctgcacgtcgtcccagcgctccatgagcgcaggcggcagcaccaggtagctcatgcggatggcgggggagaggatcttcgacatcgtgcccaggtagataacgtggtccgggcacagcgagtgcagcgacgggatggcgtcggaaccatagcggtactcgcagcagtagtcgtcttcgatgaggtaggcgtcgtgccgttgggcccagtcgatgaccttgagacgcgtggcgagcggcatgatgtggccgagggggaactggttggagggcgtgagaaagacgagcttcgcatcgcagtcctcgagcgcgcgcagcaagacgcgcccgccgcggtaggcgggcagcgcggtgatgtgcgaggcgcgttcctggaagaccttgcgcgccgcgtcgtagcccgggttctcgatggcgatgctgcgctgctcgagcgggaacagcgaaatgatggaatgcagggcactttgcgtgcccggctgcatgatgacctgctcgggctggcagtgcatctcgcgcgtcgcgttgagctttcgtgcgatgcaggcgcgcagggcgggcaggccgagcgggtcgatgtaggtggcagcccccgtgaggtcctcttcgtcgagcgcctcgacggcaaacgtcttcagcaggcccgtggggatcctgaggtagtcgcggttgccgtaggagaagtcgtagcggcagcccaggctgtccccgagcgggcttttgcggtgggcggggagatggaccgatgcgggagcggcgtcttgctccggcagctgcgcctcgacaaccgagaagtcgaggtcttcgaccacgtagccgatgccgcgcttcccgtgtgcgtagccctccaggctgagctggcggtaagccgcctcgacggtgttgcgggcaacgcccaggctcgcggcgaggtcgcggattttggggatgagggcgccggcgggaatgctgcccgctgcgatctgatgacggatctgctggtaaatttgccggtatgcgggaatatccgaattacggtcgatacggatgtcgacgggtgcgacctcgtgcatgttccctcctcgcctttgacacaaggggccgtgggtatcggttcattttggcacaaggggccgtggacatcggaccaaaatggcacgaggggccgtgggtatcgtgtcattttttcgcaagcgcttctcgcttagagatatattctcgattgtgaataatgacgttgcaataacaacaaaaccagttgcaggggatgcaacggcatttccttttgaggggactacatttgcatcagacgaaatgaacgcaacaagggttggaggtcgtaatgtttactttgacgatgtgctttttgatggtgatggctctgtggttcgggctgacctacctggtcacccacatcgaccagatcgacgagcagaacctcgtcgactacaaggtctacgacctcgccgagctgcgcaaggctcaggaggcaaaggccgcacgcaaggctgcgtagcgcgacgttccacccgcacggaaaagaccccggaggcagaggttacctccggggtctttttttgctgctacttgtcgagcccgaactggctcttcgagctcaccttaccgtcggagaaggtgatgctgcagttcgaggcgatgttctcgccgtcccacatgtacagcttcgacgagacgccggcaatcttcgtgtcgctcgagagttcgccgtcgccgcccatgatcgccacgacctcgtcataggtcatgcccgtttcgacctggttgtacttgtccatcgtggccttcgcggtggactggtcgtttacgccgatctggctcttgttcgtgaccttgccgttctggaacgtgatggtcgcgacgccccaaccgtcagattcccactcgtacatcgtcgtcttgatgccgccgatctcgttcgtgctctgctcggtgccttcggagccgataatgctcacgacctggtcgtaggacatgccgttttcgatctttgcgaacttgtccgcgtcgatcttcgtgctgtctttctcctgctgagcgccttgcgaggcagtgctacccgagttgccggagccgttcgagctgtcggacttgtttccggcgccgctcgcgcacgacccgattagtgcgacgaggacgatgatcacgatgacgatgatgatgagtttcttgtggctcttctttggagctggtgcttgctgcgtgtctgacatggactctccctcgcttgcttcatcccggccaggcggtgcctggcgattatctattgcgcggacaattttttcagagcgggagggcgatttcctcagctgccagctaagcccgagagcgtgcgccgccaaaagtggcacgaggggccgtgggtatcgtgtcattttgaaccgaggggccgtgggtatcgtctcaaaatgaggaatcgtgtctcagggtgcaggtacactgctacatgaggaatatggatggaaaggcacggatggctcagaagactatcgtcagaagcgaatacgagtaccgtggcgcccgatgggccgagacgtcgggcggggaccgcggccttgcgtgccaggacgagcgcatgggcgcgtggttcttccgccatgcgtttggcgaaggcggagacggtgagaagctcgccgcgccaccggcacggttcttgtcgccagccaccaccgacgcgcagaggcgccgcgtgctggagcgtttcaagcagctcacgatcgcgtgcacgtgggaagagcccgaatccagcttccggctcagctttgcgcgcaacaggtttggcgcgcactgcgttggctacctcgggctgcggcgcaaggtagaatcggcggatcccgacttcagcatggtcggctccgaggcgcgcgcgtttgcccgcgagcttgtggaagaggatctgtggcggctttccggcgtctattcgcccgctcaggcgagcgcaggcgactgcgggtcgtggctgctgatggcaaccgatggcgtgcgctgcttcctcgcgcagggggaagacgcatggccgcgcgagctggaggggctgtgtcgctcccttgagcgccatggctttccttggctcatgaaccccttcggcgagcttggcgctccaacggcggagcccttctaatatgcaaaaagcataagccgaattttttttaattgggcactttgcaacattctgcaaatcacatatagttcgagtgctgcattgattggcaatgcaggatttccattagagaggaaaagaacgacatggcagtcaacgttgaccagatcatcaacaaccacaacacccgcatgaaccagatcgagatcgccgagaaggagaccgacaacgtcttcgtcaccgcttgggaagctgagctcaagaacagcctcgccaaccagccgaccgactagttcttcgcaacatagcaagcgttgcaaaaggccgttgctccttcgggcagcggcctttttcatgtctttcagaaaaacgatgcggcgggaccactatcttctggacgaaagccccgtcccaccgtcatgcactttctgcgcccgggcactgcggcgtttcttgtcgccagcgcgtcttcagtcgattcgctcgaacacgaggttgcacaccgtgcggtcgccgccgccaaagcccgcagagttcgcggtcgactgcgcgaacgtgtgcaggcggtagccctgcgcgtactgctcgttgcaaagatcttcgatctcgcggaagttcttcgagcccttgccgacgaacttttccctcagcacgatctgcattacccggtacttgccgttgctgtagctgatcttgccctcttcgtcgttgaacgcgtccatgattcccatgtgcatgtcctctctcgtatggcacgatacccacggcccctcgtctcaaaatgaaacgatacccacggcccctcgtgccagtttagacgacgaggtaggggaaggcgaagagcacgagcgcgagcacgcaggcgatgcccacgacgaccttccagaccaggtactcccggtccatcttggcgcgctcctcggctggcggctcgtcgttggcgcccgatgcggccaggtcgagcgtgaactcgccctgcttgccgtagatcttgtagcagatcgcgtacacgaccagcgcgatcgcacaccagatgattcccgtcgtaaaggcgtcgggctcgagctgcgtcatcatcaggatgtagatgacggcactcaccggcgcgccgatcttgatgccgggcgccttgtacgcgcgcttgagctcggggaagcgctggcgcaggaagagcgccgcgatgatgccgatgacgtagtagaacaggtcggcgaacagcgagaggttcgcgatgtagtcgagcgagttggtgaggatcaagacgatcgacacgacgccgagggtgatgacggagacgtacggcgtgctgaagcgcttgctcgtcttcgcgaacaccttgggcaccgcaccgtcgcgtgccatgacgaacaggtagcggccggtcgttgccacgctcgcgttgagggtcgagaaatcgccgccaagcgagatgccgatgcacagcaagacgagcgggaagcccatgataccggcggacatcatcgcctgagcaaacggcgcgtcggcgtcggagagcatcgccatcgagtcgacgggcgtgatgccgacgaggaaccactggaacagcgcgttgaccgcgaacacgacaaacggggtcagaaacatcgcgcgcggaatgttgatgtgcggatacttgatctcctcgcccatcgagacggcggactcgaatcctgcgaagcaccaccagatcatgcacatcgcggcaaagaacgagaggggattgttcgcgtcgatgaagtcgggcgtcgtgacgaaggtcggcagactcacgttggggatcatcgtcaaaaaccagatcgcggcaactccccagaagaagaacatcgccgcgttctgcacgcgccccgagacctcgaccccgaacacgttgaccacggtgaacccggcgacgacgattgccgcgaggatgacgtcggagatgggcagctctatgccgagtgcgaggaagatggtcttgaagtaataactgaatgcaagtgcctcgccgccgttgaccgcgacgagcgagatgatgaagttccagcccgcgagtacgcccgcccagcgcccgatgcccatcgatgcaaactggtaggtgccgccggcgtaggggagcgacgcgcccatctcggcgtagagcagcgcggggtagatgctcacggccagcgcgaggagcgtcgcgaagataacgaacggaccgaggtcgcctacgacgtttgagcccgtcgtgaacaagccgacgccgatgaccgagcctgctgcgacggtgacggcttctcgcataccgaacttgcgtttgagctggccttttccaactgtgccttcgccctgtgccatgtattgcctctcatatcagtagactttagcaaactgtagtgctgtagtaagcggctaggagtgtagcgcaagggggtgcttgccacaagaacttttgcagctgacagctagaggccgcgcacgacgtggcgcgagcgcagcagggcgacccagccggcaagcgcaatcgtcatcggcgcgacgatcatccagcccgtcgcatcgacgtatgtgccaaagacgggcagcagaacgaggaacatgcccaccgcgcccaaaaagacgcgcatgcagttgatgagcgcggatgccgagccgatgtcggaatcctgctgcgcgagcaggatgttgaccgcgtacgggcgcacggcagactcgaagaaggcgaagaccaagaacaacccgcagaagacgaacgcgttgctccttccgaccaacaggatgaggatgcccacgacgatcgtgcagacgatcgcaagggaggtgaagaagcgatgcgtcacgttcttggagatcttcagccatgccgcggggccgagggcgttcgtcagcgccaccgttgcgaagaacaggctgaagccgagcgcgctgaagccgaagaagtcgatgtatatgtacgagccgaccgacacatacgccatatagccgatttcccaggcgctggttatcaggaggaagaac

SEQ ID NO: 2991 - DNA, 4768 bp, Unknown
  16S sequences of unknown bacteria
ccaggaacatcggcttaatgacagcggcgcatttcatagcggtgggcacatcgcctatgacgataccgactaccaagccggttaccaacgcatcgccgaatgtagcagacccccaggtatagccgatagaccaggtggttacccaataccataaagctaatataattgcttgtacgattgacataataaatccccctagtagaagtaatgaccaatgtttgcctataatcctatcgctaccctcctttcaagataggcactttttataaatttacgaacatttatgtaactaaatattatcattgttctataagtgtgtcaagattacgacaaaacttttaaaatatcattaggcatttgtatcacgttatattttcttgtacgactaacaatatatgaaaacgcggcagagaatatgcactgccgctgttaaaaagactataggaagagaacaagctgctctatgagaaacacggtacaggtagaggcaatggctacgggcatgagcccaaagcgaaaataggacatacccaacgcaacaattgtgccgcatacggcggagacccatccgcttgtagaggaaaatacatcagggaagaccatggcggccaatatagcatagggcatataaagcagaagggactggaaaaatttgttctcaatccgctttcgaaaaagaatcaacggaaggaccctggggagatatgtgaccagggccatcagcccaatggaaaggcaaagataagaaaatgtcattgatcgtcctcctccccgagcggaaaccatttggcgccaatggcagaagcagctagcccacagaggatgatgatccatccgctaccaatttcccgcacgcctggaaggaaatgaagcagacagctcagcaggatggaaagcataaccacagcaaacacgcgcttggatttacggctagggggcacaataatggcaatgaacatggcatacaaagcaatgccaagtgccatacggatggattctggcagggcgttgctgacaagcgcccccagcgctgttccgctgccccagcctacatatggcgtaaagattaaccccatcaaataaggaaaagagagcgtccccttttgctgcatggaaacggcaaagatctcgtcggtattgccaaaggcgatcaggcagcgctttcccaaggaaagatccggggcgatgcgctgcgaccatgataaggacatgagaaaataccgaagattgatgatcaaaacggtaaaggcgatttctagaagagaagcatgggcagcgataagctccattccggcaaactggccagtgccggtcaaattcgtcagagagatggaaataggagcccaaaagggaagcccatttttgacggaaagcatcccaaaggcaaaggatacggatagatagcccaaggcaatgggcagtccatctttcattccttgatataggctggtgcgggcgctgggcatggaaacactcctttctgccgtgtggcaaacatacaaacaaaaaacttcgtttttcaaaacgaagcaagaaaaaagacaatgcaaaccaaaggcttgacggattatcctaacactgggaaagaaaacatgtcaaggcttgcaaggatcgattaagaatcattaagagcagcgagcagggccataaaccgcaaagaaaaaatgttaaaatatcctaacatgcgcaaacaataccggaaaggataggaaacaatgaacgaagtaaaaccaccgaaaaaatctatgatctattattaccttatcatgattgtagtattgctatgtatcaatgcctggattgtaccggctttaagcggacaaaaaattcaggaggtggattacagcacctttttgaatatgctgaatgaaaaatccattgcttaggtggaaattcaggataatcagatcgccttcaacagcaatcaagaagggaacaagcaaatttatgtgacgggccgtatcgaagaggatacagagctggtgaaccgcttgcaaacggcgggcgtacagttttcaagagtcatagaacaggaatcttcgccgcttgtagcctttttaatcacatggcttgggccgatcctaatcattgtgctgtttgggcagattttcatgcgatcgatgaaaaaacgcatgggtgggcaaaatgccatgatttttggcggcaacgacagtaaaatgtatgtgccggccacatcgggcaagcgttttgatgacgtagccggccaagatgaagcgaaagaggcgttgacagaaatcgtagactttttacacgatcctgaaaagtataggaaaattggagcaaggctgccaaaaggagcgctgttggtgggccctccgggcacagggaaaacgctgttggcgcaggcggtagccggcgaagcgcaggtgccgttttttgccatatctggctcggaatttgtacagatgtttgtggggatgggcgcagcgcgtgtacgcgatctatttgagcaggctcaggagaaagcccttgcatcgtattcatcgatgagatagatgccatcgggaaaaaaagagatgcccccgggttgggcggcaatgacgaaagggaacagaccctcaaccaacttttgacggaaatggacggatttgacgccagcaagggtgtggtcattttggcggccagcaaccgtcctgaaaccttagatcaggcgttgctgaggccgggccggtttgatcggcgtattccggtagagctgccggatctaaaaggccgggaagcgattttaaaagtacatgccaaaaacatacaagtggatgcgcatgtggattttgggctgattgcgcgttctacttcgggtgcttcaggggcggagcttgcaaatatcatcaacgaggcggcgctaggcgcggtaaagcataacaggcagagcgtattgcaggaggacttggaagaggcggtggaagtggtcatcgctggctaccaacgtaaaggggcagtcatcaacgatagggaaaaacgcatcattgctacgcatgaaattgggcatgcgctcgtatcggcaaacctgaaaaaagcagcaccggtacataagatcacaatcgtgccccgtacctctggcgcattgggctacaccatgcaggtagaggaaggagaaaatgtgttgatgaccaaggagcaggcaatggaccgtatcatcacttatacaggaggcagagcagcggaggaagtggtgtttggcgaaattaccagcggcgcttccaacgacattgaacaggccacaaaactggcacgtgccatggtaacgcgttttggcatgagccaggaatttgatatgatggcgctggagacggtgaacaaccagtatctggggggcgatacccagctgatgtgctcctctgaaacggcagccaaggtggatgaagaagtgctggccctcatcaaaaaagcccatgaaacggcaaaggagattttaacacagcaacgggcaaagctggatgaactgtccgcctatttgctggaaaaggagaccatcacaggagaggaattcatgcgtatcctaaggggataaatgatcaaaaagcgtgtccgtattgggacacgctttttgcttgcttgttatccttgcgcctgcagaaagtccataaccaaggcattgaatacatccggcatcttggcggcgatgaaatgatccccatctgccacgatgaaaagctctgctccttcaatggcttctgcgatgccctgggtatgtgccggggcaatcatatcatgttcgcccgccaggatcagggttggcgtatgaatctgtgccaacatatcaaaagtaaggttgggatgatggatcatcaacccgtaaatttcggcctttttttgatattcgaggtctgttttggctttctcgcataaaaaggcatatttttccttttgatgcgcctgtatttccggaagtaagccagcagggaatagattggcgccatctgcaatcacactgagcacccgctctgggtatttcagtacggtatgcaacgcaatgttaccgccgtccgaaaagcccagaatatgcgctttttgaaggccaaggtcatccaagacggcgataacgtcatcggcaaatagataaaaatccaacggcgcattgccacgagtggaacggccatgggcacgcgtgtcaatggctatgacctggtagagctgtgagaatacaggcacttgatgctcaaaataagtgctgtcctctccgtttccgtgcaaaagtaccagcggatgcccttgcccggtaacctcataatatagggtagcgccatgagaggcagcgcagtgatgaatttcagtctgcataagtccgtacctcctttttagctatattgtacccaaaggccgtaaagcatgcaagataagccaaaagcatggatgctttttcaagtatacaatgctataataaaatgcttatgccgggaagataagaaatacgggcgaagcataaaaagcagaaagaccgggaggcctttcccggatgggtatatagatgaaacgaaaatggatttccggaatcacggctctgatgctgtgtatggcaggctgtctgcctgtagcaatggcgcagccagaaatggcggaagggattacacataagtgcagaatcacagtttcggagggagatccggcggtgctaacggataaggcgctgaagacgcattgggccccttcagccgcgcatgggcggatcaccattgatttgccggatcgaccggccggcggcctgtccgttagttggtttgcagagccggaggattatttgatctcc

SEQ ID NO: 2992 - DNA, 18586 bp, Unknown
  16S sequences of unknown bacteria
aaaacaaaaaaggtaaggtaaaaatgaaaaacgaattacaaaaacataaaaagagtgacggcataaagtggtttgcgaccttgcttgccgtcctcattttggcgctcgctgttacggcggctataacgcagggtttcaagaattggaatccctatggttggtttgacaaaaaagaagaacagcccgtagataaggacgaaacaaatgataattcgggcatgaccatgtcccctacggaaaatcaaggcatagacttaaagccgcgaatgttgaatcgctctgaatttaaagaatatgcgatatccgaaactgccgaaagtgcatttgttgtcaaagcagtagtaaaacccgttacggtagaaaataaagcgatagattggtctcaaagtttttcaaattcatcgtccgaatgggcgcaaggcaaaacggtaaccgattatgtcgaagtcgttcccttaaacgatgacggctcggaagttaaggttgtttgtaatcagtcgttcggtgaacagattattttaaaagcaacgagccgattaaaccccgatattttcacggaaagcgttgtagattactatatgaaagttgaatcggtagattttgttttcaaatacggcgatgaagttttggacaatgttacaaaaggttctgacggcgtttatcgggtagattatacgcgggaaataaaggactatacggtcgaagttgttccgaagtattcttcttctacgatatccgatacattcgaacggacgataacgggtcaatatacggatactttcggctatcaaagcgaattaccgtttacaaacattagtatgcaggcttatttgaaagcgggcgaatcctcggaatctcctatggaagattatgaaacaacctatgtgtcatacgttgaaatagcttgttatgctaataacggcaaggaaataaaagatgctttgttttccgcaggtatgtctttggtttccggtcctttgggtggagtatatgaattaaagcattccaaagcattaaatgcacaggaagcatatcttgcgtttttccccaatgatgcaaattgggacgaaactgagcttatgaaaaatcagtcggcggcaagagaaatttttgaaagttatcaatcccccgcaggttcatttactggcggcattgaaattcaagacgaggacgctttgtgtgttgcggcattggcttgttgtgaggccaatgtcggtatcatggattttgaaataacctttgcaggaaaaaactctacttatacatataatttttctttgggatatacggaatcctctttgaaagtcgcacgggatttagaaatttctttgccctcgatcatattttaaggcggtgaaacatgagtaaggcaaacggtgcaaaaaacggaatagtaaaagtcataacttgggttttggtcgtattgcttgtactcggcggtgcgggaataattgtgcgtttcgcgttaaaagaccaaggcttgaattactacgtggaatacaacgacaaaaaatattttgcgaatatggaaagttccgatatatggttatctcctattcaagaaaacgcttttgccgtaaagtcgattacgggcaagcctatagattattccgtaaaaatcacggcgaatctcgagaacaatttcggattccttcttgacggtaaatatttacagttttacagcaccacggaatcggataacgattacacggaaatattcgaagtgcagaaaagcgcggagggttttaccgttacaattcccaagggcatgacggtgcaaaaagccgttgaaaaacaatacggcggcgaaatcgaattggcggaagaattggaattgttgaattactttcttatcatcgtaacaatcgaaaaagtaagcgtggttttgccgttcggttttttaatggaaatcacgttagatcccccgtcaattatattttaagaggtaaaacaatgcgaaaaaggttaaaagataatttaatccgaatatctgctttatttctcttcttagtattgtgtattacagcaatttggggcggacagtttatcgcccctactgtttatgccgaaagcaaccgtgatttggaatttgataaaacgaacattctggacgatttgggaagcgcgacaataaacggaaagccttttaattttttgaattatccgttttattcgtctgctgaacccgaaatgaaaataatcggtgttattgaatattgttacgcttatgcttcaaacgcgcgtggaaattacgggttgtatttatatgtgtataatccgaacggacaggatataaacatagcaagcgcagcaaacgtcgttttaatggcagtcgattacgatacataccctgtaacggaagaaagcaagccgacaaaatacgaagaatttaatttgaaattctgttcaacgattgaaagcggttcgtataaacacttgttttataagttccgcgtcgttgatcatgaaagcgcggacggaaaattcatgcgcgaccgtgtaaacagcaacgggcggcgttatgatatatcgggtatagaattacagacaacggacggtgctgttaatgattacggcgtaggcggttcgtatatcttttcgggttatgcgaaaggttatggcattgatgaaaacgccgaaagcgatttaacaagcaaagtcaataatttggaaacgattgaagttaaaacgaaaagtacgttttatcgcacgggcgaatacaaaaaaaattatcagcatgatttgacaagtgtatattttgctgttccgaataaattttttgacgattacggcagtttgcaaaagattaaagcggattggcacgaatatgttacaacgccgattgctataacttctaaaatcgaagtatatgataatcttttaccgtggattggtaaaaatatcggaaaagtaagttttgaagagccgatttcgctttatacggggtatcagaaattaagcggaagcggtgggcattttgtcaaatatgattgggtttataacgctcacccaggcgatacttcacacgccgaagcgaataaatattgtgaacggttaaattggcttttttcgacgaacggtgtgcctatcaatgaatatgtattaagttcggcacggttgcaagaatatgtttctacttatgataaaagccatgataaaggcaatttaccgattgaaggtaaacagataaacggtgatttgtttgaagatactttatccgctggacgggaaaatatcccttatatcggcggagatattcatcataagcaagtcaatttcgacgcgaacgaagaatttgatatgttgaattatgaagaaagcaattcaggttggcaaaagttttttaatgcaattttcgggtttgctccgtcggacatagacgatagttacacgggtatttcccctataaggattgtaaccgatgacgatatggcgcaacccgatatagcaaaacggttgttgattgacgggcgcgatgagcctttgaatcaattctgtgatttctataatgaaagcgtaaaggataacgacaaggacggaaaacccgataacaaagttgttttgttgcggtttgcacaaacggatttcatgcgtttgcctgttatggcttacaataatttgacgggtacgaattatgacaaagaatacggaaaaagcacgtatgttgtgcaagaaagcgttttttacaattttgatattttggaattaacttttaacgaaaaaggcgtatatactgtaattcccgttgtaaatgatccgattgatatttttaacgatattcagttgccgtcaaaagagtctgacattttgaaatatgtttttatggctttggggttactgattttgctcgtaatactcatgccgattctcccctacatagtaaaattcgtggtttggctgattctcttgccttttaaactgataggcgcgattttcaaaggtatcggcaaactgttccataaaaaggaatgatataaaaaatgccgaccggggcgggaaagcccctttcggcattacggttaaaggttataaatcggagataaacttgtcgcggttgttatgtttaactttttctttttcaatttctttgttgagtttttcgcgataagttttagacccgtttatataataaccttttcggttggctttgcgcatatcttttcctgttttttggtacgcaatatctttggctttttgcgtcctgtgagataacagtttatcatttgcgcttcttaaaatgtactttaagccagcggtgaaaggatccattgcggcatacctccttgtattatttcaaaattcggcaaattttgatatgtttattatatcggatgcatgggggtatgtcacgattattttattacaatttttaaaattttcgttagtttttcacaaaaaggaatgatataaaaagccgatcggggcgagatatttccttgtcacattaaaaaaggagtttaatatgaaaaagaaaaagtttcattgtaaatcacaatctcaaaaaaagcaattcgccgcagttatgcaataaggtctgcctcttcgaaagcaaaaatagcaaaacccagaagagaatcaaacgaaagatatcagcgtgttatgcgcgaagattttccgaatgattttattgatgatgattttttggacgcaatagaagattttgcacggtgttagtcgaggtgtgtaaatggtttcaaattttgacccgtataatttacaacgaatgttttgcatggattatgattgtgagttaacaaattacggaaaaacatttgccgtgtttgtaaatcgaaacgaatgtaagattgctgagatcttgcgtcgatctgcaaattattattccgtgttcgttgtttctccttttggtgtttttagtactacacggaaaacttttcaagagtgtattcatttagtaacagatcgttttaataaaaaataaaatcgtgtgattgtcgataatcacaatcgattgtgtttatcgacaatcgctcatttcacacacgtttgtgaggtgcaggagtttaaatggattttttaataattgtattgatagtagtttttggtttagattttatgtcgaatgccctttcaatgatatataagagcaagcgtgaaaatgaatttgataaatgtttatggtggatagaacaacggctcgatgatgaattaagtaacgatattttcccctattataaggacggtaatgaagatgaggaaaaatgaaattcggattataaagaatgaatataatgaaattttaaaagccttgcatgtagccgaaactgattactctgcaaataaacgttctgttcgtaagcgggcagaatgtgaatttatagcggcgcaagaacaggttgtttataatctttgtttaaagttagggatagttttagaagatgaaaacacttaaactgatactaaaaatcatgctcggcgtagtgatcgcggcggtaatcggttattttgtttttacggggtgtcaagtatgaaaataaaagaacgtataaaacaaatcgattaccgccattacatagcggtagcaatcacgctcggctttatagcgtgctttctgttgttccctctcgcgctcggtaggcttatcgagggcgggcgggatttcggcttatccgtcgcttactatgtttgcgaaattttcgatattccctgcactataacgcccacggtcaacgatatgccgcaaattccctttttcccgttcccgaacacccccgtttcgccctctgtacccctccccgataatttcgatggtttcaaggcgaattgggcggcatattggcaattatgggcgagcggcgataacttcctgcattatctctattggctcggcaacaccgtgtatatcgcctgtcaaatgctcctgctcgtgattccgttcattctcgttgtttatcttttgttcaaacggtatttaaaaacggaaaacaacgactacgacgaggacagccgcccgctgcgcatattcaagcgaatctcgaacgtgacctatcgccccgtaaaatcgtggctgacgggctttttgctctttatccgcgataacagtatctattggaaaatatggcttgccctgtgggcgttttacttcaacctctttacaatcgtgttggagtttttcgcttattatctgtatttcgtcgtatcgttcgatttcatcaatctataccgtcaagtatataaattgtttatcgacctttcggcggtatttacctttattcccctttgggcgtgggtaatcatcgcgcttgctcttttggacaggttccgcaaaaaaatcgcctataaccgtttaaaccatttcgagcaacgcaaccgcggtttcatcaacgcccgccctatcgtttacatggtgtgcggcacaatgggaaaaaagaaaacgaccgcaatcaccgacatggcgctctcgcaagaatccatgttccgcgataaggctttcgaaaagatactcgaaaacgatttgaaattccccgcgtttccgtggtgcaatctcgaaaacgaaatcaagcgggcaatggactgtcatcagatctataatctcgcaacttgccgaaagcatataaaacaccttgcaggttgtttctatgcggcaaacgcccgccctcaatacgcaaaagcgattcgcaggcatttgcggcggcgatatggtctgcattacggtaatcttctgttcaactatgattacgaacgtaacggcttttattacgatgataaactgaaaatcacgaacgtgtgggaagtcgcggaaacttacgcgcaattatatttcatttatataattcaatcgtcgcttttaatcagcaattattccatacgcacggacgcgctcatatcagatctcggtaattttcctatgtggaacgctgatttcttcaagcgcgacagccgccttatcgacagttattcccgccatgcgcatatccttgatttcgacagtttacggctcgggcgcaaagtgcttgaagaaaatccgaataaagacagtttcgagttcggcgtgatacccattaccgaaatcgggaaagaacgcggcaacaaccttgaaaaccaagacaaaaagaaaaaggacgaaacgaccaaccaaaaaaacgatcttttcaatttatggttaaaaatggttcgccattctgcgaccgtggataatttcccgttcgtgaaagtcattgccgatgagcaacgccccgagagttggggcgcagacgcacgcgacttatgcgaaatcgtccatatcaaggacagcggcgaaacgcgccttgcaatgccctttttcagcctcggggaattgctctacggctggctgttcggcaaattcgtaaacttatattataaataccgctatgtacgttccgacaatacattgcctatgtacctcttgaaaaccatagccgctaaagtcaatcattattatacgggtatttataaccgtttcggctactgtgcgttgcgcgtacagttggaaagcggaacgcaagacggcgagatctccgaaaacaaatactacctttgcaataagaaagtttacagcaaacgtttttccaccgattgtttctccgactttttcacgcaaaaggctttgcgttcccctgtaggtatcaacgacctgcaagagtacaaaacggagaaagccacttttagagaaatggataaacagcaaagttatttcttcatcgatcttaaaggcaaaaataacgaataaaaataggacggatagaccgtcctatttttttacaaaaaacttgacaaaattttcaatatatcgtatagtattattgctacacaaaagaatatctttaatcgggatacgtttgtcaaaacagtatcttccttttacatatcgattaaaggtattttgtgtagcaacaaacaaagggagtacgttttggaagaggtacgctctttgcgtatctcttttttttatgaggtggtttgatatgaaaaatgagtttgtttgttcgaattgcggttgtgaggatataaagttagtttcggaaatctctaagatcgaaaagaaaactgggattttttttctgatcatgattggtctggtcattttaattttggtaataggtttatttttaacgattacagcaataatgaattttcctcaaggtattacagaggttgttgaaagaatggaatacttggatgatttgaaatatctttttgtaatagattctttggcattttttttatcatttatattattactgttttatctgctgtttaataataaaaccaaatcaagtataaaagcagtttgtcctcattgtggaaaggtttggtatgttttagatagtaataatagtgtttccgataacaaatccgataaagaaaatgaaagcctcgaaattattgaattaaaaagaagattagaacagttggaaaaaaacactaaattttaaggctacgggctggcattgggtaaaaattttagaggacgggaagatctcccgccctcttttatttatcaaaagcaaattcgcttgttgccttgttttcgtcctcgtcgaaaacggttgttccgctttcggcaaagtcgtaaaagttgataaggctttgcgcgtcctctttcccccattggctatatgtcccgcgcggcgaaaacaaaaccaaattttttcgttcatctcgtcggcggggtagccgtacctcgtgaaaagttcgtcaagcattgccatgtgtttttctcctttgggcggctatactgccgccccactttaattgaatgtaatttgatttgatacgtcctcgcccgtagcgcgaattacaatttttgtattgttctttgaaaacttgtaaaagtctatgagtttttgcgcttcctcaatatttccgacgttgtattgttcaagtttttggctatgagggttcacccagaatacataaatccattcatcgccatagttaggattgttccctgctaaaaattgcataaactttgtatttatgagttcacggtgcttttggcaagccttttcaatttcttttgaatattgcgtccaattgataacggtattttttattttcatttttatctcctttgggcggctatactgccgcccgtatttttttatatgcgggattcagtttctttttctcgtcgtcctttatcacggtagagccgtgcaagcggcggatttcttcaagcgtcagtttgtggcggttttccgtcggttcttccgcccatgcccacgcctgttttttactgcaccaaaaaaagccaagttctttaagccgctggcggtacgggtacgcattaaatacccatatccaaagcccgcaaatttcaattttacagtgaaagccgataattgcattgatgatttctttgaacctgtcgggaacgtcggcgcggctttcctcttttttggtgtaggtcttgccgtcggcggtcttgtgtacgttgcggacggttttcaaaagttcgtcatattcggcattgatacgttgcattgccgaaacgctcccgccttcgcggtcggggtggtatttgaaagcaagcgttttatactgttttttcaattcctctacgctgtccacgttctgaaagtatatgtatttcattgtttcgcctccgttttatagatttcccgcaaattcttgcaataccgccctacgccgcagtaatagaattttttgccgccgtcaacgcttgtaaaaattcgcacgttgtacttgtagccatgcgcccgcgcggggtggttctcctctaattcgtccacgatgatttttttgatactttccatttgatacccctttcccgcggtcatgccgccgcgggtcggctttgattttaatttagttttttgtatttgttcggttcttgtttaattatctctatatcttttatttcgcaatctgctatgcctttattgatgagccattcatatacggctttatgactatttgcgcgaaaatagtaattcttttgataaatttttacactgtaatagtttcctatcggaagaaaatctgtactgcaatatccgtacacctttccgatgtatttattgcaagttcctttcttttggcatttttcacatattccttgcattgcttttttttcctttccgcaggtcttgccgcctgcggtcggctgattttttttaaattaaagttttgtccatcattgcgcctaaaagtttttgataaatttcatctttcgaaatgttgttggagcaaacccaaataataattgaaagttcattgattgaagcctcttctttgttgcggtcaaagagtttttcatattgtttaattgttccgcaagtgaaccaatcatttttaatacaaagttcgcgcagttcgtaagattctaaatgcttcatcgttattcctccatgtagcaatattcaatatcccagccgtaggcgtcgagcctaacgccgaggtcatgcccgtcaatgcaatcgccccgcatggactgacttcccgacggcatatcgaagaacgctttgccgcaagtattcgtaatgcggtaactcctttccgtttccgtgtacggttttgtaaagttgctttgcttatagacgataaccgccgaaatcgtcggaacgttggacggcatgccataaataacgctgttgtctttattgtactttctgaataccttgcgggcttcttcaaatgtgatttttttcattgctttttctcctttcccgcggtcaagccgccgcgggtcggtttttctttaatcaagatagcaaatcaatgttctaagtgcctcgtctattgtttggtcgatttcctcttgcgttgtttccgcttcttgtaataattcattatgcaaactgtataaaaggtttactaatttttctttgctttcaagtgtcattttttctcctttccgcaggtcttgccgcctgcggtcggctgttatttaatgtttgaaataaattgcagggtgtccgtttatatccgtaaacgtgtaccaccttgttatgccgtctttacaaaatcccatatcttcaacagatacaatggcacaaatgccgtcgttgtcgtattcgtgcgggaagtattcaaactctttgcgaatttcttcaagggtcataacgcgtcttttcattgttttttacctctcaaaaaatatttttcggctttttgccgtttaggtcttgatttttcgtttttgttgtggtacaatcttcacataagattagcaaagggggcaaggcaggttgttagccccctctgcgccagccgttcggggtagtcctcgtcaaagtatcgccccgttcggctttgttctgtttccgatgtcctcggtttacttggttatgtaatcaagcaaatcgaggattttttctgccgtccagccctccgcgagcaaatactcgcgcaaccgctggatcgccttatccgataacccgataaaaatttccatttcctttacctaccttattttatttctatcccccccctcgcgggggtatcgactttcgccctgaacgaccaaccaaaaatttcttttccatttttggaagcctcgcgggtttaaggggtaagaccccttatctttgtaaaacctcgcgtgaccgtatatttttaactggttggtattcctcctttccacttccgtttagcctcgctatccccttggacatcaagacgggttgaatgtcaaggggaaaatccgcttgcgagattttagggaaaattcgggaaggataagccaccgcattatgttcacgaatttttccgacccttgacaggcaagacggcttgattaaaataaaggcgaggcaaacggagaagggaaaggcgggaataacgaccgtactaaaaatgacgggcacgggataacggttttacaaataaataattttgtccgcgcttttgctcaggttcaaaacaggcttgaaaataaaaagaaagggggcgcggctctgcaagcgatttagcgagagcccgccccctttttatttcaaaagggttgagaaacattttatcgggagccgaattactgatgagaaagacaaaggaaaattttaaacacctcacttttacggcaagactgcaaatagaggcaggacttaaaatgaaaatgcccgtcaagcaaatcgccgcacaaatcggcgttcatatcagtactgtttatagagaattaaaacggggtacttatcaaaaaaaagttgggtactacgacgaatatagatacgaaactttataccgctttaaagaaacctattcccccgacaaagccgaacagcgttaccgcaataatctttccgcaaaaggtgctgcgcttaaaatcggaaacgattataaacttgccgattatatcgaaaagaaaatcgttgacgaaaagtacagccccgacgccgtactcggtgaaatcaaacggaaacagattccttttcgtacttccatttgtacctctaccctgtatagttatatagacaaaggcgtttttgcaagattaacgttaaaacatttacatgaaaaaggaaaacgcaaaaagaaaagattacgggaattgaccgtaatccgcgccccgcgcggcattagcattgaaaaccgcccgaaaacgattcttacccgttccgagttcgggcattgggaaatggactgcgtttgcggctctacaaaccacgttcttctcgtccttaccgaacgtatgacgcggcgggagatcatcatgccgatgcgaaatcaaaaagcggaaagcgtgatcaactgtttggatatcctcgagcataaatacggaaaacttttcaaaaaggtattcaaatcgattaccgttgataacggttcggagttctccgcgtatgacgcaatgcaaaagtcaatatataaacgagataaaagcaaccgtacgacaatttactattgccacccttattgttcgtccgaacgcggttcgaatgaaagaatgaacagagaaatacggcgaaaaatccccaaaggctcggacatatccaaattttcgaaaagcgatatacagcaagtagaatattggttaaaccattatccccgccgtatcttaaattacgccaccgcgcaagaattatttgatgaacagttatccgcgatctctatataaacctgaaagcataaaacaataggcaagccatataaggcttgccttgtaatcgtttatagtttaaagggaataagcaaagccttattccctttctgttttattctatcatattgtgccgcgagaaaaatttttttagccttttttcgcattaacccttgacatcttcagcattatatatgcgtttcatcgcaagcgcgtcttccgcctgcgtgcccgccgattccgacacgatatagggttcgagtttcaactctttcagcgcgacggcgagcggctcgaattcgggtccgtacgtttcgtcctcgaaggtcagatggcgcacttctccctttgccgaatactgaattttggaaaaatgcacgtgaaaatgttttacgcgctcgtatccgagttcgccgaccatatattccagccgcgacttataatcggagaccgtcttcaaactgccgccctcgcgcgcgttgatatgcccgaaatcaatggcggggagaaaaatttcgtcgatcttgcaaaaggcgacgatctcctcgagcgtgccgatctgcccgagttttcccatcgtttcgggacagaataaaagatcctgcatatcgttgagatagatataatcgcgcaaaattttcagccgttcggcggtaagggcgacggcttcctcacgcaacattttgccctgcgtcgccgcgtgaaagacacatcgtctgccgcccatcagtttcaaaaaccgaccgctgtcaagcacgtaatgataggacttctgcgcgctctcgtccaggggattcgcaaaattgatatagtaaggcgcgtgcacgctgatctcaatcccctcggcggcaaatgcctcaccgatggaaatcgccttaccctcgcccatgtgcacgcccctgccgaaagaatattcatagcagtcgagtccccgctcgcgcacgtatttcgccgcgtcctcggtatgggaaagtcccgcagcaaagaaagattcgctgttgccgctcggtccgaatttaatcatctgatcttctccaaatctattttcaactgcgctttgagcgcatccgcgctttcgaatttccgtatgtcccgcagccgaccgtcgaaatatacgacgatctcttcgccgtacagatcgcctttgtagccgtccaagtatacttccagaaccacccgctcgtcgccgaaggtcggacgcgcgccgtagttcgcgataccgcggaactctctgcccccgatcggcacgctcaccgcgtacacgccttgccggagcggaaatttttcgtttgaaaggtgcaggtttgcggtgggaaagccaagtttcgagcctacgcgccgtccctccgtggaaactctgcccgcaacgaaatagcggccgcccaatagttgattcagtttttcgacgtcgcccgccgcaagatattctttggcgagcgacgccgccgccttgtgttcgtaaatgccgaccaagggcaggaccgtcaaagacgcgccgtgttcgaacgccgctcttttcacgtcctccgccgtccccgccgcgtcgcgcccgaaagtgaaatcctcgccgcaaacgagcgcgcgcacgttgcattttgcaaagaccgcgcgcagaaattcttccttttgcgtgcgcttgaacgtgtcgtcgaatcgcgccgcaagcgcgaaatccgcgccgaggctttcaaaaaggcggacgcgctcatcgaacacgtagatctgcccgccctttttgccgccgtaaaaggtcatcacgccgactttcagattttctttcgccgcgcggttcatcgcggcgtgcagcagggcgcggtgaccgatgtgcattccgtcgaaataaccgagcatgagcacgcacggctcttccatccgctccgcggaatcgtagtcgataattttcagcataatttcgtccttgcgcggatgacgcccccgcccgcctccgcaacgccgtaaaacgcgccgtccagccacagagtatagaatccttcgcccgcaaacggctgcgtgagcccgtctttgagacgctttgccgtaagatcggaaaagtccgcgcggggataagaaagcacgttccgcacagggatcaaaaactcctgccagttgtccttttgcagaacgtcgggcgaaacggcgtctttcagatcgaacataccgctcttttcgcgcacgagagaagtcatgatcgccttagtgcccagagccgccgccagatcgcgcgcgatcgcgcggatatacgtgccgccgccgcaacgtatgcgaaaggaatattcgccctcgcccgtcttttcaagaaggtcgagcgaatatatcgcgactttctttttttccagcgtgaagggaatgccttttcgcgccagatcgtacgcgcgcgcgccatgcacgcattttgcggaatacagcggcggttcctgcatgatctccccgacctgcgaggaaagcgcagccctgatctcctcttcgcaaggaacgcggcccgcatcgtactttacgtcgcccgtgctgtcgagcgtgtcgctgtccgcgccgaacagaaaggcggcgcggtactgtttttccttatcgagaagatagtcgaaaaggcgcgtagcgttgcccacgccgacgggaaggacgccgcccgccatgggatcgagcgtacccatatgcccgcaggacagccccgtaacgcgcttaacgcgtcccacgaccgccgcgctggacgcgcccgcgggtttatcaatattgagaattccgctcggcgtcattcctttttcctccgtttttcgcaaggcggggcggcgcaaaaaaatttgcgcgccgccccgaccttttagtcttcgatatgctggcggatggtgtatacgagtttatccaccacctcttccagttcgccgccgatcatacagccgctggcaagcacgtgcccgccgccgccgtaaacggacgcgatcttgtttacgttcgatcttcccttggaacgtaaagatatcttaaaggaatgcggcttggtctccaacaggcacgcagccacttccactccgtccacggagaggggaaaatcgatgaaaccttcggtcatgtccgcggaggcgccgcattcttcgagcgtctttttcccgacggaaataagcgcgatcttgtcgccgtaaaagtaacgtatcttcgacatcgtcctgccgaataacagcgcgcgttcgcgcggctgacgcttgaacatattgtactgtatctcgtggatatccgcaccgcaccgcagcagtttcgccgcagtcagaaacgtgttttccgtcacgttcttatgcgcgaaattgcccgaatcggaactgacgccgagcagcaggcagttcgccgtgtgcacgtcgatgggtacttccagttcatccgcgagcgcggtgacgatctcgcaggtcgcggcgcgctcctccacatagcagtaatccccgaaacgggtattggaaacgtggtggtcgatgttgaatttgatttttttcgatttggtaaacgtttcgcacagcgcaccgaggcgcgcctcgtcgctcgaatccaccgcgatgaacgcctgcgcgtccttggtgggtgcggacgcgacttcgcgcattccctccaaaaagaaaaattttgcgggaacagggctttcgcacaccacttcggacggaatcccgcacgcgcgcagaaggccttgcagccccaatgccgcgccgagcgtgtcgccgtcgggacgcatatgacagaaaatcgccgcgctttcaatggttttcagtttatctgcaatttcacgtaacgtcatcgttcttcggctccgtatcgtggatccccttgatgatgcggtcgatcttgtcgccgtattccatgctgtcgtccacgaaaaagtgcagttcggggaccgtgcgcatggtcatcacctgcgccagttcgtggcggataaagcccgcgtgtttctggatctcggcaaaagtcgccgcttcttcctcgcggttcttcccgtacacgctgatataaatttttgcgctcttcaaatcgggcgaaacgtccgccttggtcacgctgacgagccccttgatctcgctcgtcttatatttcagttttgtggatatgatctcgtaaacggctttttgatattcgcccgaaagccgctttccgcgcatattttgcataaaaacctccgaaagatgcgcgatgcgtcaaaataacgcatcgctcctctgaattacgccgggatctcctcggtgatataacattcgatcacgtcgccgacgcggatctcgttgaacccttcgatagaaaggccgcattcgaaaccgcccgacacttctttcacgtcgtctttaaagcgtttgagttggttgacgttgccctcgacgatcatgatgtcgtcgcggtaaatacgcagtttgccgctgcgcaccaactttccttccgtcacgtagcagcccgccaccagaccgacgcccgtgatcttaaaggtctcgcgcacttcgcacttgcccgtcatgatctcgcggaacttgggcgaaagcatgcctttgagcgccttttcgatatcgtccagaagttcgtaaataatgcggtacgaacgcacgtccacgccgcttctctcggcaagcgccttcgccttggtgtcggggcgcacgttgaatcccacgatgatggcgttggaagaatcggcgagcatgacgtccgtttcgttgatggcgcccgcgcccgaatggagcacgttgacgcgcacttcttcgcccgaaagtttcaaaagcgattgacggacggcctcgacagagccctgcacgtcgccctttacgatgatattgagcgccttgactttgccttcggcgatcttgccgaacacgtcgtcgagcgtcacgcgcgactgcgatttgatcatcgcgtcgctttcctttctctttctctcgtcgagcacctgtttcaaaagtttatcctgctcgacggcgatgatggtgtcgcccgcgttgggaacgtcttccaatcccagaatggaaaccgccatcgaagggcccgcgctcttgaccgttctgcccttgtcgtctatcatcgccctgacacggcccgtggtcgttccggaaatgatggaatcgcccgttttcagcgtgccgtcctgaatgagcacggaggcgacggggcctctgcccttatccagtttcgcctcgatgatgatgccgcgcgcgttctggtcgggattggctttgagttcgcggatctccgcaacgagattgacggtctccaaaaggctgtcgatgccgtcgcctgtctttgcggatacgggacacagaatggtatcgccgccccactcttcggggacgagcccgttctgcgtgagcccctgtttgacgcgttcgacgttggcgtcctgtttatccattttattgaccgccacgatgatgggtacttccgccgctttcgcgtggttgatcgcctcgatggtctgcggcatgatgccgtcgtccgcggcgacgaccagaatgacgatatccgtcgcctgcgcgccgcgcgcgcgcattgccgtgaacgcctcgtgtccgggggtatcgaggaacgtgatggacttgc

SEQ ID NO: 2993 - DNA, 26657 bp, Unknown
  16S sequences of unknown bacteria
tgtcccggtttctgccgtccatgaccgaatccgatctgcataaacactttggttccgtaagcgtgaatgcgttccgtcagacggcaggctgcttctctccagaccatgggagcatacgacggcggaatcggaccatttaccagatccggcttctgcgcctccatatccacgattatgctgcccatcacgatgagaccaaaaccgcctctcgctctctcaagataatattcaatggtattatctgtatattcccctcttgaaccgttcatactgccggtacctataggcgccagcgcatagcggtttttgatttccacattaccgattttaaccgggctcagggaatgtttatatctgttttccataaagttcctcttcttatatttttttctgctgtgtgctattttttgatgtatttcgccagagctctgccgtaaatcgtgcagatatcctctctcgtaaggggctccggattggattcgattcgccagacctgctgctccataaactgatccgaccactgctggatctccgaatcagtcacttccagattcacgtccctgttcgtaagcgcgcgcacatagtccgcaaattcatccgagttctcaaatccgcagtcttgtatcacatcctgtatcagcgtctgatccttgaaatttttgagccattctccgagaaaaataccgcaggataagccgtgacatatatcgtagtaatgtgataacggatatcccattccgtgggggatgcaggtgcaggactgcataaacgccactccctgaatcatagacgccagcgcgatcttgtcgtaatcctccgccgtcagagtgtcggcgagcagatgatccttgaactccgcaaacagctgaaatgctattctggatattccccggttcatcacgtttgccgcggcatacagatgatccttctggcgtatatagctctctaccccatgagccagcgcgtctatcacgcctgtatccagcagaaaaagcggagattcctcgatatatcgcgggtccacaaaggaaaccaccgggtacagccactgattcatggcgatttttgtatgaatatcgttgcgtgtcagcaccgctccccccgtcacctctgagcctgtccccgcggtagtcggcagagtgatgacaggtatgtcgcacatatttctgtaattgtcatagggcttgccgtttccgaagaaaatatcgagctcagacttttccggcgtcttccgttttccgtcggtcagctgagccagagctttcgctgcgtccagcgccgaaccgcctccgatccctacgatgaaatctgactgaaaatcctttgtatcttcgtacatttccttgatattttctaccggcggatttgtcatcgtgtaatctatgattttatattctatgcccttttcttcgaatatctcactgacgtcgcgaagacctgtgttttcacatccttcagcaaatttactcgtgacgatcaccgctttttttccaaaatcgtcaaacacctcctgatgttcctttaccgcatatctgccgaaataaagacacgtctgtacgtcaaatctgaaaccttccattttttaattcctccttattatttctgtctcactgtctccgataaaataggttccggcagtctaccatgccagcatcaggaagtcgagcagttcctgtttatcggaaagcggcctaaaccaggtactcgcatcgactcttccccatatctcatccgcgcatcttgccaagagttcctccgatacggcaagctcagactgactgaggcgtgaaggtacgccgagttcgtttataaatgcttcgtaccggcggattccttcctctgccgccgccatatcgctcattgcaggatccgcatcccatacatttttcgcccatcttgcaaagcggtgcgccgtccggtcacccaacgcatacttaaaccacgccagcgatatgatcgcgatccccgctccgtggggaaatccgaaataattgctgagcacacgctcaacggcgtgaatatttcctacgaaagttcgtccctgatccgccacatgagcgatggaaagctgagcggcccataaaagttcagcgcgggaatcatagtcgctgggtacctgcatgacctttcttccccgttccacacaagtgcgctgtatcgtctccgatataccatcctgcatgattccggcacttgtgctgaaatacccttcgtacgcgtgagacatgatgtccaggattccgcatgccgtctgaaagggcgggacagtatatgtgtatgtgggatcggtaaataccgcagccggacgcagcgcatccgaacggtagtcgagtttcatgttcttttcgtgattcgcgatgacggcgacatttgatacttcggagccgctggccgcgatggtgggaatcgtaatgagcggaaggacgccttcttccttttttccctgcgtcgaaagggattccagtctggcagccgcctcaaatttttcccagcagcttccttcatacgaactcgtcagacataccgcttttgccgagtcgatcgtgctgccgccgcccagcgcaactaccacatccgcgcctttctctctgagcagagctctcgcccggtcgatcgtcttatggctcggattcggctcgattcccgtaaaatcggtaacctcaatcccgttttcgccgcagaccttatgtatcagctcataagcgccgctcatcttcgccggtatttcatcgtaaatgaaaaatacttttctgccgtagtttaatatctcctctgcaatatccgccgcagcgcctttgccatagtaaaatttcgtattcagatgaaaatagaaatcgttcattttgttctccttttttctcttttgtctcatgctgaatgcagtttcaaaaagacctgcccgtattctgtcgaatgcgtcattcctgatgcttttttctgtcagggttaaatatgacgaaaatgacgatcgccgcggccatacacgcaaacagaatgatcgaacctgccgagagctgagtcctcataccgccgcccacggttcctgaaatcgctgccagcacatacgtcgcaaagaacgctcccgcattggagagaccccacaccacggtagatgatatgggagcaaaattttcaggtacataattgagggctctcgcatgtatcgtgctgtgcgctatgctcgtaccgaatgccacgaagaatgccgccgcatacacaccccagatcgaaggaatcttgagcatacatatcatagcgatcgctcccagaagatatccgcacggaatcatccagctccggagaacttttgaccagaacggatacaggaaggtcatcacgatcaatgtaaaacgcaccagagaagttgcatttcccgcctgggccgcatctccaagtgcattctcactgatccaggtggagacgtttgtgtaatatgcgttcagccctatataaaatacgcagtgcagaatgccgatggccgctacgataccgatgatcttcttcggaatctgcgaaaacttcacatcaggtttctcactttccatattttcagccgcacgccgggcctttgcctcacggtcgtccctgtagccggattttttaatcatcacataaaatacagcggtggtgataaaacagtaaaatcccagcagataagcgtaaggccagttttctccgcctcccgtagctgcgattctgccgcttatgaaaagaatgaaaaatgctccgagattatttgtgacgttgtacgacgcgattcttcccgctctctcgctctcggaaaaattttccccgatgatgagattcatcagcggcgcgaaacttcccatcgcaaatccgccgaagacgacggccacataatagatttcaaaaggcccgtgcaggatgccgtttgcaaagaaaatcagggaaaatatccccatgctgcacatgactaaaaccagcagcttcgtcttgtcaaatttcagcgcgacaggtcccatcgcaaatgtggcgatcagtccgaaaagtgtcggcagtgtagtcagcgatttgaccgcatagtctgccacatcgggataactgaccatgatatttgccacgacattttgcgtgatcatgtacatgagtatggatgtgacgtaaaaattgagcgtatacgatatctgtctctgacgctttgtcatttgagttcccatataaactccttcctctcctcaaaagttaaattcggtttttcaataagaactcagtgtcgcgatcacccgtccgcattgacaaaaccttaagaattatttctgaatctattgtattaagggggtcattctttgtctaattcaaaggattcatgaccggtatcgaaaataattgtcacgcttacaaatagctgcgcactcgctgacggcacaaaaaaagagggcgcaagccctcttgatttgttatacgtttttatcgtcagaatacgagttctccaccctttctctgcgccagctgaagataataatctctcacgtacagagccgcgcccgacattttccatttactggccctggcccacgaaagataaaggggcatgacagcaagcggatgatccacctgcaccttgcgcagaaaccgtccgtcaagggtaacgtcacacgagagcgccagtcccctgccgctcatgacagcaagctgctgggcggtccagtccatttcatactttatatcgagagaaacgccctcctcctttgccatttctttgatacgcatatccatattgctgtttgcgtcgatctggataagacgcacatctctcagttctcgcaacgatacgctgtcccgctccgcatacggatgatccgcaggaacgatcagaaagatatggtgttccgcgactttgacactctcacagccgtttccgagattccctgcggaaagaacgagatcacatttgccgtcgagcagcagctgcctgaaatcagtccagttgtgaaataccatcgtctgaaattctatttcatttcccggattatcctctctgaaatatgacataagcgccggaacggcagaaaatacaatactgtgaaaaaatgccagtcttacgctgccgtgcagcggacttttcatacttgaaacgcggttcttaccttcctcgatcagccggattccctctgcaatatacggatacagcgtctctccgtacatcgtcagctcgattcttttattcggacgacgcacgaacagcagcgcgtccaattcatcctcaagagcgtgaatcgcataactgatattcgactgtgatatatagagattgctggccgcctcggtaaaatttttcgttttggcgatttctatgaaataagtaagctacgccagtgtcataactattcctcccgtcattacccgatgatccgctccgatccggccgtgcggattttactttttacgcttcggaacgtcgaggcagaaaagccgctcgcctctgagatataaattgataagtccgtcaaacgagagcaggattcccgctctgtataccgccggcagcatgtactcgctcaccgcgttatggatggatactgagaacggctgtccgatgacaagagctgcggtatagacgagcgcggcggcaaagcatatgagaagcagaagcgccattccacaggaaaatatcatttctgtcacctttacaaatttttccttcataaaaaattatcctccctactctatcatgccaaacatcggtacaaatccatataaaatcaaaactgtcagcagaaactggccggcgcaccacactgcagacaatttcaccgtctttttaaaatccgaatctgcgattcccatacacacataaaaacagagcgcaaacggcggcgtcatatgtcctaaggcgcacgtcatcggatttaccatcatagcggcaagcataggatcgattcccgccgcagccgctatcacgatatacgtaggacccagcaggacgaaaagcgaggtcacctccataaacatccccagaatcgcaaagataagcgggcatacgatggcagcaaaccacatagaaatttttttccctgcaagaaagctggaaatactttcagctacgccgatgtcattgaaaagttccgtgatacaaaaaccgcagtacgccatgataattaccggagctacactggatatcccgtcgcccaaccagccagccatcttttttaacgtaagacgattaccgtttatacggcacagcacgacgaccagagcaattcccacgctgggtattatcgtgagcagcacgcttgccgaatctgaggccgcctcccccattctcgcttccacaagactttcgtgaaataccgcatctataaaaaacggaatgataattaccacgggcagaatcaaagttttatacccgttcttaagcgcatccctcagagttattctgtcctcttttggaacaggcttcacatgatatttttttatcaggaaaaagagcgtcaccagacgatgcagaataaaccagaatgaaatgacccatgcaaagagccagaattgtgaaaaagtgtaggtgtccggcgaaaaagcatcgagcgcaccgaagagaacgattatggcccccgaaggaggaatgactggtcctaacgaacttgccgccatttccactgttgcagcgagttccgcagagtatccgctctttttcatcgtcggaatcgtaatcacacccacagcagctgcattgccgggtcctgttcccgacagcgcgcccatcgccgcactcgccgcaagcgctacatagcccgcgcctccggaaaagcgcccgacggccgccatgataatattgatcagatcccgtatgacgccagtcttctcaaatatcaccgaaaagcagatgaatgccgctatcgtatagagcagataggtgttcgcagccgcagatatgtatctgaaaatatgcggcagactgccggttacaatcgtgagtaggagaaaggccgccggtatcacctcatacatgggacgcctgaatacagtaaatccaatcatcacgatcaatatcaaaatcccaaaatagaagaacgccgtcatcctgtgcaccacccatcgatctcaaatagttcatccactcttatatctattgcaaacaaattatatactttgcaataaatcgtgtcaaatatataaattcgattacgggcatcgaaatatgagtaatgcaggcgtacttttgtattcctctctgagaacccatgccaaagacagctgtctcacaggacatacccgttttccggttttcttaacaattcgcctatattaacagatactcctggcgctctcccggtttaatttgctgccgcaattctgattttcgtctcctcgatagaaaaaagcgccctcagcgcagtctcgaatttttcatcttttcgagtatctgctctgagaagcgcatggcagtccccttcccggactctttttcatttatcgcaattcaatgctggaaagcatctcgttcagatccgcttcataaacattctttccattttccgtataatactgcatctcgatgagcagaccgcccccgtcattcagacggcagagatatgttctgctgtagatatcaccttcactccaggtgtctttcagctcgttcatctccccggagacttcatctttgccgagggtcacagaggaagcatcttcccccatcagagatgcgcgaatgtcatcgaaatactccgcgccgacagcggacacacacagatagaccgaaggtttatctccttcatattttttcagagagtaatcgtcgtatccttccaccctccggtattcataccggtcggcgtcatatctcatagcgtaaccgtaatcgctaactttcaccgtaatcccctgtgcggattccgcatcgacgttttccccttcatcgtccggagccggatcctctgcgccgtcagggcgatccgatcctccttctgcggacagctgcgattcctccgctgaagacagttgtgccggactgtctgtacccgggggattctgggcaccgtcctctccgcatcccgtaataaggactgtcatgaccaggagcgccgccgcggcactgatgatttttttcataaaaactcctttccgggacgcgatcgtacccggttcttccgatcctcagccctttctatttcagattttcaggattgaggcctttcagttccggcaggacgaaaataccgtctttgcggatgagcacatcgtcgaaccagatctctccgccgccgtaatcctcccgctgaatgagcacaagatcccaatgcaccgcggacttatttccgttcggcgcatcttcataagaagcgcccggcgtaaaatgaatacttccgcagattttttcatcgaaaagcgtatctttcatcggatggagcacataaggattgacaccgatagcaaattcaccgaaatatctggctccttcatcggtgtccagcagtgcattgatcctgacatcgtcgttggagtgtgcctctacgatcttcccgtcctcgatgcggaagacgatattgtcataggtgaagccctgctccagggaaacggtgttataggaaattacgccgttgaccgaattttttaccggtgcggtgtagacctctccgtcggggatattgcactctcccgcgcatttgatcgcaggaattcccttgatagagaatgtcagatcggttcccggagatacgatgcgcactttatccgtacggttcatcagatccaccagaggatccatcgcttccgacatcttcgcataatccagcgtacacacgtcatagtaaaagttttcgaacgcttccagactcatatttgacagctgcgccatggaattgttcgggtaacgcatgatcacccacttcgtatgatcgacccgttcgtcgataaccgggcgcagcatcttgctgtaaagattcagcttgtccgacggcacgtcggagagctccgacgtattgtccgaggctcttaccgcgatataagcgtccattcctttcatctgatacatttcgtactctcgctggaacttcagctgttcttcgctgcagttcatgatgatttcccggttcagcgaggcgtcgctcagccccagataaggatatcccccggccttgtacaccgcacggatcagttctctgatcaggggcttcgccgaagttccgatctcttcgatgagaactcgttcgcctttctgtaccctgcaggaataattgacaatcatgtccgcaaactttttatttctgttatccatttttccacctctgtagggagaatcgggaagaaaacaggactctgcgaaattcccctctctgctccgcgaattctccattttttctcttaccccgaatacggctcctggtcccttttcaggtgtcttatccagacccgcgaaagcaggaaagacggcatcttaaagatattttaccatgttgagcgccgtctcgatcatatccgagaatcccttttcacgttcttccaccgtcaggcggcctccggtgacaaaattatcactgacagtcaccatcgccaatgcatttgcccccaggcgcgccgcgttcatatacaaagccgctgcttccatctccaccgcgagaactcccattttcgaccatctcttccaggtatccggatcatcgtcgaaaaagacgtctaccgacaccacattgccgatcttgaccggatgagacaattcctccgccgaatgatacgccgcatgaagaagatgaaaatccgcgcatggagaaaagcttcccggaagatcgtaagtgtactgaaacctggagtctgtagacgccgatgaggcgattacgatatctccgaggtttacgtgctcctgataagaaccggcggaaccgatacggatgatatttctgcagccgtagacttcgatcaattcatgagaatagattcccatggaaggcattcccataccgcttccctgcaccgatactctcgtacctttataagttcccgtataccccagcatatttcgcacctgggtataacatctggcgtcttcgagaaaattctctgcgataaacttcgctctcagaggatcgccgggcataaatacgatgtccgcgatctcccccttttccgcgccgatgtgtaatgattctgccattagtatgtctccttttctctttcagatactccgcagaagcggtttcctcaaaaaatctccttcgcttccggtcagtccagtgtctttccaaaaaattccgccgtttttctgattttcttcatcagggcgtcaaagccttccggagtcatcgactgaggaccgtcgcagagcgctgcttccggatcgttatgaacctcgatcatgaggccgtccgcaccggcggcgatcgcagccagagccagcggttccaccatccagcggatacccgcggcgtggctcggatcgatgacgatcggcagatgagtcattttccggagcatcgggattgcggagatatccagcgtatttctcatagaagtttcaaaagtacggattcctctctcacagagaatcacattttcgtttccgcccgccatgatatattccgcgctcatgacaagctcttccagcgtattggccagccccctcttcagaagcaccgtctttttacattttcccagcgctttcaggagctgaaagttctgcatatttctggctcctacctgcaccacgtcgatctcgtcgaagagctccagatgctccggcgtcatgatttccgtcaccacaggaagacccgtggcttttttagcctccagcagaagcttcagaccgttattctgcaggccctgaaaagcgtaaggcgatgttctcggtttaaaagccccgccccgcagaagacctgcgccgctgtttttcacatcctgagacacttctacgatctgctcctttgactcgatggagcagggacccgcgatcacctgaaaatggccgccgccgatctttttccctctgatatcgattaccgtatcctccggatgcatcttgcggttcgccatcttatacggctcctgaacgcgcatgacatcctcgactacctcattggccctcagataatcatcctcgagaatcgacgtatcgccgacaagcccccagagttccgttcccacgcccttagattcgtggatatcaaacccgagagcctttaatcttcctttcagtacggcctttttttccgcatctgcttcctgtctgagtttaatgaccatatttttcctccgtatccttttgaaaaagagccgtctccggccgcaccgcagttctgcctgcaggcagaaccggatatcacggcagtcagagacagctcttcgcactcatctttttattgattcttcctttattacagggtcacgttcttttcaccttcgtcgacctccgcttcctgaagcttcgccaccagctgaccggaaaccacctgatctccctgcttcacgtagatcttgtcgatcgtgccgtctaccgcggagataatatttgtctccatcttcatcgcctcgatgatcgcgatcggctgtcctgcagcgacctcttccccttccttgataagaaccttgacgatgttgcccggaatatttgctccgatttccagatcgctgtccggatccgccatgaggatcgactgcttggaagccttggtcacagccgccttatccttaatcagaatctggcgcatgagaccgttcacctggaacgtaagctctctgtttccatcttcgtcggcgtctttgatttccaccagtttaatcacgagaatcttgccctcggaaatcttaacctcaccgatggacccttccataatgccgtggaagaagatgtcgctgtccacatagcggaagaaacggccttcttttttcatcgccgtaagataatcttcgaataccttcggatacagcgcatagctgatggcatcctgatcggtaggctcgatgtcaaatttgctcttcagctccgccttgatagcgtcaaaatcttcgtccggaagaagttcgccaggtctgcatgtgatcggcttcttacccttaagaaccagatctctcagcttttcagggaaaccgccttccggctgccccatcataccttcaaaataggatacgatagagtccgggaagtccataccggccgctttttcatagatattctccggcgtcagatcgttctgaaccatgaaaatcgccatatctcccaccgctttggaagaaggagttaccttgatgatatcgcccagcatttcgtttactttgatgtacatttccttcacatcctggaacttgtgctccagaccgaagctggcaacctgcggtctcaggttggaatactgaccgcccgggatttcatacttgtaaatttccgccgtacccgacttgagctccgattcgtagtcctcgtaaaccggacgaaccgcgccccagtacgtggaaatctgctgcagaccgtcgatatccatgccggtagcccgctcggagaattccagcgctgctacagtagaattgagcgccggctggctcgtcagaccggccatgctgtcaaacgccgcatcgacgatatccacgccagccatagcggccatcatcagcgtagccccgccgttgccgctggtatcgtgggtatgtaaatgaatcggtacggaaatctcatttttcagcgcggaaaccagcttatgcgctgcgatcggtttcagaaggctggacatatctttgatcgcgatcatatgtgcgccgcgcttttccagttccttcgctttatttacataatactcaagcgtatatttatctcttctctcatcgagaatatcgccggtatagcacatcgtagcttctacgatctttccctgattgccgacttcgtccatcgctaccgccatgccgtcgatccagttgagggaatcgaagacgcggaacagatcgatgccggatgccgccgcttctttgatgaatttgcgcaccacattatccggataactcttataacctaccgcattcgcgccccgcagaagcatctggaaaaggatattcggaatcttctccctcagagtctccagtctttcccacggattttccttgaggaaacgatacgccacgtcaaatgtcgcaccgccccacatttccaaggaaaacagatccttgccgtataccgccagcgccggagcgatgcgctccatatcgacggtacgcattctggtcgccatcagagactgctgtgcgtctctcatcgtggtatccgtgaaaagcagcgccttctgcgccagaacccagtcagccagtcctttcgcgcctttctcatcgaagatctgcttggtacctctcagcgtcgcaggatccacatcgacctcgggaacgttcggtatatccgcaggaggattttcccattttacctcgtttaccactttgtcgcccaggaaacggagaaccttagactccgtatcttcaccggtatatacattgaggagatccggattgttgtcgatgaatcccgtattgcattcccctgcccggaaagtcggatgattcagcacattcagaaggaagtttctgtttgtctttacccctttgatcttcagctcgcccagcgctctgaccgctctggaagccgctacgtcaaagtttcttccgaaggaagtgatcttcaccaggagactgtcataatacggcgtgatgacagctccggtaaatccgttgccgccgtccagacggatgccgtttccggaaccggtggcatagaattcgatcttaccggtgtccggtgcaaaagcgttggtcggatcttccgtggtgattcggcactgaattgcagcgccccgcggtacgacagcatcctgattcggaattcccacctcgtcggaatccagcggatatccctcggcgataagaatctgtgactgtacgatatcgattcccgtcaccatttcggaaacggtatgctccacctggatacgcggattcatttcgataaaataatggctgccgtgcttgtccacgaggaactccacggtacccgcactgcggtaattgacgtgttttgccagtttgatcgcatcatcgcacatcgcctgtctctgttcctcggtaatcgtcagagccggggaaaattccacgaccttctgatgacggcgctgaatcgaacagtctctctcgtagagatgcacgatattgccgtacttatcgcccagcacctgaacttcgatatgtttcggctcttccagatacttctcgataaagatatcgtcgatgccgaaagcttttctcgcttcgctctgcgcgttattgaattcggtaatcagatcttccggatttcttacgatacgcatcccgcgtccgccgccgccggcagacgctttcagcataaccggataaccgcagaattcagcgaatttctttgcgtcttcttcggatttaatcgcctcttccacgcccggaatcgtcgggacgccgacctcatgagctaccagtttcgatttgatcttatcgcccagctgctccatcatctcgtgagtcggtccgataaattcgatacctgcgtcttcgcactgctttgcaaaatcactgttctcggaaaggaatccataacccggatgaattgcgtccgcgcctttcgccttcgcgagatctatgatttcgttgatgctcagataggcatctacaggaccttttcccttgccgatctgataagactcgtcggccttcgtccggaaaagagcgtttttatcttcttcagaataaatcgcgaccgttcggataccgagctcgccacaggctctgaatattctgatcgcaatttcgcctctgttcgccacgaggatctttttaaacttcttcattttatttatcccccacatgttataaataacttaactatctgctataacttgctgtcttacatttctttctctgtcaattctctgagcttgttcagagcgtcgtacagaccgccgacactgtcgataagacctgcttccacggcttcttttccgtagagtatggtccccacatcgttggccatatcgttcttggcgctcatcagctcggcaatcacatcccgctgcgctccggacgtcttgacgataaagtccgtaatccgctcctgcatccggcggaaatactcataagtctgttccgcgccgatcacaagaccggtagtgcgaaccggatgaagtgtcatcgccgcactgggagcgataaaggaataatccgccgaagtggccagcggaataccgatactgtggccgccgcccagcaccagagacacggtgggcttggaaatggacgaaatgagttccgccagagccagccctgcctccacatcaccgcctacggtattcagaacgatcagaagtccccgaattttcggattctcctgcaccgcgatgagctgcggaatcatattctcatacttggtggtcttgacatcggatgccagaacattatgcccttcgatgctgccgataatcgtcagatattgaatatcggaatcgaaatcgaacgcgtttttcagacagccgaaatcgtcgatggaattttttgtattgatctcctggttttctgcttcactgtacataatatatacctcccaaaggatattatgacgcagcaggacaggaaatattctgtctgattcgcccgcatattccacagaaccggcgcttactgcgccggccccggagataaagtgcggccgttctcctttcctaaaaaacgagtttttccgcgatataatcttttacgtcgcccatcgggatgcgaatctgctccatcgaatcccggtctcttaccgtgacgcagccgtcgttttccgtatccggatccaccgtgatacagtaaggcgtaccgatctcatcctgtcttctgtatctcttgccgatgctgcccggaagatcgtaatccacagagaaatacttcgccagctcatctctgaattcttcggctttctccgcctgttttttcgtcagcggaagaactgccgccttatacggagccagagccggatggaaatgcagtaccgttctcgtatcctctttgccgttggcgccttcgatggtctgctcgtcgtaagcttccaccaggaatgccagcgtcactctgtccgcgccgagagacggctcgatgcagaacggaataaatttttcgtttgtcacaggatcctgatatgacatatcctgaccggaaaattcctgatgctgtctcaaatcgtaatccgatctgtgagcgatgccccagagttccccccatccgaacgggaacagatactcgatatctgtcgtcgccttactgtaatgcgagagctcctccggagaatgatctctcagtctcatatgttcgtcgctgatgcccagatctctcaggaactgagggcagaaaccgcgccagtaatcgaaccattccatgtcggtgcctggagcacagaaaaattccagttccatctgttcgaactctctggttctgaatgtaaaattccccggtgtaatctcgtttcggaaagattttcctatctgggcgataccgaaaggaagcttttttctcgcgcttctctgaacgttcttgaaattcacaaaaattccctgcgctgtctcaggtctgagatagatctgagctgtgctgtcttccgtcacgccctgaaacgtcttgaacatcagattaaactgacgaatcggcgtgaaatcgacgctgccgcaggtcggacacttgattcccttttccgccatgaaagtttccatctgttcgtttgtccagccgtcgactacctgatcgatgccgtgtctgtcaaaatattcctcgatcagcttatccgcccggaatctctcgcggcataccttgcagtccacctgcggatcattgaagtttcccacatggccggaagcttcccacgtcttaggattcatcagaatcgcggaatccagacctacattgtatctggactcctgaataaatttctttctccaggccgccttgacattatttttgagttccactccgatcggaccgtaatcccaggtattcgccaggccgccgtaaatttcggaacccgggaatacaaaacctctggattttgccagagctacgattttgtccatagaatattccctgtgctgaatcttagtgctcatttctcttaaatctccctatagtaatattttatatcggaaaaacctttccaatgaagctgcgtcctgccgctgcagccctctcggagcggctcttcatgctttttattcccgcggcggcagaagacgctgcgtgcataagacaaaacaccacacggacggcgccgcccggtttctacgggcattcttgtcctgtatggtattttatcacgtttccagccattttggtatacttgcataattgtatacttttctttttgagatacaaacctgtaaaatacgctgcagttattccattcggccggcgtttgtctccgccggccgcagtctcagatacataaaaaccccgccggcccggtctttgaacatccgccggccccgccggcgatcttccctccgggaaaagcggcaaagccccgcggaaccgcttttttcatgaaacagcagggctgcccggactattcaaaaaaacgaaatctgttttttttcgccttgtaatcttcgatggtttcttcaaacttctcgccggcctcatcgaacttatctctcacggtatccgccgcatcttccatatgattttttacggcatccgctgtttcttccatatgatcttttacggagtccgccttgtctttgaccttgtcgcttgccgctttggcggcatttttcgccttatctgcagcggcttctgcagtatccgccgccgctccggcaattttttccgctttttctttcgccgcgtctttcagttctccgactctttccgcagctttctccgtcttatcttccgctttttcggcaatttcctccgccttttcagcgattttttcggcctgatcctccgctttttccgcgaattctcccgccttttgcgcagtcttttccttcagttcgccaaacctggaatcaaaagattcacagacagatacatcttcctcctgatcgaacacgctgtcgtcgaaatcatcgaaattgaagtaatcgtcgtcctcaaattcatcgaattcttttttcatcttgccgatgaccgacgaagccttttcttttacctgcgaaaacgcatcctcgcccttttctttcagatcatcggcgatcaccgaataattggatttcacatcgtcgaaagtctccgccgccttgtgactgagatttaccacctcgccgttatctttaaccagttcgatggtgcacttcgtgcccagagccgcgatgacagataccagagtgacccacggaacgaatacgattcccaggattcccacattgaccggaagattcaccaccgtgctgtcgtctttttttacgagaatcttagagatattccctttcttcaccagggctttgatcttttccacaatctgagaggcctgatctccggcttttgtcttcggaacgatatcgatttcctcttcgatcatgatgatagcgtccaccacgctgccgcccgctttttcgagagcagctttcgcttctgcgtaacttacgccggtacgatctttcaccagttcaattttttcaagcgtaatctccattttaacaccgcctttttaaattagatagctttcactttttaatttatttatatccagatgataggatatgtaatcccgcaaaatagacttcagacagtcataaattccgtcgttgagtgccagattttcaaatacgctaatctcattatcccgaatggattttaatattctgattatatcaaattccatgttataaagcaatcgcttgtttacactgcctgaatttgcgcagtcttcacagatcagtcccccgtctgccactgaaaaactcccttgaggcggcgtgaccggaactccgcatctgacgcagccgtccagaccgggcataaatccgcaggtgtccagagctttccactgataaatcagaatcagagattccggttttgtcttccgcctttccagaagacgcaggaactctaccagaagttcaaagagcttttcgttcggctgattttccatgatcagacgatcggtaaattctaagatataggatgccagcatatacttgtcgatatcctctccaattttaaaataactgttcagcgtttcagccgcattgacattgcagctctttcctccgaaaaacagttcatatcttccatgggtaaatacccgcagcgccagagaggatttgtttttgccgttaagccgtatgctggtgcctgcgctgatctttccgaacttcctcgtaaacagcacgagcatgcgcctgtcgtccggaagacgcgtctgttttaagattattccgtcggtctcggtgatcatctgcggttcgccttccttccaacattttttcaccgccgcttccgcagcgctctccgctccgtctgttttcgttctgtctcttcgatccgggaacatccgtttttcgccccgaaccgcctcgctccccgcaattcactgtgaatcgctactgattgtcatttttataaccgaaatttccgatggcgatatcattttcccgccagttttctttcacttttacccacaattccaaaaataccttggaaccgatcagcggctcgatatccagccgggctgctttgccgattcccttgagtttttttccctgagcgccgatgataatccccttgtgagacgctttttcgcagtagatcaccgcgctgatattcgtacagttttccgcctcttcatactgctcgatttccaccgcgacgccgtggggaacctcttcattcagatagagaagcgtcttttcccggatgatctccgacacgagaaaccgcatgggattgtcggtaaacatgtctttcggaaaatacatcggtccctcgccgataaacggacgaatcttttccacacagacccctgtattctgtcccttcagtgcgctgactccgacgatctcatcgaacactccggaagcttcgtattcttcgtaaattccccggtattcctccggcccgatcagatcgattttattgatgatgagtattttcggcgtctttttaattttcttcagcagctccaggatatatcggtctccgggaccttttgagagactgtcgtccacaagaaatagaatgacatccacctcgttcagcgtattcaccgccgtattcgtcagataagaacccagtttatttttgggtttgtgaattcccggcgtgtcgataaatacgatctggcactcatcatcggtataaattccccggatcgcatttctcgtggtctgcgctttattagaagtgatagcgactttctcgcctatgatcgaattcagcagcgtcgacttgcctacattgggacgtcctataatccctacaaaacctgatttcattctcgttcctttccaaattcctctcgcgtcttaccgcgtcagtccgatcttttccatgacatactcttctctgatgcgcatctgccgtttttcctcttcttccatatgatcgtagcccaagagatggaggatgctgtgaacaaagagatagagcagttccctttcataagaatgtccgtattcctccgcctgacgccgggccacccggccgcagatcaccacatcgcccagacagatctcttcttcgttgtccagttcgcggagatcgtcatattggggaaaagagagaacgtcagtcaccgcatctttatcccgataagcggcgtttaacctccggatctcctcctcatccgcaaaagaaaaactcacttcgcagaaatcgggatccagtccctcttctccgacacagatctccgccgcctctgtcatctgtcgtacgagcttttctgcaacatcgatttcttcgtcaaaaataatattcaccggtatgattactcctctgtttcctcataatatctgtcgtaagcgtcgataatcctccggaccagagggtgacgaaccacatcgttctgcctgagataggagaaagagatgcccttcacatcctgcagaatccgttccgcttcccgcagaccggaagacttttttttcggcagatcgatctgtgtgatatcgccggtcactacggcttttgatccgaatcccagacgggtgagaaacattttcatctgttcccgcgtggtgttctgcgcttcgtccagtatgataaaggagttgtccagagtccggcctctcatatatgccagaggaacgacttcgatcgcttctttttccttgagtctcagcgcggaatctctgcccagaatatcgaaaagcgcgtcgtaaagcggacggagatacgggtcgaccttctcctgaagatctcccgggagaaagcccagactttcccccgcttccaccgccggccgggcgagaataattttctccacttccttatttttaaaagcgtggaccgccatcgccaccgccagataagtctttcccgttcccgccggtcctatgccgaatacgatgtcattgtgtctgatattatcggcataggcgatctgtcccagcgtctttgcgcggataggcctgcccctgtgggtaaaacagataatatcgctcttcacattactcttacggtaagtctgtccctctttattcaactccagcacgtattccgtcttctgagcgtccagatcttcctggcgatccagaatccagagaaaatcgaggacggcgctcttcgccttttccgtatcgccgccccggataatcagctcgtcgccccgctgaacgatatccgaaccgaaagcctcccgtatcttttccgcgttgtgatcaccgcttccaaagatgaccgcattatcctgcgcatcctcaattttcattcttatctcattcgtgtctgcttcacgttcccgcaaattcagtctccttttcgtgtcctatattctcagaaatctcgagtgatattctacatcttattatattttcttcttctgaaaacttcaaatctttcttgatgatttctattttttccggtattttctcccggatatattttctcaccgctttttctacgagctttgtcatatcttcttcgctgaatttgccttttgcaaattgcgtctccaacgcgtagaccaccacagcggtcacgtcgccctccgctttgacataggtcacaaggtcattacgggattcatcgtacgtggtattattcgcacggaccgccgagctgatcagcacgtccccggcctgtacataatcgccttctttcaccatctgcgttccgtgacgggtgatgacttctttaatataccccgattttgaagcgacaatatcacgaggactgtcggaaatatctttttcttcctgagtcttctctccggaagccgtctcgacaacggccagagcgccttttatatccagtccggtccaggtgagctccggaaatttctgagccatttttatgctctcctcgtctacctgtgatttccggcaaccgggatacaggccgtgatccgcgagaacttctgcgatttcactctcaggaattccaccgtccccctgaatccggagctctgcgataaacgactgctgaagaaacaaaatgacagcaaaacagacagctcccgcgaaaagtccttttcttcccgctatacgccgcaggaaagggaccacgccctccgtcctgagcacctctgtgcggtaacgggctcccaacagttctctcagccgcggcacgtccgatgtcctcagcgtcagacagatcgtcgtctcatccaagactctcacgctgcgtaccggaatacctcccgccgctgcgatattcaaaacaccttccgttccgaagccttccacaaagagctcagaagaatccagaaaaaaaataatcgtagccggccgttcttctcccccgcctcttctctttcggcccattctatttcatcctttccgatccctttgactccccattcttctttctttttttctccgcagaggaacgctttccttctgttttctgcggccgtatgaactcgacgccggtgaaatcaccgcacagttcgatccgctcatcgcagagagtctctacacagatatcgtttccgagaatactgatatagccttcagatgtttccaatgtcacgatatcgcaggacaagacatagatttttttcacactgtccaccactgcatatctgccgctgaccagcacccgcggcatcttcatgccgaaatcattcaggatttcgcttcttatcgaattttcgttcatcctatttatccccatccgtttcctgaagaaatgcgaaaacccggcagtcagagaacgtctctcacattacctgcaccatctccccgctgccgacattctttcttactatttatatgttcccgcggggatttttatttcgtcaaaaaagaattttcaggtctgttttgagacggttcctcctatcgcagaaaactccgttccctcttcggatcccgttccggcgctgagccccttcaaaaacaaaaagagcggaaaacctgatattttccaccctttttcacagaaaaaaccatttaatttatcaaggatacaaattcatcttcgaccggcccgtctcttttcacacattctctgcccgataatctgcgaaaaaacgccgcagcggcgttccgttgaaaggatttccgcggaaatccgcacagccgccggacggatctcttcttcggggcctttcctttaccgtctctgcaacaggaagcgaacagcggagaaacatgcgaacaacaccagatcggtcactacgatcccggcgcccgccggtgttccgtacagaaaggataaaatcaatcccaccgcaaaactgatcacagacaaaatcagggaacacagcgtcacgctgcgaaatgtccggcaaattcgcatcgcagtcagcggaggaaagataatcagcgcagagatcagcagagcacccatcattctcagccccagaacgatagtgagcgccgtagacagagcgaccatcgtattgtaaagatctgcccgaacccctgtggccttcgcaaaggtctcgtcgaaagtcaccgcaaaaatcctgtgataagacagagtaaaaaacagaataaccgcaaccgacaatacggcgctcatcacaacatctgagcagctcagcgccaatatgctgccgaacatataattggaaatatccgtattgatgcctccgtttaccgacaccgccatgattcctatcgcaagagaactggtagaaatcagagcgatcgccgcatctgccttcagttttccgtttccgctgacgcgcagaagaataaacgccgccgcaactacgacgggaactgcgagcttcagcggagcgatccctgcgacggtagctaccgccagcgcaccgaaaccgacatgagacagaccgtctccgatcatcgaatatctgcgcagcaccagcgtaaccccaagaagcgcgcagcacaccgataccaacagtcctacgacgaacgcattaaccataaacggataagaaaataagtccgataataccgtcatctcgccgctccttccgtttgaaacaaatcgtaataagaactattccgatattcgtccatcgtaccgaaaaaataatcgttgtggcgaagatgaagaattttgtctgcatgggacagagcctctctcatatcatgcgataccatcacgatagtcatgccgtcctctctgttcaaacgccctatcagctcatacatatctgccgtcacgataggatccagaccggagaccggttcatcgagaatgagaagactctccgccgcacacagtgctctggccagaaggactctctgctgctgaccgcctgacagctcgccgtaggacctcgctgcaagatcataaatccccagtttttccatattatatctggcttttttcttttctcgcgcggaataaaaaggtctcattcccatgtgattgagacagcccgaaatcaccacttcgcgtacggaggcgggaaaatcgcgctgtctgccgctctgctgcggaaggtagccgatttcattgcggcaaacgccctcaccgtactcgatctgtccgctgtgagcttttacaaatcccagaattcccttcaccagagtgctttttccggatccgttttctcccacgatacagagataatcgcccttttcaatctgaaaagtcagccccgacaccacctctcgtccttcatatgacaacgttacatttttgcagtcgatatataccatcagttcagcgcctccttcagacggactaaattcttttccatcaagctgagatacgtttcgccattgtcaaaatcctccttggacagattatggcaggagtagaatatccggacctcagcgccggttccttcgctgatgacagatgcgatattgccattgctgagatcctgccgaaacaccaccggaatttcattttccgacacataatcgatgagataagctaccgtttccgcccccgcttccgaatctgcggcgcaaccgcggtaagccgccttgtattccagtccgaattcttttacaaagtaaagcagaggaaaacgatctccgaatacgatggtctttctttgtgcattatctacaacattttgaaatgattccttcagagtagaaagtttctgcagataatcttctgcattttttctgtaaatttcagcattcgtctgatccatctcacacagcgtatcccggatggcacagacgatagccgccgcattgtccagagaagtccagacgtgttcgtcatattccgtctcttcctcgtcgtgctcgtccttcccgaagaattccggagtccacattccttcctcggtttcctcctccgccttctcacagcagtccagcatggagatgactctccgccccttcgaatctgcggcattcagaatgcgatcggcccactcctccgattcaccgcccgcatagataaagaggtcgcactcatagacatcgataatatcctggggcgcgggctcatagtgatgtacgtcagcgccgggccgtatcagcattgaaacatccgcataatcgcccgcgatctgccggacaaaatcatactgcggaaaaacagtgcagacaatctgcagtttttccgccgcgctgtccggcgaaactgtgtccccgctttgcatctcttcttcagatccgccggaacctccggttccaaaacatcccgacagcagtgaaaccgcggcagcgatcagcaggaaagttataattatctttttagttttcaccgaataacccaccctccgattgttttccatcctatgttgaaatatgtctgcggcgcagaatgtgcccgccgatttctttgattctatcaccggcagtaacatacgtcaattacatattttccattttttgtatattcattttttgttaaataaatatcacatttgtgtatctgcacaaaaggtacttctgatttatctgctttttttccgggatttttcaggaaataagagtttcatttttctccctaattttacagatatcattgcccccggtcatcccgccgtctgccagctttaaaaaacagcgcgaaaaaacagcggccatagaaatgaccgctgcttcatacaaatatgatccggaatctcttgcagatcgcaatggatcagattcctgtttcttctctttcttattttgcttctttcg

SEQ ID NO: 2994 - DNA, 32759 bp, Unknown
  16S sequences of unknown bacteria
ctattcgtcggcagcgtcagatgtgtataagagacaggatcaccaaagatttatatctgcaaaaagaagttccatattaggatttcttgaaaaattaaatgtaacttttcatggagatatattttctaaaattggaaatattgaattttctactactgaaatcaaaaacatagcaacatctttaaaaatttcttatactccagagatagctgctggtggtgaaaaaaccaaagaaacaaaaacaactgatgaacacgttaaatatatttcattttccgagatgtcagaaataataaagtcttttgttgagtctataaatatagatagattgtactgcttgatcgatgaatggtctgagataccggtactaatacagccattgttagcagagcttttaaaaagagcatttatcactttgaagataactataaaaattgcagcaatacctaatcgtacgagattgatgatagaaaatagaatagggttagaagatggtggcgatatatttggttattcactagacaacagatttatttatgaattacatcctgatgttacaaaaaaattttttaacgagctattatttaatcagcttaacttggtgaaccctaatttatataagtcgtttattgataaaacacaaatgcaaccaatccattcgtttttaaatatgtttttagctaatcaagcattgagagaaattttaattgcttccgccggtatcccaagagatttcttaagtatttttattggggcctataataatttcattaatagaagaacagagcataagcacttggcagttactgatattagaactgctactgttgcatggtatgaagttgataaaaagaaagcggtggaatccaatcataacgcaaaagtaatgttagataaaattataaaggaaattatagtaggtagaaaacgctgtcattttataatccctgagaagtatgagactaacactattcttagtgaactaattgatttacgtataatacatttaagaaaaagaggtatatcccataaagggaataaaggggtatcttataacgtttattatcttgactatgcttgttatacgagttccaatatttttcataatagaatcaatagtaatcttctaaatgaaattgaaactattgatgattttcgagaaattaggcgcgtatctttggaagataaattttttgataatttaaacgcagagataggcaatagctttaaatgccctcattgtggaatgatggttgatacaacgcatccagcatacattaaacaagaaatttgcaataactgttttgaaaaggtaaagatatgatacggtgtttttcgatattggcttttgacccatacgctgacccataatcggaaagcagccggtggacggggtggactacgcatcaaccaaatccgcccaaacccgtgcacaacagcactgggcggacgcgaaaccacgccttttccgctcccacggcatttcgggaccaagaggccgtgtgttcaagtcacatcactccgaccagtctgaatgacaggactttaactatcttatttcctcggatactcccagcttttccgaatatacacgttattctcttttaggatttttcgtactgagtcgacattaatcccgacagctttggctatatcggctggtttatagtattctgagtacatttgcgtaactaattctacaacgcctttacgttccataagttggttagttactttgattcctcgctttttgaggttatcgcttatggtgcggcgatgacagccatattctttggctaactcatatgtagattttccagccttatatttagatattatttctaagacctcattattcgataaatgtttttgttgctgctttatctcagttttgataatataagcattatcaggatactctgacatagagctattcgtaacaggggttattggagtagatttgactttgtcgaggattatattgtaattcttcgagttgatttccgatagtcccaccataagatccttactcgaactattcggattaaaaaaatctgattcgttcgagtaaggatttttattttgccctaaatttgggccacatccaaagaaatcatggatgtggccctttgctttgtcggcgagtccgtctactgcttccggcttgcgttttagtgcggtgttgatttgcgagagatcttctttaatcggatcaaggatttgatcataaggatctttaaaagtgagctttactccaaattcatcctccggcccattactaatatagaatttctcgaatatagcctggttcatcaactttttcactgtatctctggcattgcgacataatatgactccgatatttagagcagacgataagcatacagcgatgtataaaaagaagtagaattagacgtttatcggccttccttcatagaaatctgcgccatatatgggtccatgaggaaaagtccactcgccgttaattaattctgcgacgtatccttcttcgttatccttctctccgacgcccactattcttccatcatcaagcttcacggccgagatttggtattttccttctgcgacgccattaataaattgcatctggctaagcattttctcgcaatttggggctagatacttattttttattcctagttcgggcgcataaaaaatgaaattgcctggagatgttagtttcgtagcggcgctatcgccaagaagctctttggataattcaggatttggatggcgaaaaacgaatctttttgtaaagtatggcagaatgagcggatcgattgtggaatgtgaattgcagataatgctcatgttggcacgacggctatcattacgaacgaagtgtttggtataaaagctccgtataatatttggcgattcggcatagttaacgtcaaaatcgttatcaatcaaaacgaggagaggcgcgtcggttactttcttttcttgaataagaggagaggtgctatttagactgcttctctgctctacaacgatgtcaaaacgtcttttgcgttcctcctcgtatagggcataaaattctttggcagtagtaaggtttttagcaatcggcttaaaaaggtattcagtttccgcgaattctaaaaagtcgttggaagaatcgattattagaaatttcagatcgtcggggcttaaatgatacattagagatagcataaccgtcttaataaaagacagcgcaccggtgttttcgatattgccagatgaaacaaaatagtttgatgttgctccgggtggataggaagccgaataatctttgataaaactttgaaatgttaattcttgcgtatcctgatcttcaccgatagggatggggagatatcgactactggtgcttgtgtcaatctgccttagtgcatcttccaaatttatgctcatgtaataagtttagcatagacgagtactactagaatgattgtaacgtgcaagattattaaactcatgcttttgtaaagaaatataatgtgcgctatgtgcatattttgcggttcgctaattgcactagtctatactgctttatgtatgtaccgtaagaaacgcgttgcggcgtatgttcgcgtatcgacaagtcataagcaacaaatagatagcttagaggctcaaacttcatattataagaatctgatccgcaagaatccaaattggtcttttgttgacatatatatagagtctggacgctctgccacaaatatacagggacggccagtcttaagaaaacttctagccgatgctcatggcgaactagtcgacttgattctcgtaaaatccatacccagactttctaggaataccgtagatttacttattatagtgcgagagctgaaactaattggcatcgaagtatttttcgagaaggaatcgctatcctcattcgatccaaagtgcgagatacttttgtctattctcgcctcgctagctcaagaggaaagccataacctttccgagaatattaagtggggtatccttcgcaagatggagaacggggatttcaccctgccctatgccagattcttaggctacagaaaaaggacaggatggacggcctgaaattatcccaaaggaagctcgagtggtgcaacgaatttattggttatatctaaacggtgtgcccattaaccgcattgccactatccgcaccaagaagaaagctcctgctcctggaggtggagacagatggcattggagcacagtttacaacatcctcacaaacgagaaatatatgggcgatgccctgcttcagaaaacttatacaccaaatttcttgacccataaatctatggtaaacaatagagctattcggcaatactatgttgaaaattcccatcccgcaatcgttgacaaggaaacctggaaactggtgcaaaagataattacagccgagcacaaaaggaaaactggtgcataaatggcgcgccgcacggcaaaatgaaagttcaaaaagccatgacgggcgctatttgatgtatcataggtgacgtcataagacacctgtgaacccgcatgaacactgcgtttgtgcgggttcttttcatgccttgaaacggtgtttaaactgtgttttggtgtttatttggtcgttgttgctgcgaaaacataccaaaagatacctccaaaaacgagagcgggcggcatgtgtacacctatcacatacccgttcccggatttctgtccgaggaagaaacagactcccttccctgtaccctgtcaatctcttcgacactggcatagctggccgcttgccggaagtcatgggcggttggtaataaaggcaatagtttataaccgaacgggtaatgaatgtaaagttggttgtttttcatatgttatcgcctttttccatatgtgttttttatgtggcgtattcgtccactttaatatgggttcatgtgcttccaaaagcccgaaatattctcttgtaatccacggggacgcatggtatcctagtgaataaggtaaaaggcatggccatagacgtactgaaacagactgcaaagatgctcaacgaacaaacacggaagatggagatcaaaatccggaacgacgtaaccgaacaccttgacgccttattcgatggatacaacctttgccagaaataaaatttatcgtgcaacgattgcgatcattgttcattaaaggtcaaatggaaaacgcttttaaaacgcactcttcgaaaagtatggagaaagactttacggtttttaagaataacttgtcagattccataaaggggtgatcacaatgatgaaagggttactttttttcattaaattcagctggaaagaaaggaaatcctacatcattctgaatgccgttagtcaattactaatcggaattttacctattgcgatcatcgccattccgaaatatattatcgatgaattaatggggcaacagcgcatggagacgatgatcctctatgtggtgctccttctatcggctatctttatcaacagttgggggatatcgcatgtcaatctgatgatttttaatcagagatgctatttgtctgccagattctcgaagtttatgcacgaaaaactggcgaatacggatttttgcaatttggaaaagccggattattttgaaataagagagaaagccaataaatttttatatggggattggcacggcttttcatatgttctggagagtgcttttgcaatcgtcggtaaagttttcacattgataggaatcatcgccatcatatccaccatgaatattttgatcgtttctatctttttactcatggtactcgccagtgcatttatcgattccaaagccaagaaaaaaagtcacaagctctccatggaagccgtaaaggtcgagcgaagatggaactattttacccggattctagaagatgtttcctattctaaagaaatccggatgaacaatatgagccattggctgattgacgctgaaatggattattcaaataaagcgatcgcgttttataaaaaaaggaatgtgtgcttttctttatcgagtttgtttaactccgtttcaggcctgattcaaaatgcaattacatacgcctatctgatttaccgggtcctggaaagcacgataaccatcggcgaattcaccatgtatctgaatgcagtgtccactttttccaacgctgtccgcgatgttttatccagcttggttgatataaaaatatatggactgtattacgaggcgctcgatacatatgtgaatataccagagacccttagaaacaacaaaagacttcctttgcctgttgctaaagagaaggagtttatcatttcttttcgtaatgtttgttttaaatatcccggacaggatcattatgccatacaaaacttgaactttgatataaaatcaggaaccaaactatcggttgttggtgaaaatggcgcgggaaaaacgacttttgtgaaattgctttgccgtctatatgaccccaccgaaggagagatcctctgcaacaatgttaatataaaggatattgactatgatgcgtatatgggcatgttttcggcggtatttcaagattttaaattattcgcgttttctataaaggacaacatcgtattgaatgacgagaataccatatcccgtgaaacggtttccagccttttgcgtgaggtcggcttagacaagaaaatacagacattgccaaagggtatggacacaagcgtttataaagaattcgatgaagatgggtttgaaccatcgggaggggaaggacagaaggttgcgattgcccgggcaattgccagaaagtcggacattgtgatcctggacgaaccgctctcggcacttgatccgaaagcggaacatgaaatattccaacagtttgatgccatgatccgcgataagacggcgatatatatatcgcatcgcctatcttccagccgtttatgcgattatatcgcggtttttcaggcgggccatatcatagaatacggaacccatgacgagctgatttcccttgacggtaaatatgccgaattatacaacttacaagcgcaatactatgtggataagagagttgtgtaatatgctccttatccgcccaaagccctatccatttgattttccaatttctgatgaccatgaaaaaggcaaatgagaacaggccggcatccggaaaggatgccggcctttctgtatggagtaagaatgggcgcaggtcttgaagagtgggtcctattttcacagaggagcaagaaaaatcgagtctgtatggggggcattatttcctatccatctcttcagattgccatgccagaagtggcggagccgtcttcctcttgggtagattcttccctacaaccggacagtcgggcggccctctttcgtttatagaaaggaaatgcccacactccgcccaccgccggccaaccatagtggatccctggcgatgtgcagcagaaggacgacgacggttaaagggtcaggaaggcgcttgcctcctttggccacacccggccggcggcagatggcttccataccgggactcccgtatcaacgacggcggtgcttcctgatagtcccgccccgtccatcacggttcctcatacaagccgatgacgccgtcgacattctccgccactaacgtattcccttgatacagggaaaaaggggcggcgttatcttgagtataatatagttgattgttaaaaaaaccataggtgctgatgttctctgcccataaagctgcctgttttccgtcaaatgaatgtatgtcgtaccgctgtggggcatccttccgactgacgatcagataggcctgatcccccactacacgaagcgtctccagatcctggatattatccaacgtgaccatgtctgtaccattggtataacacagaaggaactcccccgtatgatccggaacccgctcataataaaagacgccgtccctatagctttctaagacacgctcgacatgggggcccagcgcggttttttcttttaaggctccattctcaatggccaatcggaaaaaattggcctcttggttactcgaaggcgttgcgttgtagtagtagaccgccccgtcggccatggtaaaataaagctggttttccacgattttatctgcggatgtgcccggctggcgaatgctctctatgacgatgggttcccggccctctgcttgcaggatccaggcaccgcggctcgtatctttgatgatttgaacgcctggagagagcgcaagagtgtcatacgcagaacggttctcatccatgctctctggcatgtctcctacctgtcgctggacagggtgctgctccttatcttgttctatgaacaccacatacgcaaaggcggttttatcgtattgcggcaggtcgtttaaggaggcggcttcggataaaacaacgcattctccggtttgagtatccagccgtttcaggctcaagcggctgatactgtacttggcctgccagcactggagaaaagtctcacttgcgctttgcggagatccggttccctcgaccccgccatagtagagaatcgtctttccatcctctcctaggtaaaaggatacgacattttccgccaccagacgactctttcccttttcataggcgtacaggtcggtccggaccgcttcccggttttgttggatatagtacagggtgccatccaccccaaaacgaaagggcgcccgattgctccaattgcgtaaaaacacggccaggtcctcacatacggccttggtcttccccttgcttggcgtatcgaccgtgtacagagtggttttatcctccaatgcgttgtatcggggacaaaacgccagttctctgccgttcggcgagagcatataaagaccttcggctccggggaaatactgtgaggcgttgcggaaagcggggcgctcgacctcctcggcgagcaggcggggcttgccgctttcccccaccatgtacagcccgtctcccgagaaatagaataggggggccgcctctcccgccgtggcggacgtctcccgtgatgtgggagagcccccgcaggcactgaacatgagccctgccgcacatacaacccccagccaggccatccatcgtttcatccaaccatccctcctctttttgtttggatccccaaaagcgtttattacccactcttagcatacgaaatcggaaacattttttcgcgtctgtatatatgggacaggattttctctaaaaagatggagaagcggcttgtgacacatcttgtccccgaggcagtttacgcggcccaaataaaacgcacaaatatccacggctcccgcatccagttcggcggcgcctttctgtccggcggttatgcctggaaatggggatcacccgtaatgtcgtatagtgtttctgcatattcagaaaaatccccgtatcggctcaatttgtacacacgttttaggccgcacgttggttccacacgcaggagaacggcgtcttgatcaaatggagcaatggtgagaaccgcagtctctggaatttggatttgaatatatggggccttgtccggaaaagccccccagtagtgaaggcggttaggcaccgatagacgcgccgcatatcggatatccaccgttttctcccccatatcatatgtccatccattgtaagtaaaggtgacgccctccgtatccagcagacggtggttgacaatcttctcataggagatagagtcataaaggaaaaggaagagcacaagcgccgctacgccgattcctgctatacagagctttcttttcagagaccgcttcttttccataggagcccccatataaaatatttactcgttctttagggggcatcctatcgggtgctcccggcgttccgaataacgtaacttcttacgcagcggcgtctgtctgaaatacgtcgttattagttatttcgtataggatttctaggtgcttgtcgaaatctccatattcagacaatttgtatttctgggaccaaccagaatgtgggatatattctatcaagaccgatgtatcgtcattaggataaatcttgagttcggccttggaaggaatatttattataacaggcgtttggcttttattaattgtcccccaaaatacgtgtcttttggcatccttaagtctgcttacatagtcagaagtaaaatcaggatgtttaataacaacatcattatattccaatataattggcagcatagattcgacagaatttaagtaattgttgttttgatgcatgaagaatcccattcacttttacgaattcttccccgacaataatcactttcattgccggttcggccgtcgcagacagaccgcgagatcccccctcctacggttccagagccgctcggaaagcgtcggacacctccgcctgactaacggtatacaccggctcccgctccggcgcctcggtcaggatgccgagccggccgtcgtccagcagggaaaagagcaaccgggtataggcctcgcccgagcgataaagcgggcctggatggagttcggttaccggaatatccagcaccagagccgttccggcaggggagaagggctcggacggttccccggcagcgaagagcagggcggcctcttccaaaagcggctctttggcctccttgtctatcgcgacatcgggccggccgcggacaactcgacggactgccgcatcgtttacgcttctcggagagaggtcggggagcgggtcgccttctttgtcaagatattcgatccgccagccgccgcgaaaatccggatccatgtcgaaggcgtagccgagataagaagctccgcggcagaggaaccgctcctgcttccggggcagccggatctccccgttttcgccacggagacgaaccttcgcggcttcaccggcattccatccggtatagctaccgatcagcaggacctggtcgccgactttcactggcatgaccggataataggcactttcaaagtgccggagagtccaccagaacagccgtttttccaggatctgtacatccagatagggggtatcgcccccaacgtcccgcacggcggcatacaccgtatcgttggtgtatgtgaagagctcctcgcccgtttccgccacctgatcccgataggcggcgagagaggaatacactggtgatcccggccggaagtccgtgacgtacccatatcccaatccgccggccagcaaaagcgcacccccacagatccccacgagaacccattgcctgatcctatggcgtttcatatcggttccctccaaaaaaaccggtattaagcgtatatgttcgcttcgacaaacacacctcgtttatagtcttctccataaaaaaagtcgtcgtaatatcgagcgcaagtccatcttgaatttagtttcccaagaaactaccaatgtagaaacatgcaaataactttgtgcacgtccttatataaatccatctgcaggcaggtcattataaagattgggcaatgaaatgttgtatttatatgtctctattaaatactgacaaatattatccgttatggtaatcataacaccggcaggagtagtgagttttataatacacccattctcttcatctcctataagggtgtcaccattcattgggaaagtacgccggtagatgatgagtatgccgtacgattcactgccccaaaacgcagccggtattttggtaaaatcgacccagaacttgagcccttcgtcaggactggagaataccacaaacacggttggacgattatatgatgaatgccataacctcattcaaatcagggaaaacaactatagcaatgaggactttatgatgccggtccataagagatgccgacggaaatcaaaacggcgagcaggattgccgaccatatcaaggcgcgcagagctttcttttttcaagtcatgagccctcctcgctgtacatcttttctatacggcaatctccgcctgtgtactccgtatacgccagacgtatagccacagcatcggcaccgccctcggtatcgttccccatcgtgcagtttcgttgcagggacggatccctaaaatccagcatctccttgctgccccgtagatagtttggggttgcccttgcgatatgtgccctagactttgggccccatcacaggccgaaccggaagtgtcgccctatcaccgctccaaccgtcagcgcaaagatgaggcaatccgatgccgaagatggaccaaaatttcagacactcttacaatatatccaataatctatttagtcaattgtcgatttttgttatatgtgtgattatgtttcactcattatcccttgtgtgaacaaaacaccacaaacatcaacgttccgatgggattgctgccatcggattttggagccatggagctggacaagacggaagagagccaagagccgccgtattatatctgcattccggccaaaagaccatgcgtcacacgtcgtaagcatccccagccaaaaaagacgtccggaaaccgatgatatagacggtttccgggcgctttttgcgtcaatctgggggtgtcccattctatttttgactgtttggccgtgcttcaggccggcgatcctgtgctagcggcgcgccaaccgtacaatccgattccaggtgatcggacccaccgcgccgttgccttccaggccttgattgtcctgcacggcttttaccgcatcctcagtggcctgatcgaaggtgccggtggcctccacggacggaatgaagctatggcgggcggcagcctcctgcaggaaaatctggagctggcgtacatcgtccccctgcatccccagtgtgaggaagcgccccggatagatctcctcgctcccttcaagcgtctcgggcgggaccgatgctatggtatccgcatacacctgcatcatgcggttccaggtttcccggtcgatcacgccggtggggtccaagccgtattcccgctggaaagcctgcacgccgttcagggtgttttcatcgaaattgccgtcgatgagaacttggggaatctggtcgtcaaaataagagatgatggccagataatattgggcgacccgtacagggttgccggtgtcccccagctgaagctgccgggagaactgccgctgggcctcatcgaaggagatgccctcggagtatagctctgacaggcccttgacgccgttgtatgtctttttgatcttgtaccaggttgcttttcccacgatcccgtcgggagtcaggttgaaaatgcgctggaattccctgaccgccgcctcggtttccacgccgaaaaacccgtccaccagcagcttggggattgccggatagttgtcggatatccggttgagctgccgctggaggatccgcacatcctcgccggcactgccctggcgcagggggacaccgggataggagcgctcgatgccctgcaccggcgcgccaaacacgatattgatatcatcaccgaaatagtactggagtatttcgtagggtatcagtccctgatccgcgagatccaccgtaccccattgggacaggccgtcgcaggtggaggtggttccgttgcagtactgggtgaaaagcggctcgacgctgccctgccgcaccacataatcgttaaaaatgtcatccacgatctgggagatgttttcgaatatatcccggttgcggacgaagttctggtcgtattgggtgttgtttgtaatatcgaaatcatatccctggctgggatagtgctcggtatagatccgattgagggcgaagctgatttgcgcgaggatattggcccggatggcggcctccggccaggtgggatagatctcactggaggcgacgtttttaatgtattcggcaaaggggatcgtgacgttttccgcggcctggtccggggcaccgagatggacggtaatggtttccggaatgaccggacggtctatgttgccgttcatgtagacgcctccctattgaaagtccggccgcgccggcacgaaccggacgggctggatagacttgatcccttcgaaaaccggcacctgggtaaacacctgggtctggaactgcggatgggacaccgtgacggtatacgccgcataggacggtttgcctggttccgggctttgggagcggcctttgtcgggagcgggcagccggataccatccaggataccgctgccatcggtaatgccggtggcaaacaccctgctgccgtcggcaaaatcccgggaaacggtgacttccgctccggaaatcggcacagcccgcccgccggcggaggcctggatgcgcagctcacccatttggggattatcggcgagaaagctctcgtagctctccggttcagggaccgccggctgcagcggatccacgccgggaccggattcaggcggattaatttcgactccttcgtcgggttctatcggagcaggggcctctggctgggggctcgtttcctctgccggaggggaagcgggttccggcggaagcgtactgcgtgccgccatacccatcaggtcggccgcatactgtcggaccattgcgtcaaacgcctgtttatccatcggggatgcctccttcaatcgtaacagttcactaccctaccaatatagcggtttaccgaaaaaaggtgacaaaaaggccaggctctcttgcgaatcggctgtattactcgaaaaagatggccctgctcttgggctttgatctgaaaagctgatgctttttaaccgcttttttcaaacgctggactgcgtttcaggacggcgctcccgccagcatatagaatacccaaagtataataattgctatattcaacatataaaccgggcaaaatctacacattgccaaattataacaaatatggacatgcctacccataaattaaaacgttgttttttgtgaggattgcgttatagtataatacgtattatttgaaatgtataagttgaaaaatattatgcatgatgatgatacaggggaaatgcaaatgatagaaaggtggtcagtaagagtgaagtggaaaagaagatggcgtaaaatcatcgcaggactaaccctcgtggccatgacaaccggtcttgttccagggatggacgcattggttttccgaggggccgccgagacctaccaaccggcaagggtggtccagatcgatgccgtgtcggacatcaacccgacggcacacctgattttcccgtcctcgtggcagaatgcgggaacgatgacggtgacgggaaaggtccggatcgagtccatgtcgtccctgggggcgggcgccggcttttttgtcaacaacgcagcagcaaaggaattggtcagttataaaggcaacaccaacggctgggtcgatctctccctgaccgttacatacagcgatgcccggctgatcttcggcggctggtatgcgggcggcaagatgagcttcgccgacctggtcatcaaaaaggcggacggcacggtgctgtattctctcgccgacgacagcgtgttcgataccttcgcccacggtgaaaatctgcgcggaaggcgtggcgactggattttccaaacctataacaatgtttctaaatttactgtggaagccggcgcttatcagccggaaagaaccgtcaccattgactccacatcggacatcaatccgacggcgcattttatttttccttcttcgtggcagaatgcagggcctctgacagtaacggccaaagtcaaggtgacttccctgtccgcgctgggatccaacccgggctttttcgtccataacgccgccgctcaatccaaagcgaattataatgcggtgaccgacggatgggtggacctgtccctgaccatgacttacagcgacgcccggctgatcttcggcggctggtatgcacgcggcaaaatgagttttgccgatctggtgattaaaaaggccgacggcaccgtgctctattctcttgccgacgatacggccttcgacacgtttgccctcaatcaggacataaaagggggacggggcaactggattttccagacctataacaacgtctccaaatttaccgtaaaaggcggggctgcccggcctgaaagaatcctcacgattgattccacgtcggacatcaaccccaccgcctacctggccttcccctcgtcatggcagaatgcgggaaccatgacggtcacgggcaagatcaaagtcgactccatcgcctctctgggatcgggctgccactttttcgtcaacaatctcgccggaaaagaactcgcgtcctatccaagcaataccaacggctggattaacttgtccttaaaggtgacgtacagcgatgcccggctgatcttcggcggttggtatgcgggcggacagatgaaattcgccgatctggtcatcaaaaaaagcgatggcaccgtgctctactcccttgccgacgacacggtgttcggctcgagttcttttgatcagcttctgaccgggacaaccggatattggaccttcacaacctataacaacgtatcgaaattcatctgcactacggtggaggaggcgccggtcatccgtgaatacgggccggagcgggaactgattatcaacagcacctccgacaccaatcctacggcggaatatacgttcccctccgcttgggcaaaccaaggaccattccggatgacgggcaaggtccgggtcgagtcgatatcgtccctgggcagcagcccgcgctttttcctccaaaatgcgcagggagacaccctcgcgtcctacgaagccgccacgaacgggtgggaggatttgtccgtaacggcggcttacagcgacggtggtttcacatttggcgggcaaaatgcggccggcaggatgagaatcgccgatttgaagatttatgcctccgacggaacgcttttgtaccggctgtccaccgatccggtttttgaatcggtatccccggacgcagacattgtgggaagcaaaggggactggatgtttgagaaaaacagccaggtttccaaattcagcgtgacgacttggattctcccaaaccggtatctgatgatcgattcctcgaccgatatcaacccgacggcccacctgattttcccgtccgaatggcaaaacaagggggatttgacggtcacgggcaaaatccggatcgagtccctggcgcttatgaatgatggcggaaagttctttgtcaacaacgccgcggcgcaggagctggtcacgtatacggcagataccaacggctggatcaatctgtccctcacggtggattacagcgatgcccggctgattttcggcggctggtatgccaaaggacagatgaaattcgccgatctggaaatcaaaacctccgacggcacggttctttattccttgaacgacgacgatacctttgccgtgtacagcgacaacgacaacatcgtgggcggccggggcatgtggatcttccagacctacaacaatgtctcctccatgcacgtgatcgcgccgccggtcgatgccgattatgtcccggacagaagcctgtatgtcagccccgtcgacgacatcaacaccaaggcgcatttcatctttccgtccgactgggcatcctacgggaccatctatctgacgggatacctgaaggtggaaaatttccgcccgcagaattccgacgcccgattttcggttcataacagtccgggtgtgaactacttcacgccgtattatgccgataccgacggattccaacgggtggtcatccccgccacgtacagcgacgaacggtacatattcggcagctggaaggcatcgggagactttatcctggcggatctggaaatccgcaagcaggacgggacgctgctgtattccctggcggaggaccggaactttgacaatatcggcacaaatgtcgatatgctgggaagccggggatactggattttccagaattacaacgatgaggcgggattcaaggtccgctcaaaggtcaatcccgcacgcagcttggtaatcgagtccacgagtgacaccaatccgaccgcgcagttcgttttcccgtccgcgtggcaggatgccggacgcctgcatctgacgggaaaaatgaaaatcaacggcttcagcccgctcggaagcgacgccaacgtgtatatcggcaacgcggcgggggccagcttcaaaacctttacaggcaacacgaaaaattgggagacactcgccatcacggcggaatacggggacggacggtttgttctcggcggctggaatgcggccggaaaaatcacctttgccgacctggaaatcaccaacgacaaaggggaagtcctgtacagtctcgccgacgacccggccttcgacgggctggaggcgcagaccgatatcgctggtgaacggggcggatggagcctccagaagcatgatcatgtttcccggtttgtcttgctcgacggcaggcagtgggattacacgatgacaagcgggcggtataccgtttcgggcggtatcatctccgccgcggtttcctcctcggcggcagaggacttcctggcggatatcgatcccggcatcgatgggacggtcaagctgttcgaagggacggcacccgttaccacgggatttgccgcgaccggcatgacggtttccctttacaaccggggcggccagaaactgtccgagtatacggttgcagtcaaaggcgacctgaacgcggacggcgtggtgaatgcggccgatgtcaccgagatgcaggcgcatattgccggcaccaaatccttcaccggtgtctttctgcaggcgggtgatctgaacggcgacggttcgatcacggcagccgatatcccgcttttgcagcagctggccgccgcctattcggacgaggccggcaatacggtcatcgacagctatcaggacatcgtcacgatgacgccttcccaaaacggggccaactcggggacactgaccgtcgtcggcccggggagtgagcccgctcgaatcgtcgtctcggcgttcgcaccctccaaagtgatggaggcggcggaattcctacaggagaccatatacgacatgaccggaacccgtctggagatcgtggacgataccgccgtccataccggcaatctgctcctcgtcggcgattcccgctatacccgccggctgggtatgccccgcctgtcgggatatccggagagcgaaaaggtgcttttgatgacgcgggggaaccgcctggtcctgatgggcaatgactgcgggaattacaccgggacttacaacgcggtcaccatgttcttggagtcccttggctgcggctggttcgggccggaggcgctgtgggaggaaatccccgacgtctccagcatctccgtcggcagctatcaaatcgagcatacgccgcagttcaccaaccggataaaccgggtttacgattccaaccgtgaaatggggacccgctggtatcagggtggggacaagatgcttttcggccacggccttcccagcctggtttccagagaaagctatttttccgcacatccagagtggttctgcctgatcaacgggcagcggaacccctatggcgtggactggtggcagtattgctattccaatcaggctctcgccaccgaaatcgccggcaaagtcattcaattttttgaccggaaccccgattacacgcagtataccctggcggcgaacgacggctggtacgaaggctggtgcgagtgctcggcctgcgcggcgctgggatccagaaccgaccagatcctcacctttaccaaccgggtggcggcaatcgtcggcgaaaaatatcccgacaaaaagctgacggtcctcagctacttcgcaaatttctatgctcccaccaggaatttcaccatggaacccaatctggaaatccagttcacgcgtgaaaccaatatgtatcagccggtatcgagtggattcaacatgggatcctcttattatccggaaacgggcaatacctatacggtcacatggaaggacaacgtggccaactggcaggcgagaaccggctgcgagaactacggcatctgggaatggtactgcgtagccgctgccaagccggagtggcagtatatcccgtgggtgcagggccgggtcgccatccagaatcagcagtattggaagagcatcggcgccgattatatctattacgaccaggggcccctgcccgggtactatgaaacccaggatgactacgatctgcgctggccgctctggtatgtggcgtccaaagggatgtgggacgccagcctgacctccgagcagattttgaaggatgcctgccgcaagctgtacggcagcgccgccgacgccatgtacggctactacaaatgcctggaggacatcagcgccgaatgcacggccagaagcgtcgtatggtattcggctccggccaatcagatgtacacgagcgcgaacatcaaccgtgtgaacgccacagtggccacggttcgccagtcgctttccggggtgacggcgacgcagcgcgcccggatcgaaaaccaaatagcgttgtgggaaaccgcgaaacagcatatctgagccccgatgcacagaaccgggccgcctccgaactggaggcggcccggttgccgtcccggaagcgccccgcattcgccaggattcgggggggcacgaccggcttcgtctggaacagtaggttgggaaagcgggttaaaatcgggtttagctctcctttttcgctgaaatttggcttttgaccttttgccgggattccggtatgataagggcaaggccttaatctattgaaaaggaatgaatgcattgaacaaaagaatgccccgttttgttaagccgcttctcatcctggttccctgcgtgatcttggctctgatcgtcatcatcggctgcttcgacatcgtacctgcgggttacaagggtgtcaagctcaccatgggcgccgtggacaacacggttctcaacgaagggatccacttcaagctcccctttgcccagcggatcgtccatgtggacgcgcgggtgaaaaagtacaccgtggaaggggaaacctcggccagcaaggatatgcagtccatcaccaccaatgttgcggtgaactaccgggtggacggggccaatgtcgacgagctctacaaaaatctgagcctcaactacgagaacaccatcatcgcgccggccgtgtccgagtgcatcaagtcggtgacatcccagtacactgcggaggagacgatcacccgccgcagcgagatttccgcccagatcaaggatatgctcaaggaccggctcgaggacaagtacatattcgtcgacagcctgaacatcaccgatctgactttcagcgcggcgttcgataaggcgatcgaggaaaaacaggtggcggagcagaacgccctgaaagccaaatacgatctggaacgcatcaagaccgaggcggaacaggccgtcatcaaggcccagggcgaggccgaggccatgcggatcaagaatgaggccctcaccgacagcatcatcgagctggaattcctgaacaaatgggacggccatatgcctacctattacggcggcgacgccgacctgctcctgtccctgaatccggacaaggcggaataatcccctgcacacacaatcccccggcgttttataaacgccgggggttggcctttctccgggacttacagctctgcgtgaaccacgtctcagggctcccggctttcatccggcagctgtgcggcgacctgcttttccccgtccgtaaaatagacgggaagctccaggccgggctcgatagggatttcaacggtaagccgcgcggacttaaagaaaaacagcgaccagaccggggcctttttcacggtaacccgaatggcgtccgtctcccggctgaagcgatatcccgtcaggacatgggaactggtgccgatcccgatgtccatcgagagtacgccgtcctccgttttgcgggacaggacctggagggaatccgcgtccactgtccggatactgcaaaaactggctacgatataggcgatgaccagaagggcgaaaaccagaacggcgattatgacggttttctttttcatacgttgaaatcctttctctatttatgaactggagcttccgccgagagacgaggaaggccgtgaaagcagacgggcggggaagctcctgatccggcacctccggacaacggactcaaaaatgtacggttttcgccgcatcccctgtccgccgccggaaggatggcggcacggatgcctttcctggagacttgtgatcatctatagtatacattctatcaacaagatgtcaaatcccggcccgttgcgacagactggaaatacaaacccccggcgttttataaacgccggggggatctttttttctttaccgtccgggacggcctccgaagccgccgccccctccgggagccatgccaccgcctgccccaccggcagccgagccgtcgctgcgcacgctggtgacaacgccggagagggtgacggtcgagagctcggccgaacccgacagggtgccggacgccgcatacccgctgatgtctcctccgctgcaggtgccgccgctgtatagggtatagcgttccccttgactcagcgtgggggtgcagataatcaccgactggtaggccttcgccggggaaaaggccgccgtaaggccgccctttgcatcggtcagcccgatcagcgtacccgccggctgcgtggaggtataggtgatcatcagaaccgcctgcgtcgaggaagacccgggcgcttgggccatacctgcgctgccggcggcaatcaggacgcctcccgtcaccgtgcaggagccgtcgtagtcaagcgccccgtttccgctgttagtcgggccgctgaccaggacaaggcccccggagatggtgaggctcccgttggaatccagcccgtcgccgtccgcatcgatcacgacggtaccgtccgaaatggagacggtatgattgccccccgactgaaagctgtcggggcctcgccagccaccggcctcaccggtgtcgctgccgcccgcggcgttgataccatcatcggatgccttgacctggatatccccacccgagatgctcacatctgtaccctcgagcccttcatagctcgttctcaccaccacggtacccccggagatggaaaggatcccgtcggcatgcaccccgtcgtctcctgtggacaggtcgtaggagccgtcgcttacagtgacatccccgttggcatgcagggcgtcgtccgcggcgtcaatgacaaacgtaccgccctgcagggtgagagaggtgcctgctttcacccctttatagctctcggtgtcggcggtggtggtctgcgtccctcccggccggaaatcccagccgggtatgccaccgttatccgttttactcaccgcagcgctcccaccgccgctgatgatttggtaactgccgcccgccacgacgagggccgtctcggcctggatgccatcgtttcccgcctcaatagtaaagacgccgccgtcgagtgcgatccagcctttgtccgcatcggtgtcgttgttggctttgagaccgtccccgccggccgtgaccgtaatcgtcccgccgcgcacgctgatggaatccttgccgcggatcccgtcatgggccgcgttgacggtgatgctgccgtctacgatcacaaggtcgtccttggaggcgatcccgttgttgtagcgcccggttaccgtcagcgagccggtgccgttgatggtcagatcctctttgctgaacagcgcggcgttcggttcgtcctctccggccgcgtaggtgtaggtctcggcatcggtcagggcgtttacagtgccgtccgccagggtgaggatcacgcggccggcctctttgatatagagcggcgcgccgtcctggcagctcaggtcggccccgtctaggaccagcttcacggtagcctccttgcctgcctccactaccacctggccgtcggtcagggttccctggaggacatagataccgtctttggaaatcgtcaataccttcccggccgccgctgcgcccggccccgaaatcgaaaacgcgctgccgtcaagggagacgacagtcgccgcctcttccgcccactgatcgtccagatcctcgtccgtgtaccgctcgggatccaccgagacggtcccgccggacgcgtttccggacgcagtccccgttatcccgccggagccggccccgtctgaggaagcgttcccgccccgcttgcagcccgccagggcaacagcaaacgtcagaagcagcgcggcacccatttgtttccgtatccgcatcaaaaagccctcccgtcacaattcttcccggtcggatgccagcctgccgcaggaaatggtcagattcccattgcggcaacgcagctcgtcaagaaatgccttctgcgcggcgggggacttcaggcgcacctgataggtcagctcataaaggctgcccatgttggtggtctttacccggatgagctccgccgcttgggtgtattgatcgaacagatcatcgaatagcccctcataatccaaactttccggaatcacgatccgcagcaggctatccccctggcgggattcaccgaacctggtggcgttgagcagcagcagcgccgcccccaccaccaggaaaaacaggaacccgaacagcagataccccatgccggtggccaggccgatcgccatggcgaaaaagatgcagccgatttccttggcactgcccggaaccgaacggaaacggatgagactgaaagcccctgccacggctaccccggtgccgagattgccgttgaccagcatgatgaccagctgcaccatggcgggcagcagcgccagggtaatcacaaagctcttggagtagtggctgcggtgcatataaatcagagccgtccccagtcccagcaacaaggaaaccgcggtacagatgaggaacagcactggggtcagcccgctttggaggatgcttccggcaaacgtgtcgaacataaagggatccttccttccttggtggattccgggaacaggtgttcccggtagcaggtgccgtatttggagaccgatacaggatagagcgcaaacgaatcgagcaggcgggagagccacaggggcatggagcccggcagcttgatttccatgacgacggtgccgtctgggaacaggagagcgccctcgtctccgaaggacagatcgagatggtcggcgcggtagcggatccgctcgtcgaacgtaatgcgcacgccgggatcggccctgtcgaagagggccgtccggtcataagcgaggtaggccgccggctggaggggccggcatcgggtaaaccagtcgatttcctcgagcacctggcaggagggatggggtttttctcctgtacgcatatagcgtgcggccgtttccaagggaagaggtacccgccgtttgaacacctcccctttatatttctttttcagctccaggtagaccgtatcggacgcttttgggatgccatatccgcgcagcctcagtttctccttatataccggcttttccaggctggcacggatcaggtcgtaggccggcgtgtcgtagtacaggcttccaatggtgtattgcccgtaggcgtcgggctccgcatactcccgcagcgcggcgaggaacggacggaaccggccggcactcaggcggtatttcagttccattcgtttgaagacggtcgggctgccgctcataggccatcactcctgtcgaaaaagggagggaatcccctcggtgtggagactatcataccgcaaaaatctgaaaccagcctgaaaaacccctttcagattcatttcagattcttcgggtattctaagggcagaaaagccctcggcccctgttgcatccggcagggatttgtgtcaagatagagatgggccgttgaaaagaggtccggaacgcgactccaaaaccaaggattatacagaaaaaggggggccgccccccgaaactcagaaccaacctgttcgcaaaaggctcggatatgccgacgccgccgaatggaggaggctattcaccatgcgtgtcctgatcgtggaagatgagaaacggctggctgaggcgctcggacagctgatgaaggagcagaggtacgcggtcgatctggtctatgacggcgaggatggcctcgcgtacggccggagcggccagtacgacgtcatcgtgctcgacgttatgctgccgcggatggatgggtttgaggtggtccgccgcctccggcgggaaaagattgccactcccgtcctgctcctgaccgcgagggacgaggtgcccgacaaagtggcggggctcgactgcggcgccgacgattacatgaccaagcccttttcacccgaggagctcctcgcgcgggtgcgcgccctttcccggcggcaaggggatgtagttctcgaggaaatgcggttcgcggacctcgtgctgaacctgtccacctacacccttcactgcgccgcccgttcggtccatttgggattcaaggaattcgaggtgctccgcctcctgatggcgaatcccgccgtcttggtacagaaggaagacctcctgacccgggtatggggatatgagtcgggtgcggaggacaacaacgtggaagcgtatatctcctttctccgcaagaaattcacctttctcggatcccgcgtggggatcgccaccgtccgtcgggtcggataccggctggtagagggggaaatcggatgatccggaagctgcggcggaaatttgtcttgatcaatatgctgttcgtcagcgcggtgcttctggcggttttcgcggcgctctgcctgtcgacctatcgccagatccgcaccgacagcgacgaggccctcacccgtgccctcgccatggataccgctgggggcaaagccccgccccgttttgagatgggggagaggaagccggacaggcacacgcctttcctgccggttttctgtgtccggacgggggcggacggcgctgtctccgacatctacggggagacggtgagcgtcaccgacgaagaagccgcgcaggccgtctcccttgccttcgcacacggaggcaaaacgggtgtgctctccgggctcggactgcggtttttgagggaggaaacccctgcgggtactacctttgcttttgtggatctgagcagcggcagatccaccatgcagcggctgctgctgacttcactgctcgttgggatcggcgggctcacagcgttttttgtcatcagcctgtttctctccgcctgggcactccgtccggtggaacgcgcctgggaacggcagcggcaatttgtcgccgacgcctcccacgagctcaaaacacccctaactgtcattcttgccaacaccggcatcctgctctcccatcgggaggacaccatcaatgcccagcggcagtgggtggaaaacaccaaggaggaagccggccggatgaaaaccttggtagacgagctgctttttctggcgagggccgacacggcccacaccccggctatgcttcccttggatctgagcgacgtggtgatgagccgtctgctcccctttgaatcagtggcgtatgaacagggactgacgttggacagccgggttgcccccggcatcaccgtcacgggggatgccgggcagctcggacagctgaccgccatcctgctggacaacgcctgtaaatacgccgaccgggagggtcgggtgctcctcacccttgataccgcccagtccatggcccggctgcgggtgcacaataccggcgtccccattccgcccgcgaggctcgagcacctgttcgagcggttttaccgggcggacgattcccgttgccgcgaaaaaggtggctacgggcttgggctttccatcgcgcagagcatcgtggaaacccacaaaggaaaaattacggtccgcagcggggaggaggggacggtttttaccgtcctgcttcccctgaaccggcaaagtgggtgatacggttaataaaagctgggatcggccttgaagcacacacctgaaattcggctgtatgataggcaaaccccgctttgggggtggttggaccgccggggggagtcccggagaaaggcgcgcgggggaaatggaaacaaccagtggcggatgcaacggcccgaaaggtctctccggacttctcaagaaccgctatggcgggacttaagcctataataaccgtcgtatcaaaacaacgctcaaagggcttgacgtctgctgctcacagacgtcaagcccttcgttccggccgtcttttcactctggctttttcggatccatttctgcccgaccagcccggcttgaaaaaaacagatgctgtctcggctcaaaagcaggcatgcccgggccagcgggcgacggagccgagttcctcttcgatacgcagcaggcggttgtatttcgcgacccgttcgctccggctcggcgcgcctgttttgatctgccccgcccccatcgccacggccaggtccgcgatggtcgtatcctcggtttcccccgaacggtgggagaccaccgccgtgtagccggctttctgcgccatccggatggcggccatcgtctcggaaagggtcccaatctggttgagcttgatcagaatcgaattgccgcagcgggtttcgatccccttttgcaggcgttcggtattggtgacgaacaaatcgtccccgacgagctgcacccggtcgccaagctgcgcagtcagacgctgccagcccgcccagtcctcctcgtccagggcatcctcgatggaccggacagggtattggctgctcaaggctttccagtgttcgatgagcgcgtcagccgtgtaggtgcggccggattttggcagacagtatccgccctcacctttccactcgctcgaggccgcatccatcgccagcacgaaattctcacccggccgataaccagccgcctcgatggcgcggagcaggaaatccagcgcctcctcgtcgcttttcaggtcgggggcaaagccgccctcgtcccccaccgcggtggacaatccttcctttttgagcagggcggcgagatggtggaacacctcggtacaccagcgcagcccctcccggaacgagggagcgcccaccggcatgatcatgcattcctgcacatccatattgttggccgcatgagcgccgccgttgaggatgttcatcatcggcaccggcagtgtatcggcggcggtgccccccagaaagcggtacagcggcagatgcagctcattcgctgccgcatgggcgcaggctaaggatacagccagaatagcgttcgcgccgagacgggatttgtccccggtgccgtcgagctccagcaggatacggtcgacagccgccgtgcatgaggcgtcctgcccaaccagggcttcccggatccgggtgctgatatggccggccgccgtcagcaccccttttcctccgtagcggccgggatccccgtcccgaagctccagcgcctcaaagcggccggtggaggcgccgctgggcacggccgcccgcccgcgccgtccgccagccaggatcacctccgcctctaccgtcggattcccgcgggaatccaggatttcgcgtccgtggacgtcctcaatctgtaaatgcatccgtatcttctccctttccatgtgcctatcggcagacatatcatgcgcggcgttagtatgcccctccagccgccttttatgagaaggcggacggcagtcccggacctggcgccgcgaaacggccataccagcccccctcccataaaaaaagcggcctttccaaccggaaaggccgcgctgagagatgcagacgatattggtccggaaatcagtccggctcggtgggaggcggcggggactcccacatgcctccgtcaggagaaccggaatccgcccccggcgctgtcccggcgtccaggggggtgttcccatccgggaatgccggtcccgcccctgacggagggccggcgtatggagcattccctcctccagcggccgggggacgcaggctgtccggcgaggggatatcgaaccgggcaaacagacgcgcgtcccgtttccgctgcagccggatatgggtcaggatcgcgagcaggatcacgaggcacaggctgatgccgctgaacaagatcccggcccacagcccctgaggggtatagcgcagctcaaccgtgtgctcgcccgccggcacgtcgaaggccaggaaggcctcggacacgccgtaggtttccacaggcgtcccgtccaccttgacccgccagcccggatcgtaggggatcgaggtgaagagggcgccgccctccgaccggaccgtccccagaatatggctgtccgtgaaggaggtgacctccagcccgccggccttcagcgtgtcgatggcgtcgcggtagacgtcctggttgagggtggcgacaaagaagttgccggtacaggacatctccgccgataccgtcatggtcagctcgtccccttctttgagtacaccggcgtcgatgatataggcttcccgcgggctgaccgaccaggtcgagccgtttgccgagacctggatggtcttggccgcgccgcagtccgcgtagacaaaggtctgcccgccgcttcgcagggtgaccttgaaggtgccgttcgccttgccgtcggcggcgtagagattgatcgcggtggccgacgtgttgttgattcccgcgccgacgggatgaagggtaaacagctcccggctgtccccagtcatggccttgaacagggtgttctgggaggtaaagggataatagtaggtatattgccagtccttgaccgccgcgtcggtgacaaacccgaggggcagggcatcggggttctcatacacataatagttgaccccgttgtggctgatgggttcccggtagacgagctggtcgtgggaggtgagctcggcgttcatcaccaggtagcggatcccgagcagggaatcgaccgtggggacgaaggagcggtaaaggtggctgttgacaccgttgatcgcgtagcccagggctcccatcgtccgggtagtggtgtaatagttgctcgaggaaaaaacggtgatcccccggtatccgaacagcgctgtgtccacacaggtgcgacggggaagcagctccatgcggtagaattccttccccatttcgctgtcgccgagctgctccgccttcgccactgcctgacggatcgtctcggtggcatcgttgtccacatagttgccgtgggaggtataatgctcctgggaatccagcttgcggaaggctccgcccgcatggaacagcatttcccccgtcacgacgaggcaaagcagggcataggcgatacggacccgcggaatcttccgccgggcgacgagagccagcaccgcagcataaaccgccagcagcagaaggctgacatagatgacctcaaagccgtacgccttgtccccgaaatgctcttccaccatcagataagcgagcagggcggcaaacgacgccccgatttgcttgaaggtgaccgcgcgcaggtgctggagcgtttcaaacgcgatgaggaggagcacgaagctgtacaggaaggagaagcggtagggcaggtcgttcggaaaatgcaggccgtgccagaaaaggttggcgagattgatggtacagctgaagcccaaggcggcgaagagcccgatatacgccacccgccggcgcagcgggatggctttcagggtagcaaaaatcggcagcagcaggacggcgagcagtccgcaatagatattgggcaggttccccgaccggatggtgggagtggtgccgtagagattccgtccgagcaggccgaacatgtcgaacatggaggtcagctccggcggcttggcccccgcggcggaggtatgcccgagcgccaggaacaccggcacgagcagaaacatcgccagcccgcccgcgagtagggagcccacggcgaaccgggcaaacccgagcgcctgccgctcggcccggcgctttttccggaatacgtagaccagataatacagcaccaggaagacacagagcatgaagccgatgtaataattggcgatcagcgcgtaggcaaggggcaggatataccacaagtaccgcccggtccgcatcatcttttcgaagcccaggatcacgagcggcagaaccatcacgacatccagccacatgatgttccaggaatacgcgatcatatacatcatcagcgcgtacatcacggataccatggggacggtgatgttccggcggcggtagacgctctgcacgcaggcggcgaagaaagcgccggcaagcgcgtttttgagcagagtgatgacgaggatcccctcggcgagaagatgctccgggaagaagaccagaaggaggttgaaggggctggccaggtaatagccgaacagggagacgaaattgatgccgagccccacttcaaaggaatagagtggactgccgccggtcaggatcatctcccgcaggcgggcgagaagcggcgcgtattggtgatgcatgtcgacgatcatgccggttttgtccccgaggggccacatgccgagaaaggtgtaggccaggcacatgcaggcaagcgacaggacccccgacaccaccggatagaaccagacgccgtgtttcaccggccggtccctccggccccgcatagcctcacttagaaaaacggcgaacaaaaacccgaggataagggccgtacccaggacatagacggatttgcgcagcaggttgtccgacggaacgccgtctttatcgtaccaaagcatcaccacgaccagcattgcgccaagcagcgccgcggcaccggccagggtcagacgtatggccttgtgggacaagggggaatcctctcgttgcatactcc

SEQ ID NO: 2995 - DNA, 2764 bp, Unknown
  16S sequences of unknown bacteria
ctcaaacggaagcccgccgatatgatgcacattcctcacatccatcacaatataattcgtatgagtcgaccaagacaaagacaccctgtcccccggcgcgaactcagtcacgccctcgccgaccctctcaaccacgccagccgaactataccctgaaatccgcggaaaatgcacactccccgcgccgacaatccccacattaggattcccgaccaaattagccctctcagtccccgaactgatcgaagacacacaaatccggaccaaaacctgtccgcgccccggctccccaacagaaaccggaacaacctcagccacccccggcgccacaaaccgtatctgcctattatccataatcaaacatcctttcaaaccccggctcaagccgaaatctaccactattatacaacaccgccccccaaaagtcaatacacaatcctgccacaaaccaccacaatcctgccgcggcgagccgccgcgggcaaagtcaatttttcggctacagtcggatgaaggctctgcctcatcaaacacagtgcgtcggcaggggccagcccctgcacccatagtcaaggtttcggctacagaggagaccggaggtctcccaggatgaaagccctgcctcatcaaacacagtgcgtcggccagggacgccacagatggtccgcggcagccttcttcttcggattcacaaaaaaataaccttatccgctgttttctgtaattcattctgtggtataatatcttatacgaaattgaatatttcaagtttgaatcaaatcaggagttaaaatgcttgaactcagggatatcgtcaaggactacccggcgggggacgggattgtccacgcgctgaggggagtctccctctctttccggaagagcgaattcgtctctgtcctcggtcagtccggctgcggcaagacaaccatgctcaacatcatcggcggcctcgacaaatacacctccggcgacctcatcatcaacggccgctccacaaaggacttccgcgaccgcgactgggacgcctacagaaaccactctgtcggcttcgtcttccaatcctacaacctcatctcacaccagaccgtactcgccaacgtcgagctcgccctctcgctctccggcgtccccaaggccgaacggcgcagaagagcgacagaagccctgaaacgcgtcggtctcggcgaccagctgaagaaaaagccctccgaaatgtccggcggtcagatgcagcgcgtcgcaatcgcccgcgccatcgtcaacaaccccgacatcatcctcgccgacgaaccgaccggcgcgctcgacagcgaaacctcagttcaggtaatggaaatcctccgggaaatctcccgcgaccgcctcgtcatcatggtcacgcacaaccccgaactcgccgaaaaatactcgacgcgcatcgtcagaatgctcgacggtcaggtcatgtccgactccgcgccgctctccgacagcgaactcgaagagggcaggaaagaagctgtcggcgtctcggacaacataaagaaaccgtcgctctctctcggcacatcgttcgggctgtcgctgaaaaacctcttcacgaagaagggaaggacaatactcacgtccttcgccggctcgatcggcataatcggcatcgcgctcatcatggcggtgtcgcagggaacgaccaactacatcaatgccgtgcaggaggacactctctcgtcctatccgctgaccctcgagtcgaatcacgtcgatctcggctcgctgatgcagaccttcatcgactccgcgaagtcggacaccgaacacggcgccgacgccgtctaccagaagcccgcgctctacgagaccgtcaacgcgatgagctccatcgacgcgagaaagaacgacctcgccgcgttcaagacctaccttgaaaacgaaatcgccaaagaagactccgaactcgcgcaggctctctccggcgtcagatactcctacggtctcgaaccgctcgtctacacgaagagcgtcgacggggagatcatccactcggatatgcaggaactcatgagcgcgatgatgataaagcacctcggcagccagatgagcggcatggcggctcagggctccggaatgaccggtatgtcctcgatgctcggcatgggctactccggcacgtggcaggagatgctccccgggcttgacggtgagacgataaatcaggtgctgaagaagcagtacgaactcgtcgccgggagctggccggaaaactacgacgaaatcgtcctcgtcctcgatcagaacaacgaaatcgacgacatgaccctctacgcgctcgggctcaagagcgctgaggacatagacaagatcgccgaagcggcggtctcgcacgaatccatctcgtatgacgagcagaaatggagctacgacgagataatggcgatggatttccgcgtcattcccgacccggactgctacaaaaaggacgaaagcaccggactttacaccgatctcagagacactccgtccgggctgcgctacctctatgacaacggaataaagctgaaggtcaccggcatcatccgaccggacgaggacgccgtatccgtgatgctcacaggctcgatagggtacacctcgaagctcaccgaatacatcatcgaaaactcgaagaactcggacgcgataaaggctcagcttgacgacaaaaccaccgatatcttcaccgggcttgagttccgcgacgccgccgggaacgacgcgtcgaagaaaggtctcgccctctcaaacg

SEQ ID NO: 2996 - DNA, 5520 bp, Unknown
  16S sequences of unknown bacteria
cagagacaaggctaataggaggtgctgaagtagtatggcacgtattgctggtattgacctgccccgtgataagagaattgaaattggtttgacctatatttttggtatcggcagaaagagtgcgtctgacatcctgaagatggcaaacgtcgaccccgatatccgcgtcaaggatctgactgcagaccaggaatctgcgctgcgtgaagtcattgacaagcactacaccatcgaaggtgacctgcgccgtgaagtcgcgatgaacatcaagcggctgacggagatcggttgctatcgtggtgtgcggcatcgccgcggcctgccggtcagagggcagcgcacgaagacgaatgccagaacccgcaagggcccgaagaagaccattgcgaataagaagaagtaagggagggatatgaaatggcaaaagctgtaaagaagaccatcaagcgccgtcgtgagcgcaagaacatcgaaaagggcgccgctcatatccgctcttcgttcaacaacaccatggtgaccattaccgatctgaacggtaatgcgatctcttgggcctcctccggtggcctgggcttccgcggaagcagaaagtccaccccgtacgcggcacagatgtgtgctgagacggcggcgaaggctgctgtcgatatctgcggcctgaagacggtcgaagtttacgttaagggccccggccagggacgtgaagctgcgattcgtgcactgcagtccgcgggcctggaagtcgttatgatcaaggacgttacgcccattccccacaatggctgccgtcctcccaagcgccgccgcgtataattcgacaaggaggaaattgaacgatggcaaaaaatactcagcctgttctgaaacgctgcagaactttgggcgtgtctcccgctgcgatgggttacagcaagtcttctaacaagaaccccggcggccagagacgggctaagaaatccgaatatgcaatgcagatgaccgagaagcagaaggtcaaattcgtctatggcattctggaaaagcagttccggagctattacgaaaaggcagctcgcgccgagggcaacaccggtgagatcctgctgagcctgatcgagcgtcgtctggacaatgtcgtttatcgtctgggctttgcttctacccgtcgtgaagcgcgccagctggtgaaccatggccactacaccgtcaatggcaagcgggtcaacatcccgtcttacatggtcaaggtcggtgacgtgattgccgtgtgcgaaaagagcagctccaacaatcgcttcaagaagatgaaagaggataatgcgtttgtcgctgcccccaagtggctggaccgcgataccaacaacctgcaggggaaggtcatcgctctgcctgctagagacgatatcgactttgagatcgcagaacacctgatcgtcgaattgtactccaagtaatgcgtcaccctcgtttattggtaagctgaagaacaccaccgaagcttttgtttcgcatttgataaggagggtatttatttaaatggtagaaattgaaaagccgcgcattgaatgcattgattctcctgaggatgcctcctatggaagatatattgtggagcctttggaaagaggctacggcaccaccctgggcaactccctgcggcggatcctgctgtcctccctgcctggcactgccgcgacgtccatccggatcgccggtgtgcagcacgaattttccacgatccccggtgtgaaggaagatgtgacggaaatcgtcctgaacatcaaacggatcatcgcccggatgcactgcgatggggtaaagaccgtatacattgatgcggcgggagaatgtgaggtcacggccggtgatattaagtcggatggcgagatcgaaatcctgaatccggatcttcacatctgcacccttggcccggatgcgaccctcaatatggaaattaccatgagccatggccgtggctatgttccggcggaccgcaacaagaccccgaacatgcccatcggcacaattgcagtagattcgatttatacccccgtctacaaggtgaattatacggtggaaaacacccgtgtaggcaacatgacggactacgacaagctgacgcttgaggtttggacggactcgaccatctccgcgcgggatgccgtctcgctgggcgcaaagatccttgccgaccacctgacgctgttcactgacctgagcgagacggtcgcccagaagtcgaccgtggtcgaaaaggacgttcccaacaagaataaggtcctggagctgaccattgaggagcttgacctgtctgtcagaagcttcaactgcttgaagcgtgcgaacatcaacaatgttgaggatctgatctccaagagcggtgatgacatgatgaaggttcgtaatatgggcagaaagtcccttgaagaggtgcagaacaagctggcaatgatgggcctgtccttggccagcgatgattcgaccaacaacaataactaagatttaacctttcagaaggaggaatccgaaatgttcggaactcgtaaactcggcaagaagagtgaccagcgtaaagcgatgctccgccagctgacgaccgatctgctcgcctatggcaagatcgagacaaccttctacagagcgaaggaagtgcagcctgtcgttgagaagatgatcactctgggcaagaagcagggcctgacgaactaccgcagagcgctgtcctatctgaccaaagaggatgttgcaaagaagctgtttgacgaagttgcgcccaagtatgcagagcgcaacggtggctacacccgcgtgacccgcatcggaccccgccgcggtgatgcagctgaagttgcagtcatcgaactggtgtgatccatctgaaaaaccctgcagcaatcgctgcagggtttttcatgccctgcgggggacaagccagcgctgccggtcgaccggggcgcggcggaattttttcaaaatacagttgacaaacgttaactcccgtgctaaactgcaagtataacagctgttaactacgcgaggaggaagtgctatggatgcgataaaactatccgatggtgagtggaagctggtaaaggccctctggcggaagcagccgcagacgctggcggaattggtcgcagacctgcgcgacgagacaggctggagcaaatcgacgatttttatgatgctcaaacgtctgatcgccaaaggcgcggtggtgatggacggcagcgggaaataccaggagtatcgcgccgccattgcctacgaggatgtggcgccggaggagacggaatcgtttttggaaaaggtctatgacggcagcgttgggatgctggtctcgaacctggtcggccggggggtgctgtcggatgcggagatccgggagctgcgggcgatcctcgacgcagcagagggaaaggagacgccgccatgttgagacaaatgatctctgtttcgctgttgatcgtcgttgttctgttggttcggacggtgttccgaaaccaggtgccgaagcggctgctctatgccctgtggatcgttgtcctggtcaagctgcttttaccagggacactactctcgctgccggtcttaccggcccaatcccaggctgcgccgacgcagacagcgacggcagcccagacggaaacgcctgcaacgcagcagccgacgtcgacacagccgacgctgcagcagccgttgccgcagcttgcggcagcggccagagcgaatgccgccgcgtggaaccccacgctggtttttcagactgtctgggccgtcggcagcggcgcactgactgcttggatggcactgacctgggtcagcttcaatctgcggctgcggcggacgcggcggaagatggtccaatggggaagcgtcagtatttatgtttcgaccgcggcgaaagcgccgtgcctggcgggatttctcccggcggtctacctgacagaggacgccgcccggtccaaagagattgagctgatcgtgcagcatgagctgacgcatctgcggcatctggattttctctggtcggcctgcgggaccctggcggtcatcgccttttggtggaacccgctggtttggatcgctgccgtctgtgccaagcgggatgcggaattggcttgcgatgaggctgtcgcggcaaagctggatcccccggcacggctggtgtatgccaggacgatcttggcgcagctaccgtgtaaaaaccctggcctgagcctggctgggcggccggtgaaggcgcggatcctgtttttgacaaagaagcagcgcagcagcgccctgtgcatgatcctggccttggtcctcacggtctttgccactggctgctctgtgtctgagctgacgcggcgggagagcgagacggcggatgcaccgcagcaggcaagtctgctggcaaacagccaggaccagggaatgcaggagacgccggagatgccccagacgccagacacatcagacgccatctcccttccgacggatgttgccgcctgggccagcgccaacctgccggatacatttacggtactggcaagccagtcaatctcctgtgagcgtgcagactatctgctcctgcttgcgggcacgaagcagacgggggaaagcagctacactggctaccaagcctttgccctgcaggcgcaagacggcggttaccagctgtatgcctggagcgaagtgcagcgcggggcggatgacgcactgctggcctgtgcgatgaagacggacgatttcagcgcggtctacggcgttgtggcaggtgcgtatgacgcagttacggttttctgctcggacggcagccaggcgtcggcagcgatcgaatcggatgcgccattcctgcaggcattccccggcagagggaagacgatcgaagatgtcgcctttacagatggcagtcagacgatccgctggtcggagcacgcgggcgcaggcctgcagtctacatcggatgcggatgcttactccggcgacggcgtatgggaacgcgtccacagccgactggctgcggcaagctgggatgacgcttcttcggaggaggccatccagcaattccaactggcggacagcaaggtggccgatggcaccgtctcccagtggccacggtattatgccgcattcgtcacttattttgccaagatgcaggcggatctgcattatttggcgcccgacgcggtctggaccctgagcccgtcagaaggcgggcagacgatggcggtcaccatggtgtatggcgatgcatcgcagacgctggtctatagcctggacggtcaaatatcccccaaaaactaaatggaaaatgaaaatgcggccccttcctactcgcaggaaggggccgcattgcggtaaatccactattttttctccagccgctgcttcatataaagatgcgcgctgttttccagcgtgtcgtccaggggcgggagtgtcacgtcgccgtatttgtaggcgagggctgtctgcaggatatggtcgcagagggcggggtttttcggcagcaggcagccgtgggagtaggttgcgaagacattgttgaac

SEQ ID NO: 2997 - DNA, 28450 bp, Unknown
  16S sequences of unknown bacteria
aatgcttgcttgcaagggcatttttgcgaagccgtcaatatcgcgtccgtgcgaagcacggaaggggcgtaagccccgtgatgtttatcgttccgataaacagcctcgaagatattataacctaccgccggctttttgtcaatccgatcaaattcacggaaaggtattttcaatgaatcccaaatacgaaaaactcgccttcgccggagtcctcgtcgcactcggcatagttcttccgtttgccgtctcccacgggctcggaatcgccggaaccgtgcttcttccaatgcacataccggtgttcatctgcggtcttgtctgcggcggtgcgctcggcaccgcatgcggtttcatacttccgatactgagcagtctgctgacgggcatgcccgccgtatatcccatgatggtaataatgtcgtttgagctgatgacatacggcgcggtaagcggattcctctattcgaggacaaagctcggcaagattcgcttcggcgtgtaccccgcaatgatcgccgcaatgatctgcggcagagcagtttacgcgctcgtgttccggatcctgctttcgataagcggacagctgcgcgcgcttaccgcatggggtgcatttgtcaccggacttcccggaattaccgttcagcttcttctcattccgcccgcagcagtcgctcttcgccgttttgccgtccgcgaccgcggaagaaagaacgcgcttctctccgcactcaatctcatatcggaggacaccgcagcctgcgtggtaataaaaggcggcgtaattgtccgcaccgaatacggacgcgggatcgggccgatgatgaagctttacgaaagcggtattttaaaagatgcctttgtagtcgacaagatcgtcggcaaagccgccgccatgataatgacgctcggcggtgtcaagagctgctacggtatcacggtaagccgaagtgccgaaaaatggcttaaagagtccggcatccctctcgaatacgaaaatctcatcgattcgatccgcaaccgtaccggtgacggtatctgcccgatggagcagaccgtcgccgaaatcgaaaatgccgatgatgcgctctgcgcgctgaaagataaaataaaggaattaaacagcgccaaaaggaggattcaaaatgatttataagaatttcaagaacctgcttctcccatctctcggagtaggcacgatgcgtctgccaacactgccggacggcacggtggacgaggaagcctgtcgtgaaatgttctcatatgcgatggagcacggcgtaaactactttgacactgcatacggctaccacaacggaaaatccgaagaggtatgcggaaagctactcagcgcttatccgagagaaagctactatctcacaacgaagtttcccggatacgatctctcgaacatgaacaaggtcgaagagatattcgaagagcagctcaaaaaatgccgcacggactattttgacttctatcttttccacaatgtgtacgaaagaaacgtagacccctatctcgatccaaagtacggcattctcgaatacctgctcaatcagaaggaaaacggaagaatacgccatctcggattctcggttcacggctcatacgatatcgcaaaacgctttctcgacgcatacggcgagcacatggaattctgtcagatacagctcaattaccttgattggaatttccagaacgcaaaagccaaggtcgagcttatgaacgaacggaacattccgatctgggtaatggaaggacttcgcggcggtatgctcgcctccctatccgaggaaaacaccgcgaagctcaaggaaatgcgtcccgacgaaagcgtggtaggctgggcgttccgcttccttcagtcagtccccggagttactgtctccctctcgggaatgtcgaatctcgatcagctcaaggacaacatacggatattcagcgaggacaaagcgctgagtgaaagcgagatgaagtttatcacggaaatggcggatgagatggtgagaaagggcgtgcttccctgcaccgcctgccgctactgcacatcccactgtcccaagcatctcgatattccgcgtcttctcgagctttacaacgagcactcctttacgggcggaggatttatagcaccgatggcggttgacgcgctcgaccccgaccgccgccccaatgcctgcatcggatgccgcagctgcgaggcggtatgtcctcagcagatcaagatatccgaagcgatggcggacttttcgaaaatgctcggactcgcctgacaattcggaatatgtcccgccgtgccgaaagtaaaaaacgcggtacggatcgggaagcaagacgtcgtaacacaaacgcagcctttcgcatactataagggtaattaagtttgaaaggcttggtgcgttatgataggcttatacaaatacatagaatcccctttcggagaaaaaacatattttgccggagcgaattccggagtcgggtttgtcaatcttttcggagacttttacgaagaatcgtcgctcgaccgcctgtacataataaagggcggtcccggaacgggaaaaagtactttcatgcgcattctcgccgagcgtgccgccgatgcaggggcgggtgccgagtattttctgtgcggctccgatccctcttcgctcgatgccgtagtgctgagcggaggcggaaagcgtatcgcggtgatcgacggaacaagtccgcatgcctatgatgcgaaataccccggcgcagtttccgccgttctcgacttcggttcgttctgggacaaaggcattctcgagtcggagcgcggcagaataatttcgcttgcgaagaaaaaaagcggatgcttcgagcgctcttaccgttttctcgccgcgctttcggtcatgcgccgtgatcttcgctcggtcaccgcaagagcgatcgaccgaaaaaagcttgacgcattcgtgcaaaggtgcgtcgccgctcttccggaaagtgcggactaccgcagaagattcagaacacgcgaggctttcacaatgaagggtgcggtgtctctcggatttccggcaaaccataccttatggagcgtaagcggtcgtgaggacgcgcacggagaggtcatgtcggcgcttgccgaagcgctttcggcaggaaagcgatctcacacggtattccgcgacagcgttgataccgataaaatctcggctctgcacatagactgcgcggacatatacatcggctctttccccgaaagaccgcccgaagcgtcgagaaacataaacatatctcgttttcttctccccgacaggctcaaagattcgagaaacaagcggcgtttcaccgaaaaatgcgcgctgtctctcgcatcgggtgcggcggatgcgctgtccgaagcgggcacatatcattttgagcttgaggaaatctataagcgcgcaatggatttcggcagactcgccgaagcagaagaaaagctttaccgggagattaccgattttttccgataaagcagcacatcggattttatccgaaaggatgtggaaaaaatgataaaaatacttgattcgtccggaatgaaggcgtgtgacaattatacgataaacgcgctcgggatcccgtcgcgtgagcttatggagcgcgccgccgaagcctgtgtctccatgatctccgacggaagattcgacctcggtcacgtcactgcggtatgcggtacgggaaacaacggcggcgacggcatggcgatcgcgctgatgcttgcacggcgcggaataagcgtggatgtcgtcttttcgggaaataaggagagatgctctcccgaggctgcatttcgtctcggcgagctgatcgaaagcggaataaagatatcgccgcggtcggatttttccgattcgacactgatcattgacgctctcttcgggatcggactgtcgcggaatatcgacggagaatacgccgagattatcgacagcatgaaccgcagcggaaaaagcgttttcgccgtagacattccgtcgggaatttcgtcggacaccggagccgtgatgggatgcgcggtcagagccgatgagaccgccgcgatatcgaacatgaaacgaggtcatgtattttaccccgggtgcgaatacgcggggcgaataaccgtatgtgatatcggaatcccgtccggtgaagcaaaagatgcgatatatgcgctcggcgacggcgatcttgcgccgattcgcgcacgcgccgcgtactcgaacaagggaagcttcggcagagttcttatcgcgggcggaagcgtcggaatggcgggagcggcgtatctgtccgctcttgcggcgtaccgcagcggcgcggggctgtgtgacattctctcacccgaagaaaaccggataatccttcagacgctcctgcccgaggcggtgctgtcgctgtacggcgcaagcggtcccgaagaaacgcttaaaagcgctctcgaaaaagcgtcgtgtgtcgtcgtaggtccggggctcggtcaaggcgatacggcgaaacgtattgtaaaatatattttcgaaaacgcgcgtgtcccgatcatatgcgacgcggacgcgctgaacatcacggcatcgctcggactttgctatccttcaaatgttccggtgactgtcacgcctcatctcggcgagatggcgcgtctgaccgggatcgccattgacagaatcaagaaaagcctttgcgagagtgcgcagaattacgccgaagcacacggagttatatgtcttctcaaggatgcgcgcagcgtaatttccgacggcaaaacgacatttgtgaacacaagcgggacatccgcaatggcgaaaggcggttccggcgatgtgctgacgggagttattgccgcgctcaccgcatcaggggcagatccgcttcacgccgcagcatacggagcgtatctgcatggaaaagcgggagagcaagccgcagaagaaaaaggaatccacgcgctgctcgcgcgtgacatcgcaaacgcgatagcaagatagccggtcacatgctcttcggcgatgccgaacgaacatctccgccgtcaaagctgatccgacgacgcttccggagcgttccggattgcgtgcaggacgcggtctacacataaaaaacgggaagccgacggcttcccgtttttttgcggtattgctccgcagtccgttaagttaattcgcgccgaccgttaaacgatgccgcgcacttcggtatagtatctctttgaatgtgcgtcgcccatcgagaaggtctttcgcggaaggactccgtgctccgtaacatacgggaaaagctcatcctttgacattccgtcgaatataaatccgacgcagtccttctccgcggagagtacgcgcagtgagtccgtcccgtgaatatagtcgcactccgcaccggggtgcgcttctatataggaatcgatgaagttctgaagagtcccgactgtcagtgcatgagtcggcgctgcaaaagaaaattccttttcgcatccaccgtaaagtgcggtcaccttctgttctccgtcaccggagagcgcttcgagcgccgaaaggaaatcgggaacattgcagttcttcacaatgcggtagatcggctcgaattctattgaaggctcggagatgtccacgatctcgcaaagtgcgtatctcgccgcggggcagccggatgcacggacattctcccaatgcgcctttgccgcggcaagggagtggttgccgtcgccgaccgcatacacgacaggggatgttccgccgaacgagctttcgtactttgcgatcgatgccgcaacgaattcaagtacctcgccgctgacgagataacccgcaatatgcccgccgccgagcatgagatcgaaatcgtaaagctttttcatctcattcttgcgcgacgcaagcgaagaaatgatccctcccttatcatcggcgaaaaccataacatggggaagctcgaacggagaagaagcgcggatgcggcagcgcggcggaatgcgttcaagcacggtcgcctcggtcgcacggacgggagaaatcgacgacgcggagtaatcgtatttctcaagatcgagcttgccgacaagtccgcggcgcacacctgcgccttcaagagtacgctccacatagaccatgacgttttcatactttttcagaaaagtccccacggtatccattgatgcggcaatcgttttcttgtgaacctcttcggcttcgcttccgagatatgcctcgggcaaaatgagagaatacgccgagggcgctccctccgtgatctttgccacgctgtcccaatactgcttttcggatgtaaactgatcacacgcgatgacgctccatttgcaccacgcgggatcgtccggcgtataaggcggaagaagtatatccgccggtgaaaaaaatgtttccttcatctgttccccactgaattcttattataccgcaaagcaaaaaatgcttgtctgcggcattttcgcaaagctgtcaatacagccgcccgcacacagtgcgggcggcgcgtaccgcaaagttttatgcagtaaaaccgaaatccggtttcacgtcggagtttagcgcgccgcgcaaagtcggtcgcacattggaaaacggagcggcgctccgttttcgggaacatggtaagataacctacaaattaggctatacgttataccttgtcctattctcgcggacacggtaaattaacgtacagataccgattaacgttataccgtgttcaacctcggcttcacgtcggagtttggcgcatcgcgctaaactcgcggacacggtaaattaacgtacagataccgattaacgttataccgtgtcctgacgtcaatattgcagccgtgcgcagcacggggcggcgtaagccacggaattttatgcagtaaaaccaaaccccggtctcacgttggagtttagcgcgccgcgctaaactcgcggacacggtaagtaaactttcaattaccgatcaacgttataccgtgtctattataccatgaaacaaaacagcttgcaagaacattttacgaatccgcgttcggcacacggcaggcgtaatccaagcccgaaagcaaatactcatcgccgctttgagatatgatctcgcgctcgataatccggtttgccgattcgggacagccgagctgcatgtaacaccatttattcccgacgcaaagcggcagcaagccttccccgccttttacggtataatcacacaactcataaacatattcctcaacacaatccttgccgtctaccgaaagaaccgtgcgtacaagtcctatcccgggggcaaaataattcttttccgacgtgtccccgataacctgttcgccgtcgcgtttcgatcttccgtatgaaaatacatgacagacgtattccttcccgtctgcccggcagatcaccttttcatccggatggcggataagctcatactccccatactgacgtgcagatgcatcagcagtcaatgattcatcaatgataactttccgagaatggacgtcaaacggcaggctcacgaattcgggatattcggcatctcctttcagaatcgtggggcaaaaatacagcggctccgatttccccagccaggcaaagtcctgatgcatgagagatacaaaaatgctttccccgtttcggaaaacggtttctccgaaagcacagtaatggaggcaggcttcgttttcatgacattccatgtgatgaagcattttactcgttgccaaagcagcggcatattcctttgacgaattgtcgagatactccagcgcctgttcacagaaagcaatctgttcttttataccggcatatgcatgatgtgcaaggtcaagataaagttcgccgacctcccgacttgatccgagagaaaggaaataatcgataccgctttttacaaactccgttttgcgttcgaagtctttattctcgggataaaacggtattttcatatagatgcacttaacgcgctctttattaccgagagcctttgcttcggatatcatacggtcaagcacgtcaaaataatcctcacggtccggattaaaaggcggggaagaacggaaaagcaaataatcgatctgctcggctgtaagcgcaaggtcggcattttccataatgaagtcaatgatttcgttttcgccgtttcgtgaaggcggaaagctgtctttttcatcccggatcatccgatccaacataagggaacgcgcgtcaatgttgttgtttgtgttcattgcttcgtcctttcttttttcgctgcttaattttcgtcaagctgtaattttgcattttatggatcaaatcgcatgagcgctttgcagaaagacctgcgccttactgtcttttacttcattttaatcgtaatgggatctgtaatataagaggtatcagtctcaccgtcatccaataaaatttcaaatgacactactatatccgagtctgcatatttaataaagaaattctgttcttgaccataacgaggagaaaataaatcaagaacaacctttcctcccttaggtatcgtggagtgtccgggataaaacatttcggcaaggtcaagcgtctttccgtccacttcggcagaaatcggaaatacatcggcataatcggaattattgttctcaaagcagaatagcggtgccgactcacccaaacggtagataaaaaagcggaatccgtctttattataaatttccttttcttctatatccagatcattctcgtcatttatttggattcggagatttgcgttatctacaatgcactgcaaatgcattggggagagtcatcatcgcagcacagaactcactcgcatgaatctcacattttgcgaaaaaaccttccggatacggatagccgtgagccagatcaatcgaaacaataatttttgataccgcctcatgctttatgatatcctcaagaaaagactgaatgtcataaagccctgaacagttcatatccgctatgtgataattttcgtcatacagaatgtcactcagtatttggtttgcctcagaagaattttcggagtcggtaatttcaaacgggatataccccttttgcagatagtcgtccggcggatacttatattgaacgtcgggactgctgaaatggccgcagaggttgagccatattttgttttttacagcactttccttcaggtattccccgaaggctattgcttcgctgtttgaaaaccagtgtgccaagaaaacttgtcccgtgataatttggtctgccatgattacctccttatgaataaaacagcgcaaaaacgccctataaaggttagctttgcgctgtatgcctatattttaaatcttgacacaaaaagcatgtaaaagcaaatccgatatcactatttcgtcgacaagataaattatatatcatcacacaatctccgtgttatttatgttttatgtgtctttatgtttgtattttatcatgtcgttcatcatttgtcaatgtttttttcaagattgcgtcaaaattctgcttttgtgcacgatcatactatcaatcaaagacagccgttaatgaggcacggcgacgggtatattctgttcactctgtacagccggagatgatttcggagatattattttcagtcggagttcttcccgacaacctgataccaatttacacctatcgggtcgacaaaacaggaatcaaagtcctcgaaatctggatcaaataaatattgcggcagtttttttgaataaacgactgcgtagggtttatcgcaaagaaaagaaacctgatcctttgtaatacggatatcggtaaagcttatgcggttatccgaatgctgcgtgaatacattcttatatatggaatcaaagcaagccgcagtatccgccgcgtcaaaccgcgacggtattcgcgggtaaatcgcgcgccttcacttcagccgaagatgacgcgccgtaattccgaaagcaaaaagcgcaccgacatacatttttgtacgtcggtgcgccgtttttatgaaattgatctctctccgtttgccggatacgctccggtgcggtttacagtccgccgcttctccgtgcggatctgtccggggctttggtgaacggatatagcgtcatcggaatcacgcagaccttcgcggcgaaatcctcagcggaatctgagcatacgcactgcgttgagcactgcaagaaccatcacgccgacatccgcaaacacggcggcccacattccgcttattccgagtgcgctgagaataagaatgattgctttgaccgcaagggcaaaaactatgttctcccttactatcgacattgtcttgcgcgatattctcaccgcataggaaatatcggacggcttatcgttcatcagaacgatatccgccgcttcgcgcgcggcatcgcttccgagaccgcccattgcaattccgatatcggcacgcatgagcacgggagcgtcgtttatcccgtctccggcaaacgcgagcgttcctctctttttctcggaaagaagcctttcgacctcgctcaccttatcgcccggaagaagacccgcacggtactcatccacgccgaccgcggacgcaacagcggctgcggttttctccgtgtctccggtgagcatgaccgtcttgcgcacatgaagctttttgagttcgcttatcgcttcggcgctgtcgggctttatctcgtcggaaatcacgatatgccccatatactcgcttccgtcggcaatatggactaccgtgccggggtgatggcaatcacgccaatcggcgccgaccttatccatgagtttggaatttccgacatacacgatccgtccgtcgatctcggcttttatgccgagtccggcttcctcgcttatgcttccgatccgctcgggatcgatgtgctttccgtgagccttcactatggactccgcgatcgggtgagtcgaatggctctcggcagccgccgcgatatcgagaagctcgtcctcggagaggcgctccggatgtaccgcggaaacggtgaagttacccttggtgagagttcccgtcttatcgaatacgacggtatcggcggaggcaagcgcttcgagatatcccgcgcccttcacaaggattccctttcgcgacgcgcctccgatcgccgcgaagaatgaaagcggcacggatacgacaagtgcgcacgggcacgaaactacgagaaacgaaagcgcgcgtccgatccactcggagaagttgtgaccctcggtgaatatcggcggaataaatgcaaggcacagcgcggcactgacgaccacgggagtataccagcgcgcgaatttcgttatgaaattctccgcctttgccttcttctcggacgaattttcgacaagctcgagaatccgtgcgacggtgctttcggaatacacgctgctcacgcggatctttataactccgctcatattgatcgagccgctcacgaccttatccccggcgcgcttatcctgcgggagcgattctcctgtgagtgcggcgctgttcaccgcgctttcgccttcgacgacctctccgtcaagagggatcctgtctccgggacggcagacgatgatctctccgaccgcgacctcctcgggagaaacggtgatttcctcaccgtttcttacaacgcatgccgaatcgggacgtatatccataagggacgcgatagagcggcggcttttgccgacggcgatgctctggaacagttctccgatctgatagaacagcattaccgccaccgcttccggatattcggcaactccgaatgctccgaccgtggcgaccgccatcagaaagctctcgtcaaatgcctgaccgtgcgcgatattgcggatcgccgaccatacgacgtcgtatcctatcaccgcatacggcatcgcaaagatgagaagattcacataccatgcaaaatccgtatttgcctcggtgatccatgcggcgccgagaagcaccgccgatatgattatgcgtacaagcgttttcttctgttttcctgtcatggcttaattcctccccgccgccggcggtccgaaaatcaaatctttaatgccgtcccgtcagtctactataacgcggcagtcgggctcgacgcgctttatggtctttatcgcttttttgagaatttcgtcgaatgcttcgtcgtcagcctcgagagtcattttctgtgcaagaaaatttaccgatgcgaattttacgccgtcgatcttctttacggcttcttccatctttgcggcgcagtttgcgcagtcgagatcctcaagcatataggttttcttcattgttttgccctttctttatgtgaaaaaatttgacgtggttaggcgcgcttttcagggaaagcgcggcggagcgccggtgcaaatcagtcgtcctccgtgatgtgctcgtagccctgatcgattatcgaacggacgtgatcgtccgccaaagcgtatatcacggttttcccctccctgcgcgatgacacgagagagtttttcttcagcacgctgagctgatgggagatcgccgactgcgtcatattaagaagctcggcgatcgcacaaacgcacatttcggactcgaacagagcgtaaagtatcttaatccgcgtggtatcgccgaatatcttgaaaagatccgcaagatcggacagcagttcatccttcggcatttcgctcttcacttcaccgagcagcgcggtatgatcgtgtttcttgttcatgtgagcactccttcatatgagtttgtattcatatgatacactgttcatatgtttttgtcaataggaaaacggaaatttccaaaaattttttacggcggatattcgcacggcaggcggtatacagttacggaaaaatcccgcagtcacgggcgaaaatttccgtgcaggcggcagaaaagcggcaaaattaaagtccgcgtcaaaaatatcgtattttttcgaaaaatatgcgttatgcctattgacaaacgaataaaaatgcattaggatataaatatattgcaaaaacaaacgtttttgcacatctgacgttcgttgaaaccatcgggataaccggtggcggaggacactctggagaattcattcagttgaatgccgaaggtgcaaggcgcaagccgaatctctcaggcaaacagacagagcagatcgattttataccgattgtgtctgtgttttgttttttcctcactgtccgacaagcgtcgggcagttattttttcggaggaatcataaaatgcagacaattcaagacgcactcctgcccatagtgcaaacagtcaatgcctatctttcggattatattctcataatcctcctcataggcacgggaatctttttctccgtccgcacgcgcttcgttcaggtacgctgcttcggcgaaagcatgaaaaaaacattcggcaacataagtcttaacggcggaaagcagaagagcggcctttcgtcatttcaggctctcacaacggcgatcgccgctcaggtaggtacgggaaatatcgtcggtgcctgcggcgcgatcctcatcggcggccccggtgcgatattctggatgtggatcatcgcattcttcggcatggcgacgatttacgccgaggcggtacttgctcagaaaacaaggatcgttcatgaggacggctcgatctccggcggtcccgtttattacatacacacagcgttcaaaggcaaattcggaaaattccttgcggtgttcttcgccgtggcgatcacgcttgcactcggcttcatgggtacgatggtgcagtcgaactcgatcagcgaagtctgcaacaccgcattcggcatccccggatgggcgatcggcatcgttctctgcaccgtcgcgttcttcatctttataggcggaatacagcgcataggctccgtcaccgaaaagatcgttcccttcatggcagtgctctacatcatcggcggcattgcagttctctgcatccgcgcaaagtacatccccgagacgttcggtctcatcttcaagtatgcgttcaactcgaccgcgatcgtcggcggcagcctcggatatgcgcttaaaaccgcaatcagtcagggtgtaaaacgcggacttttctcaaacgaagcgggaatgggctcgacgcctcatgcgcacgctctcgcaaacgtcaaggatccccacgatcagggtgtagtcgcaatggcgggtgtattcatcgacacctttatcgtgctcacgatgacggcgcttgtcgttatatcgacgcttttcaccgaaggcggaatacttcacggtcaggtgctcagcgccgagaatctcacgtctctcggagtttcaaagacgaacaccgcgcagcttgctttcggctccgcattcggaaactcgtcattcggaaacatcttcgtagcgatctgccttttcttcttcgcgttttccacaattctcggatggaatctgttcggaaggatcaacgtaaattaccttttcggtaagaagtcgaacctcgtttactcgatcattgcgattgtgttcatcttcctcggctctgtcctctcaaacgacctcgtatgggagctgaccgacatgttcaacaacctcatggtaatccccaacgtgctcgcgctcgtcgtgctttcaaagctcgtcgtctccgcctgcaagcttaagaagaaaaacgataccgaaaaataaagaaatctcccccggcgatgtccggaatttccgaaattcgggcagtatccgtgggagtagttttctgaattttgacgtgatatgttcacggagagaaaaagccctttgacgccgtgccaattccgatttcggcaggtacggtatgcaaagggcttatttttcgcgcgaggatttatccctcgaggatatccgctatgcggcggcaggcaaagccgtcaccgtagggatttgatgcatgagccattttatcgtatgcgctcttatcctcaagaagaagtttaaagttttcgtagatcacgtcctcgtcggtgccgacaagcttgagagtgcccgcggcgattccctcggggcgctccgtcgtatcgcgcataacgagcacgggctttccgagcgaaggagcttcctcctgtattcctccggaatccgtgaggatcatatagcttctcgcaaggaagttgtggaaatcaagcacgtcgagcggctcgattatgcggatgcgctcgtctccgccgagctcgctctcggcgaccttacgcaccgcgggattcatatgtatcggatagatagccttcacgtcgggatgctcgtctattatgcggcgtatggctcggaacatatgcaccatcggctctccgaggttttcgcgtctgtgcgcggttatcatgatgaggcggctgccatttgcccattcaagctccggatgtgtgtaatcgtcgcgcaccgtggttttcagtgcgtcgatcgctgtatttcccgtgacgtagaccgaagcgctgtcctttccctcgcggagaaggttgtcccgcgaaagctccgtcggcgcgaaattgtatttggcgattataccgaccgcctgtctgttgaattcctcgggatacggggagtatatattgtatgtgcggagtccggcttcgacgtgaccgacggggatctgcagatagaagcacgcaagcgccgtcacaaacgtcgtcgaagtatcgccgtggacaagcacgacatccggcttttcgctctcaagcaccgccttgattttttcgagtattccggtagtgatatcgaaaagcgtctgtccgctcttcatgatcgaaagatcgtgatccggcgttacggagaacgcgcgaagcaccgcgtcgagcatttccctgtgctgtcccgtcacgcacacaaccgtatttatgtttttcctcgttttgagctcgttcacgagcggacacatttttatcgcttccggacgggttccgaaaacaagcattacttttttcatcggtatctccgttttacttttttgttatgaattttttcgcatcctcgtagtgcttcttcagcttctccgcggtgatcttgtacttaccgttcgagagattcgggaaagctttcagaatacgtctttgagacgcattgcttctgacgatggtctttttgtatttctcgcgcagcttttcaagctccgcgcgtttttcgtttatctgagcctcggcgcgttcctttatatcggaattcttctgagcggcacgaagcgtcgtgtcggaaagtcccgatcctattgtatccgagactcggcgcagagcctcctcgatctcctccattgcacgaagctttccgggaagtctaagcagtgcgaacaatgttatcgtaaggtcggagacaagagcggcaaagaatacggaaagaaggatcacaccgacaattctcggtatcttcatcacaagtgcgaaaagcgtcggatgaacgagctttacgacaaatacgcaggcaagtccccagaggagagaaaacttcagacagacatatcccttgatgttgaacggtatgtccgtataatcccaccacttttgatgaaggaagcgttcgagcgcccagcccgccgcgaattcaagcgccgatgtgagcagcaccgatccgatgaaaagtacgaaaatgttgtccttaatcggattcagaacacacaccacgataagcacgccgaacccgtatatcgggcagaccggacctgcaaggaacccgcgattcacgaatttgccgtcgcacagtgcggcaaaaatcacctcgcagcaccatccgacaaacgcatacattatgaatatccatgcaacaccgtaaaaatcgttaggcatatttacctccccgcgaaagtgtcttatccgttaaaacgaaatcacgccgagatgctcgagaagtatctttatccccataaggatgaggatcacaccgccggagatctcggcaccttttttatacctcgagccgaatatgttgccgacaaaaagccctacgcaggaaagcgcgaaggttatcgttccgataaatccgactgcgggaaggatcgaaacatcgaggaaggcaaacgtaactccgacggcaagcgcgtcgatgctcgttgcgacagcaagcgttatcatcgtcttgaaatcgaacgacgagctttccttttcctccttgccgaacgcctcacgaagcatatttatgcctatgataaggagaagtccgaaggctatccaatggtcgaaattcgttatgaggtgctggaaacggcttccgagaaaatagccgataagcggcataatcgcctgaaaaacgccgaagtaaagtcccacgcaaagagcgtgctgccatttgacacggcttaccgaaagccctttacagacagacaccgcaaaagcgtccatcgaaagtccgacggcaataagaaagagttcggaaagtcccatatgatttctccgtaccgcacaaggcggtatatctgtaatcggtttttcaaaggcaagcatgcgcattagcgccgcttgccccgatattttgttcttctgtcggcagagccgacaccgttttacgaaaatcgtaaataccgacccgcgccgaacgcgatacggtcagtgtgaggctccgaacggcatcagtagatcactctctgctgagaacgctgacgtgatatatttatcgcaccttccgggatatccggcattacttcgagactgcgtcccgttccgatcgcaacacatgacaccgctttatccgcgacacgcgtctttacgccggtcacatttgcaataagatggttaagtccgtagagaaggcttccgccgcccgtcatgactatgccgttctcaagtatgtctccgataagctccggcggtgttctctcgataactgagcaaatcgcctctactatctgcgtgatcggctcctcaagagcctcgggcatctcaagcgagcttacacgcacaaggcgcggaagtccctgtatagcgcatcttcccttcacctcaacccagcacggttcttcacgctcccataccgaaccgacctttatctttatcgcctcggcagtgcgctctccgatatggacgttatgatgctttctgacatatcttattattgcctcgtcgaatttatccccggcaacctttatcgattccgacacaacgactccgttcagcgatataaccgcgatatccgtggtgcctcctccgatatcgacgatcatatgaccgttcggcatcgaaacatctatgcccgcaccgatcgccgccgcaacaggctcttcgatgaggtacgtctttttcgcgcccgcctgcgtcgcggcatcgacaacggcgcgctcctcgacctccgttatccccgaaggtacacagataataacgcgcggcttgaaaagcacggttccgcacgcgcgccttatgaaatactgtatcattctgagagtgacctgatactggcttataacaccgtcccggagaggtcttacagcgattatattgctcggagtccgtccgagcatctgctgtgcttcccttccgaccttcagtatcctgtcagtgtttttatctattgcaaccacggacggctcccgcaaaacgatgcctttgcctttcacataaacaagcaccgacgctgttccgaggtcgattcctatgtccttgctcatctcgcctccgtaaaaatcattcacctgcctcatttgtgcggcagacacacaaactcataataaattatacaccaatttgcgcgccaatgcaacatttttgtaaaaatccgcccaaaaacatcatatatatttttattttgccggataaagaattatttcaaacttcgtatcgggcaagattgacttttcagtcctgatatgatagaatgtaagataatctgtataaaaatcgaaaaggaaagcctcagaaatgaaagaaaaattaaaagccgggataatcggcgcaacgggaatggtcggacagcgcttcataactcttcttgaaaaccatccgtattttaccgtaagcgctcttgcagcgtcctcgcgcagcgccggaaaaaaatactccgaggcggtcggggaccgttggaaaatgtcctcgccgattcccgcacatatcgccgacacggttatcaccgatgccgccgatattgattctatggctgagaagtgcgatttcgttttctgcgcggtgaatatgaaccgcgaggagatcgtcgcacttgaggaagcgtacgcgaaagcagagctccccgtaatatcaaacaattcggcaaaccgctggacgagcgatgttcccatggtgatcccggagatcaacgacgcgcacctctccgttatcgagggacagcgccgccgtctcggcacgcgccgcggattcattgcagtaaagcccaactgctcgatccagagctatgtgccgatgctgactccactgctcaaatacggtatccgcgaagtcgtcgcaactacctatcaggcaatctccggagcagggaagaatttcgccgagtggcccgaaatggttgacaacgtgatcccgttcatctcgggtgaagaagaaaaaagcgagcgcgagccgcttcgcatatggggtaaagtccagggcggagttatcgtccccgcgacagctccggtcgtcaccacgcagtgcattcgcgttcccgtgaccgacggacacaccgcagccgttttcgtgaatttcgagaacaagcctcccaaggaagccattctcgaggattggcgttccttcaagggactgcctcagcttctcggacttccgtcagctcccgagcagttcatcacttattttgatgacaatgcgcgtccccagatcaagctcgaccgcgatatctacggcggaatgggcgtcacctgcggacgtctgcgcgaggattcgctcttcgactacaaatttgtcggcatgtcgcacaacacccttcgcggcgccgccggcggagcagttctcattgcagagcttctctaccgtcagggttatatggactgaccgctttaaaacatcagccgccttcaggcggctttttccttgctatccgctttgtgaagaccacggcggccgtcgaaggtcatttcagtcgaatttgttcatatttctttcggcatgctttgaataaattgtaaaatcaccgtatcgtgcggatatttttttgcgttttctatatacatatcacaatttgtgtgttataataatatcgtagacgaaggtcgttgaccccgagtcaatgatccgagtgaatctgaaaaaggcggtatgattatgaacatctcgatcatcggacgacaaatgaatgttgacaccgacctcaaagcgcgcgtcgaaaagaagcttgcaaaattcgataaattctttcccgacggtgcagatgcgttcgtcaccttcagccgcatacgcgaaaacgaatgccttgaaatcacgatctcatacaagggaactctgttccgcagcgaagaaaaggattcgacgtttatatgcgcgctcgacgaatgtgtcgaaaacatcgaacgtcagataagaaagaacaaaacacgcattgagcgccgtctcaaggatgccacgctcaatatacccgctccttcggacggaggcgagcctatagaggaggaaggcgagttcaccatccgcacgaagtcattcagtctcaagccgatgtctccggaggaagctattcttcaaatgaaccttctcggacattcgttcttcgtattcacggacagcgaaaccgaggaaacctgcgtggtttaccgcaggcacgacggaaattacggaatgatcgttccggcaaaggattaatcgatatcggggctgccgcaagacggcagccccgttttttgtttatccttcatcctctgctttgccatcgtcctttttttctgcagagggtgaaaagcttctcataagataaagcacgaccggagcgaatatcagaccgcacagtccgaaaagctccattccgcaatacaccgcgatcagagcaagaagcggatgtatcccgagagccgtgccgataatatgaggctcggaaaactgtcggataaccgacatgatcccgaaaagtatgagaagtcctacgcccgtgcgcacgtctcccgagataagtccgatcagcccccacgggatcagcaccgtaccgacgccgagcaccggcaaaaggtcaataaatgcaactacaagcgcaagtatcagcgaatactttattccgatcacggtaaatccgaggtaaagctgtgcaaagacgaaaagcatcatgacgaggtatgtcttgaaatatttccggagcgcatccgttatgcggtccttccacaaaaccagccttccgcacatcctctccggaatgatctctctgagcgatctgagaaaatccccgcggtcaagcgtgaaataaaaaaccgccgtgagcgaaacgaaaaacgccacgaccgcagacgggagcgcggcagccgccgatgcggcgatatcggtgacaagcgagcttgcctttaccgttgcgtttttcacgatctcgcttaccacggaatagaccctttccgcctccgcctcatcaaatcccatgcgcggaaaacgctctctgagattcacgaaaaattctatcgttgtgcgcagcgggttatcctcgtttccgagggttgacgaaaggtatgcgaaaagtgagcatatctgcttgacaagagccgaaaaaagcgcatatatcccccatccggcaaggcaggtgaaaacgcaaaggataaggaacgtaagcgttttgtcaagcttcggagaaaaccgtgacattgcgcggcgtatcggcgcaaacgcctttgaaataagatacgcaagcagaaaaggcagcgccggcggcagaagataccgcagcgcaagataagcggcaagcgcgccgagcgcagcagccgccatggaatacacagtccgtctgagattttcattatccatgtccgcctccgtctgtccgggatcatgccgggcgcagtatccgaaaaatgccgccggggattattatgtgccaaagtctgcgggtgaaaaatccgatctccgaccgttcgccaaagcgccgcccgcgcttcgtcgggcacttcacgagccccgcccgatgtttttcatataattatatgtaaactccgccgtcaataatcgcaaatgggaaaaaaacattgacacggaacacaatttttgatagaatatagattgaaattatttttatctgaaaggattctcccgatgaaaaaacttctgtccgcaattctctgcatttcgcttatatgtatcggatgtgctgcatgctccgacaaaaagaaagatgatgaagctacgggagatatgggcaaaaccgtaatggtagaaatggaaatacaggatttcggaaccgtaaagcttgagctttatcccgatattgctccgataaccgtcgcaaactttgtaaagcttgcaggcgaaggcttttacgacggtctcaccttccatcgcatttaccccggattcatgattcagggcggcgacccgaagggcaacggcaccggcggctcgagcgagacgatcaagggtgaattcagcgcaaacggagttgacaacaccctttctcacaagcgcggtgttatctcgatggcacgcagccagagctacgattccgcaagctcgcagttcttcatcatgcacgcggactccccgttccttgacggtcagtacgccgcattcggcaaggtaaccgacggaatggatgtgatcgacgcggtagcggctgtcgagtgcagctacagtgcaaccgacggcaaaaatacaactcccgtcaatccccccgtaatcaagactgtacgcgtaatcgaaggctgagcgcctgttcatccgtaaccgaaaagccgaacaggagtttgcacctgttcggcttctttactatgtgcggtttcttcaccgtatgcgtttttttctgtattcgctcccgctttatcggcgcggcacttccgtcggcttcgtgcagacggcggcatacgccgatgagaaagtcggacagcagccgaccgcgaagcggcatacggcttcaacgccgacttttcggtgcgccgcaatcaaaaaaagaaaggacgcttccgctccgcggaggctgattcgcaaatggaaaaatatcttgaatgtgcgaaaatcgtcggaacccacggagttcacggcgcggtacggctttcgtcaatgtgtgattctccggaggttcttgcgtctctcaagcgcatgtactaccgccgcggcggtgtgctcgaagaactttgcgtaaagtccgcattcgttcacaaatcaatggtggtcgcgtcgtttgacggtgtggattccctcgacggcgccatagcgatgcgcgatctcgtgctctacgccgaccgcgacgacatcccgaggcacgacggagatttcttcatctccgatcttatcgggctgagcgtgaaggacgcggaaagcggcgaggtctacggaactctttccgatgtgatctcacccgccggacgtgatatttacgtcgtaaagaagccgtccggcggagaattcatgatcccctgcgtcggcgaattcgtaaagcggatttctcccgaggaggatcacgcgattttcgtaaagcttatcgagggaatgacggactgatccgccgccgaagaaagggctcttcagaatgagaatggatataatgacgctgttcccgcagcttgtagacaccgtgctgtcggaaagcataatcggcagggcgcgcaccgcgggaatcctcgatatacggtgccacgacatacgcgactactccggaaaccgtcaccgccgtgttgacgacactccttacggaggcgggcgcggcatgcttatggcggctccgccgatttacggatgctacacggcggcgaccgccgatcttcgtaaaggcgagcgcgtacataccgtatacatgtcgccgcgcggcactcttttcgatcaggaatgcgccaagcgctttgcctcctacgaccgtcttgtgatcctctgcggtcactatgagggtgtagacgaacggatcatcgaagagatcgtggacgaagagatctcaatcggcgattttgtcctcaccggaggcgagattcccgcctgcatcgtcgccgatgccgtgggacgcctgatagacggggttctcccggctgcggaatgtcacgaaaacgagagcttcgaggacggacttctcgaatatccgcagtacacgagaccgcccgtattcatggggcgcaaggttccggaggtgctgatctccggtcaccacgcgaacatcgaaaagtggcggcgagaaaaatccgaagagatcacgaaggcgcggcgccccgatcttccgcatcggaaagacgaacaatagccttcacagctccccgagataggcgagtatcccgtttgcgataccgtcggcaaaaagccacggccgcgtatccataaggtaagcgtccgacgggtttgttatgaatcccatttcgacaagcaccgcgggcatctgagtccttctcagaacgtaaagcgacggacgcgcggtcgttccgcggtttctcagtccggtcgatgcgttgagctgctcgaggatgttctcggaaagaaccgcagccctcgttccgagcgcgtacacaagcccttccgagccgctcgcgctctcgatctccgaagcgttcgtgtggaggctgataaaataatccgctccccatgagtttgcgtcgttgacccttgcggcaagagacgaagcatttgacgtgccgagggatattgtcggaagcgggcgcgagagcctcgtttcgatccccgccgcctgcagatcctccgcaagctcgacaccgaccttatatgtgatgtcctgctccctgagtccgtttccctccgcaccggcattcggatttctcgggttatgaccctgatctatgtatattttcataagacacctccgtttctctataagtatatgccgtaggcggaaattttccactgcacaatccctcacgtttgttacgaggtagatccatgaaagaaatgcaaaagcttctcagccgtgtgcgctcatgcgtagacagatactccatgatagaggacggagaccgaatcgccgtcggcgtgtccggcggaaaggattctctcgcactcctctgcgttctgtccgagctgagaaaattctatcctgaaaaatacgatctttgcgcgctcatgctcgacatgggatttgatgcatccgaaaccgtcggcgccgcgccgtcggacacctccgagatcgccgagctgtgctcgcgtctcggggtggagtttcacgtcaagcgcacggagatcgcccgtgtgatcttcgatgtgagaaaggaatcgaacccgtgttcgctgtgcgcgcgcatgaggcgcggatcgcttcacgatctcgcaaaggaatacggggtgaacaagcttgcactcggtcatcattttgacgatgccgccgaaacggtcatgctcaatcttttctttgaagcgaggatcggatgcttctccccggtaacatacctttcaaggaaggacctcacgatgatacgcccgcttcttctcaccgaagagcgcgacataaaaacctttgtaaaaaaggcatctcttccggtcatgaaaagcccctgccccatggacaagacctccgagcgcgcgaaaatgaaggatatgcttcatgccttcgaccgtgagcaccgcgggctttacacacgaatcgtcggcgctgtcgagcgcggcggaatcgacggctggcatgaataaaaaaggagaaatctcctttttgtccgaaaaatcgcgccccgaaagcagctgctttcggggcgcgattttattataaaccgaaaggaatcactgtaaagtccgtctgcggcttgatcgcgggaagtgcggtgccggacggtgcttaccgatttacgccgagctggctcttaagctcggaaagcggcatcggctcggtcatatcggtgaacggaccgtacccgtcctgaccgggggtgtaatacataaacggatacgccgtttcgttctcgtccaaaaagattttaccctgataacttccacagacgcttctgtcaccttcatatacgccggtaaggaacagaacaacacgcatatccttgcggagaatcggttctccgccgatcgaatagtcatggtcctcataacgccaaccggtttcgtaaacgctcacgctgtctccgactgccgcgtcacccttccagacttcctcaactgtcaccaccgaacgtgtattctgaagtccgctcggctcgctgagccactgctcatcgtcccggacgacacgggcgacaataaccagctcggctttctgcatcatttcggcaaccgaagaggacatccgctcggggatcatctccgcgagtgatttgtttgtcttatcgttcttcccggggaaatacagctttttctgttcggattctgagttctgaagttcgttaccggctgtcagcgtctgcttgggctcggcagactcggttttatcggttgtgtttccggactgcgagcatgaagatgcgctcagagccacgcttgcgatcaaagcaaatgagatgaataattttgtgaatttcatattaacctccaaatttaaccatatattgcgcgagcgcctgcaatatcatcatctgtcggaactattgcggttcttgcaacaaatccctgatacataagtactcccttatctgactgattatgagcaagaccaatagcatgacctgtctcatgtccagcaatacttctcatttttgaagcattattttccggaacacaggctgtattgaagctgatgcttgcatgaacccaatttgaatatctgtaacttccgttgtcaagcatattttttccgtttgcatcaagcagtcttgtttcgccagcccatgattcattcggtctcgtttctccccagaagcaaatcgtagttcccgcagatgaatttactcttctaaagtaaaaatcaacaccgctgccgttgtcgttcggattaagcgcccaattccaatcctcaattgcagcattgaatgcattaatatacttgtatgaactgcatcctatatagtatgtacggttgtaaattcctcctgcgagttttccgctgcctaaaagattatacgcactggacggtaaaacggaaaacgaaacaacaagtgctgcgacaatttctaaagataatagctttttcatctttcccatataaccgctccttaacatctgtaatttttcactgtttctttttctgtactcaagccatagagcagtcatcaaaccaacggaatcgccgtcaatgatctgtctgcacccgatcgcttgcagcgtccggcggatgattaccgatttacgccgagcagattcctaagctcggaaagcgccatcggctgaggcatatcggtgaacggaccatatccctcctgaccgacagtgtaataggagaacggataagccgtttcgttctcatccaaaaagattttgccctgatagcatccgcgtacgccgcggtctccgtcatgctcttcatcaaggaaaagaatgacatgcatatccttgcggagaatcggctcgcctccgattgaaaaatcgtagccatcataacgccaaccggtttcataaatgctcacgctgtctccgaccgaaacattgcccttccatacttcctcaaccgtcacgaccgagcgcgtgttttcaagcttgctcggttcactgagccactgctcatcgtcgcggatgacacgggcgacaatgactatatcggatttctgcatcatttcggcaaccgaagatgacatctgttccggaatcatttctgcgagcgctttattggttttgtcatttttttcggggaaataaagtttttcctgcttttccccggaattctgctgttcgagagttacagattccgtctgtttaggctcggcagaatcggtttcgctctgcacctttccggactgcgcgcacgaagatgcactcaaagccacacttgctatcaaagcaaacgaaatgaataattttgtgaatttcatattaacctccgattttaattgtatccggcgcgtaccgaccgtttacggaggcgcgctttgtgtatcgatcgcatcactcacgcatcgccccgcagtgcggtcgcacagccgagatttattttccgtgcatgtctttcatatttttaagaagattccgcccgcgcgccgatgtgctcacatcacggcgtttccgctgttcttccgcgcaggatgtattaactacagaaccatcgcaatctcccccttcgtctccgaattttcccgaaaggcaggcgctgcgcgctctccccgagcgcccgtccggcaaggctgaaccgaagatcagcgccgtacctccgaccgatcggacgtatgtgcatggcgcatcgcgtctgcttaaaatcatttttttgatttgattatttatactttacgagttaattataatatactttattgcttgatgtgtgaacgatttgtaaatattaaggatatttattgttcagcgtgaaaaatcacgaaaaaacgcgatccggtacaaaaagcggttcagatggcgcgcgaaaaggcgaacggaaaacaatgccgccgcgcg

SEQ ID NO: 2998 - DNA, 32759 bp, Unknown
  16S sequences of unknown bacteria
ccggcgagccgtggcacctgtcgtgccacggcggtaaaaccccggccagctcgcatatcccacgagcaccctgcgcggcatagccgcgcagagatgggtgcagggctttagccctgcctgcggtagtcggggaggagcttgggggagacggcagcggtgtcgatgcccgcgtcggcgcattccttttcgaaagcggcgatgtgagcaagggtcagcttgccgacggtgacttccttggcgtgggcggcggcgttctgaccggcgctgcggccaaagacgatgatgtccagaagggagttgcccatcagacggttccgaccgtggatgccgccgacggcctcgcccgccacgtagaggttctccacgttggtggtcatgccgttgacgttgatgtccagaccgccgttctggtagtgcagggtcgggtagaccagaatgggctccttgcggatgtcgatgccgtactgggcaaacatacgcatcatggcgggaatgcgggcctcgatggtgccttcgccgccgatcatttcgatcatgggggtgtccagccagacggcttcgccgctgccggtgtccacaccctcgtgccggtcagagcactcgcggatgatggaagcggcggccacgtcgcgggtctccagcggatgcatgaagaccttgccgtcccggttgaccagcttcgcgcccagagaacggactttctccgtcaccagcgcgccgaaaatctgctgggggaaggccgcgccggtgggatgatactgcagggtgtcggcatagagcagcttcgcgcccacgcggtagcccagcaccagaccgtcggcggtagcgccgtagtggttggaggtggggaagccctgatagtgcatccggcccgcgccgccggtggcgatgatgacggtcttggcccgagccaccatcagttctttggtttccatgttcatcaggacggcgccggcagcacggccgttttcgtccaggatcagttcaatcgcagcggtgaagtccaccaccgggatgccacggttcagcacctcgtcccgcagggtgcgcatgatctccgcgccggaatagtccttcgccgcgtgcatacgcttgcgggaggtgccgccgccgtgggtggtgatcatggtgccgtcgggggccttgtcaaactccacacccagctcgttcagccactgaatggcctcgggcgcgtcgcacaccagcttggacagcagttcccgcttggcggcaaagtgtccgccgccgaaagcgtccaggaagtgaatggcaggggaatcgttgggcttgtccgccgcctgaatgccgccctcggccatcatggtgttggcgtcgccgatgcgcagcttggtgacgatcataacgttcgcgcccgcgttgttggcctcgatggccgcggaagcgcccgcgccgccgccgccgatgatcagcacgtccacatcgtagcgcacgtcattcagatccacgtcgtcagcggaaatgcggctgtgagactgcagcagctcgcacagctcgtgcggcacgctctcgcccttgttgggacccaccttcagggtggcaaactcgctctttttgtagtccggatggtaggcggccagcaggtcgtccttctcctgggcggtcatgcgggcgggctcataggccacgttggccgcgcgggccgcttccacagccttcagggatccttgaaactgttcggaatacatgcggctccctccttacttttcaatctcgcggtggttgtacagctctttgagttcttccaccggcttgcccatgagggcttcgatcagctcggtgaaatcgccgttcttgatctcctgcacccggtcctccagatgctggctcttgggggccagatacttgccgttcaggcggcgggccagcatggcgacctggggatgggagataccggcggggcagcgggaggagcacacgccgcacatcacgcagtcgaagctttcctcggcgcacttgtcaaattcgccgcgctgggcgtaggcgatgtactgcatgacgttcagcttctgggtgcagctcttggtgcaggcgttgcagcccacgcaggcgtaaatttcggggtagagctgcatcatgatctgctgggtgggcttgatcttctcgatgtcgtagacctgcttcaccagcgggaagaagggcagcgtcgccacgtacatattgtcttccaccttggtctggcaggccagacaggtcttcagctcccggtcgcccttgatgcggtagatggtggcgcaggcgccgcagaagccgttgcggcagccgcagccgcgcaccagctggtagcccgcgtattccatcgcccgcatgatggtcaggtcgtccggaacctgatactgcttgccaaacaggaaaatattgaccatgtttgccatgttcttgatctccttctcaatactcgttgggcagctcgtccagctggtcgcagcggaacacggggccgtccttgcagacgtacttcgcgcccacgttgcagcggccgcatttgccgatgccgcacttcatgcgcagctccagggtggtgtagacctgcgtcttgtcaaagcccagctcgatcaggcccgcaagggtgaacttgatcatgatgggcgggccgcagaggatggccaccttgttggtgtcgaagcccagctccttgacgtagttgggaacgaagcccacatgaccgttccactcgggctgctcccggtcgatggtcaggtggacttccacccccgcgtccttttcccactcgttgatgatttcctgatagtccaccagatcctgcatgctgcgggagccgtatacgatgtcgatcttgccgtagcggtcccggtagtggcggcagtagttgatgacggagcgcaggggcgcaaggccgatgccgccggcgatgaagagcatatccttgcccacgaactcggtatccacggggaagggatggccgtagggcccccggatggtgatttcctgccccacctccatgctgtggagccattcggtgacgcagccgcatttcttgatggaaaactccatgtactcctcgttggtgggggaggaggtgatggagaacatggcctcgcctacgccggggatggacagcatggcgcactggccgggcttgtgctcgaaggcctttttgccgtcgggggtgaccacccggaaggttttcacgtcgggcgtgtcgatgcgaatatcggtcacaacgccgattgtcggcatgagcggttcccggttatccattctgtttgcctcctcccagctttttcatcactttgacgatgttcatctgaatggggcaacggttcatgcagcggccgcagccaacgcaggagaacaggccgtcgttgttggtggggtagtacaccagcttgtgcataaagcgctggcggaaccgctccatctgggtcaggcggggctgaccggcggacattttggtaaaatcggagtacatgcagctgtcccagcagcggaagcgcttcacgccatggccggtgttgaaatcccggatgtcgtagcactggcaggtggggcagatgaatgtgcaggtgccgcagcccagacaggactcggacagctccttccactcgggagcgttgaagaactcgctggtcttgtccttgccgaaggcgtcgggccggagattggccagcggcagcctggccatgcgctccttgatgagggccttctgcgcttccacgggcttttcgtccgcgtcctcggtgacggaagcgagggtctccagcagcttttcgcccttttcggtcacggcctgcagatagagcgcgtcttccgccttgtaggcgttcacatcgccgtcggcgttggccgggtcgatgtcgaaggtgctgcagaagcaggtctccaccgggcgggtgcaggctacggtgacgatggtgccgtgcttccggcggttctggtagtaggtatctaccggctcggccaggaacacgttgtccagcacgcggaaggcccgggcgtcgcaggcccgcacgccgaagactacgaagtcctcggtctccctgcgggtgtcgatcagctcgatcttcttatcctgcattttgaaatccatcaggttttcggtctgggggaagaagaaatccttggcggagcggacggtgttcagcgcgtccgaccacttggttccctcggcccattccttgtattccgcgcctgcggcggtatccaccggcaggtacaggcgctcgctgtgcgcaatggcggagaagaattcgtccagcttggcaagactgaccttacgcaccttactcatggtgattccccctttccacggcttcggagggttccagatcgccctgagtgtagttgaccagcggggcgcggctgcccacttcctcaccggcctgatagtcgccgtagaacgcgtcgatatccttgatgaacttgcggttcagcaggtgcagcggaatgtgctgggggcagacccgggagcactcgccgcagtcggtgcagcgtccggccacatggaaggcccggatgatgtggaacattttttcttcaaagctgttggcggccgccttgttctccacgcccgaattggggttgtcgaacacgcatttttcgcaggtgcaggcggggcacacgtcccggcaggcgttgcagcggatgcagcgggaaagctcgccctgccagaacgcgaagcgctcgtcaggggtcatcttttccagcttttccacttcgtcgaagcggccgctgtccagcacttcgccgtcggagcccagcagctcatcgtaggccacgtgcttcttggacttgcagtgtacgcagcggtcaggcagcaggtcggcgcaggccaattccttgtcgccgtcaaacagcgtgtgggccacaaccttgtccccttcaaaatccacggaggaaacgccgtcgaccagctccttcagctttttggggtcggccatgccgttgcaggggatgcccaccgcatagaccttttcccggtcgaaacgatgctcggtcagcagctggttgaagctgtaggtatcgcagggcttgaggaagaccagcacctttttctcggtcttagcggtctccttcagcaggtacttggagaagttcgcgccgcagaaatcatcccagatgaagtctttgttcacttcgtccatggaggtgaacacgccgggggtcacatcgtagctgaactcgccctttttccagcccagcatccgatcaacgacgcctttttcaaacagttcggaggcttttgcaacaagagcttcccgcgttatttcttgcatctcagatcctccagtctcttgttttcgcccagcgccgcgacggttctggcgaaatcgttcatggtggcggcaaactttgcgccctcggcggcgctgacccattccacccgggtgcgctcccgttcgatgcccagatagtccagcatggagaacagcagggacatgcggcggcgggtgtagtagttgccggaggtgtagtggcagtcgcccggatggcagccgcagaggatcacgccgtccgcgccgcgctggaaggcacgcagcacgaacatggggttcacgcggcaggagcagggcacccggatgatcttgacgtcggcggggtagctgaggcggttgttgcccgccaggtcagcgcccgcataggagcaccagttgcagcagaacgctacgatcagaggcttatactcgtttacttgcatatcgcgtcaacctccgccataatttgccggttcaggaagcccttcagatccatcgcgccggagggacaggcgacagtgcacgcgccgcagccctggcagaccgcttcgttgacggaagcgacccggcggaccttggtggtgcggtcaggcatccggaattccttgtccatgtaggtgattgcgccgtaggggcacacgcgctcgcaggtggagcagccgttgcacatcatctcgtcggagtgcgccacgcaggggttgcccagcagcttgtccttggccagcaggccgatgaccttcgacgcggcagcgcccgcctgagagacggtctcggggatgtccttggggccctggcaggtgccggagaggaaaataccggcggtggggctttccacggggcgcagcttgggatgggcttcggtgaagaagtcgttggtgtccatgctggcggtcagcatggtggccagcgggcgggcggacttgtccggctcgatggcggcggccagcaccaccagatccgcgtcgatgtgcagctgctgtccggccagcaggtcggaggcctgcaccttcagcttcttgccttcgggcgtgaccttgcccaccatgcccttgatgtagtgcacgccgtactcctccaccgcgcggcggtagaactcgtcgaagttcttgccgggggtacgcacgtcaatgtagaacacatacacgtccgtatccgggtacttgtcccggatcagcatggcgtgcttggcggtgtacatgcagcagatcttggagcagtactccttgcccttttcggcgcaggaggcgcagcgggagcccacgcactggacgaacacgatggtgtggggatgctcccggtcggaggggcgcagcagcgtgccgccggtggggcccgcggcgttcatcaggcgctccagctccagagaggtgatcacgtccttggactgggagtaggcgaactcgtcgaacttgtccatggagatggggttgaagccggtggcgacgacgatcgcgccgtacttctcatccacaaattcatccttggccttgtagtcgatggctccggcagcgcagaccttggagcacaggccgcacttgccgttcttgagcatcatgcagtaccgggggtcgatggtggccaccttcggcacggcctgcgcaaagggaatgtacacggcgtggcgctcgtccatgcccaggttgaactcgttgggcacgtgcttcatggggcacttttcggtgcaggcgccgcagccggtgcagacgtcttccttaacatagcgggccttgcgcttgatggtcacatcaaagttgcccacgaagcccttgacctgcgtcacttcggaataggagaagatgcggatcttctcgtgctgcgccacatccaccatcttgggggtcaggatacaggcggcgcagtccagcgtggggaaggtcttgtccagctgggccattttgccgccgatggtgggcttggtctccacgatgtccaccgggaagcccgcgtcggcaatgtccagcgcggtctggataccggcgataccgccgccgatcaccagcgcccgcttggtcacggggctttcgccgggggtcaggggggtgttcaggttgaccttggccacggcggccttgccgaggatgatggccttttcggtgccgacgggcatatccttatgcacccaggagcattgctcacgcacattggcgatctccaccatgtacgggttgatgcccgcgctctgggccgttttgcggaaggtgttctcgtgcatccggggggaacaggagcacaccacgattccggtcagatgatgttccttgatcgcgtccttgatcaggttctggcctgcctgagagcacatatactggtagttggtggagaacacaaccccaggctcgtttttcagcgcttcggacacagcctttacgtctacggttccggcgatattgctgccgcaccagcagacaaacacaccaattctctgcatggttctgcttctcctttcacttcgcgtatttgcgcagggcgcttacgatggcctgctggggcatatcgtcgtccagcagggcggggatgtcatccgccgtcatgtggttcatgcccttttgacggatggccaccagacggatggcctccaccagcttggcgggctccacgttgcgggggcagcgctccacgcaggcgaagcaggacaggcactggtagagggacttcgaattcagcaggggctcgatctcgccccgctccaccatgtacacgaactgatggggatgatactccatctcgtcgtaggcggggcaggtagcactgcacttgccgcagcgcatgcacttgagcggattgacgccgctcatgcggacgacctgctctttcaggcgttcattcttcgtttgcattacgcttcctcctccacgcccagagcctgcgccagcagctcggtgaagtagaccaccggcacgtccgcgctgtacttggacagattatagcggcacagcgggcaggcggtgacgatcaggtccgcgccgtgggactgagcgtcgcccagcaccttctcgctctttttgcgggcggaaggctcgttctccagcgccacatagccgccgcagcattcgttgcgagcggcccagaccacaggctcgccgcccagcgcccggatcagatcctccatgatgtgggggttctccgggtcgtccatctgcatcaccttgccgggacgcaaaagcaggcagccgtaataacaggccaccttcttccccgtcagaggcttttgtacctttgctttgacctgatcgaagcctacggtgtcccgcagaagctccagatagtgctgcaccacggtctcgccgtgatagggttctcccgcgtctttgtcctgcgccatgtaacggttcaccttgtcggcaaactcggcgtccgtctgcatggcgtggttggtctgcttaatgacgttgtggcaggcggagcacaccgtgaccagaggctgggaggcgtctctggccgccttcagcgcgcgcacgctgctgagcttcgaggcgacttcgtccttggcggtgacgaacacaccgccgcagcactgccagttttcgatctcacacagctctacgcccagcgcctgtgcgcatttccgcgcctggagatcaagctcttttgccttcgtgcggagggtgcagccgggaaaataacttactctcatcagaaatgaaacctccgtttgttggtggggggacgttggggcctttgcggccccaagccccgcagtcaagggcttcgcccttgacaatcccgtcattgaccgcgcagagcgcggtcaaaaaaatatccatttgcaggcaaaatccgaatacctgattttcccaagcgagccgtggggttttgggaaccccacggcggtatttcagaaattgtctgcttgcccactcaccgtgcgcaagcgcacagttccgtgttcgtagcattgcccattggattgcccaccgaatggtgaaatcggcagggaacatcaccagaccggcgagccgcgaggccttccgccgagcggcggtaaaaccccggccatctcactttcccgcgagcacccccgcgccctgcgggcgcggtccggggtccaggggcactgccatcccctagcacgcgcatcccgttggggttgaccggccaactggaacgcgaactggggtccaggggcactgcccctggttagaccatttgctcggggtggaagacctcgtcgaacttctcggcggtcaggaagccaagggccacgcaggcttccttgagggagatgttctccttgtaggccttcttggcggtcttggcggcgttttcgtaaccgatgtaggggttcagcgccgtgaccagcataagggagttgtgcaggttgtggtacatcttgtccttgttggcggtgatgcccacggcgcacttgtcggtgaaggaaacgatggcttccgccagcagccgggcggactgcaggaagttgtaggcggcaacgggcatgaacacgttcagctcgaagttgccctgagaggcggccatgcccacggccacatcgttgcccatgacctgtacggccaccatggtgacggcttcgcactgggtggggttcaccttgccgggcatgatggaggagccgggctcgttctcgggaatgtggatctcgcccagaccgtcccgggggccggaagccagccagcgcacgtcgttggcgatcttcatcatgtcgcaggcggtagccttgatggcgccgtgagcgaacaccagctcatccttggaggtcagcgcgtggaacttgttgggggcggtgatgaaatccttgccggtcagctgcgctacctgcgcggccacggcttcgccgaagcccttgggggcgttcaggccggtgccgacggcggtgccgcccagcgccagttccttcaggggcttcacggccagcttcagcagctccgcgtcccgctccagagaggagcgccagccgctgatctcctgactgaacttgatgggggttgcatcctgcagatgggtgcggccggacttcacgatgccctcgttctccgcttccagcttcttgaaggtggccaccagatggtcgatggcgggcagcagcttatcctcgatggcaatcaccgcggagatgtgcatcgccgtggggaaggtgtcgttggaggactggctcatgttcacgtcgtcgttggggtgcaccagcttctggcccgccagctggttggcgcggttagccaccacttcgttggcgttcatgttggactgggtgccggaaccggtctgccataccaccaacgggaagtggccgttcagctggccggagatcacttcgtcgcaggcgcgggtgatgacgtcggtcttttcatcggtcatcttttcaggcttgagctggtggttggccagcgcggcggccttcttcaggatgccgaaggcgtggatgatctcggcgggcatggtctcgatgcccacgccgatttcgaagttctcgtgactgcgctgggtctgcgcggcccaaagccggtcggcgggaaccttcatctcgcccatagagtcatgttcgatgcggtattccatgggaaaaacctccttgcggcttggaaaatcagatgtccagattgctgataacgtctttcagcacggacgcgctgtgctggagcagaccggtctcttcctcggtgaggggagccagcagcttggagtgcacgccctcccagcccacggtgttcagcacgctcaggcacacgtcttcgatgccgtattcgccgtgcatcatggtggagacggtcagggtcgtgtccatgccgtccagcaggcacttgcagatgtggcacacggacacggccacggcgtagaaggtagcgcctttgcgggcgatgacccgtccgccggacttgcggatgtactgctccacatcggcggtgttcagctcaggagccatggacatgtcgccttccaccttgttgcggaagtcggtgacggggatgttggagatgttggccagactccacggcacgaaagaggaatcgccgtgctcgccgaacacgtaggcgtgaacgttgctctggctgatgttgtagtactcggacaggcgggccttcaggcgggcggtgtccagaatggtgccggaaccgataatgtggttctccggcaggccggagcgcttgcaccactgataggtcaggatgtcgacggggttgctgacgatgatgtacatggcgtcaggcgcgtatttggtgatctggggcatgatggacttcatgatgttcacgttggtctgggccagctccagacggctctggccgggcttccgggccacgccggaggtgatgaccacgatgttggagttggcggcgtccggatagtcgccggcataaacgctgcagttgctggagaacggcgtgccctgccggatgtccagcgcttcgcccagcgccagttcgtggttgatgtcgatcatgacgatgtccttggccagattcatgacggacagcgtgtacgcgatggtggaaccgactttgcccgctccgatgatcgtgattttgttcatagaaaataaccccttccttcgtgattcgtcttattttcctgcaaatcgtgtttttttgcaataattatttttatatataccccttatcaataaggatatgaacgattgaaaaacaccagtgttttcaatggatgcggcgttattcagcccttcgaactttcccttgggaaatgccggggcgaaaggaaaatttttggcccccttccgcccggtttttctcggaggatcgaagaagctcagcccatcagctgccggtcgatggccgaggcggcagtcttgcccgcgcccatggccaggatcaccgtggccgcgcccgaaaccgcgtcgccgccggcgtatacgcccggccgggaggtaagccctgtgtccgcatcggctacgatgccgccccacttctgcgtttccagcccctcggtggtggacttgatgagcggattgggcgaggtgcccagcgccatgatcacgcagtccatgggcagctccatctcgctgccctccaccggcaccggacggcggcggccggaagcgtcaggctcgcccagcgccatttcctgacagcggatgctccgcacccagccctgatcgtccgccagaatctccaacggattggtcaggaagcggaactgaatgccttcttccttggcgtgctccacctcttccttgcgggcgggcagctcagcctcggtgcggcggtagacgatggtgacttccgcgcccagacggcgggcgcagcgggccgcgtccatggctacattgccgccgcccaccacggctacctttttgccgtgctgcacgggggtggcgctgccgggccggtaggccttcatcagattgatgcgggtcagaaattcgttggcggagtatacgcccttccagctttcgccggggatgcccatgaacttgggcagacccgcgccgctgccgatgaatacggcctcgaagccgtattccttttgcaactcgtcaatggtcagcgtcttgccgatgaccacgttggtctccacgtccacgcccagcgcctgcaggttctcgatctcccggcgcacgatgcgcttgggcaggcggaactcgggaatgccgtacaccagcacgccgcccgacagatgcagggcctcgaacaccgtgaccgcatagcctttccgcgccagctcgcccgcgcagctcaggccggaggggccggagccgatcaccgccaccttgtggccgttgggcgcgggacggacgggcttttccgtggcgttggcgctgtgccagtcggccacgaagcgctccaaccggccgatgccaaccggctcgcccttgatgccgcagacgcagcggctttcgcactggctttcctgcgggcagacccggccgcagactgcgggcagcgccgtggagcgggaaagaatctcatacgcgccctcgaaattccgttcggccacctcgtggataaaggcgggaatgttgatactgaccgggcagccgcccacgcagggcttgttgcggcagttcaggcagcgctgcgcctccgacacggcctgttcctcggtgtagcccagcgctacctcgtcaaagttgcggctgcggaccttcggctcctggaccggcatgggcgttttctgcttggagggattatgcatcggtcttcacccccctgaaaaggttgcaggcttcttcataggcatggcgctcgaaatcccggtaggcggcgttgcgggccatggcttcgtcgaagtcgatctcgtggccgtcgaactccggaccgtccacgcaggcgaagcgcatcttgccgcctaccgtcaggcggcagccgccgcacatgcccgtgccgtcaatcatgatggggttcatgctggccacggtctttacgccaaattccttcgtcagcttgcagacgaatttcatcatgatgaggggcccgatggtgatgacctcgtcgtactgttcgccgctttcgatcagcttgcgcagagcgtcggtcacaaggcccttttcaccccaggagccgtcgtcgctcatgggcacgaagcggctgctggcctgacggaattccttttccagaatgaccagatcctgattgcggaagcccacgatggcgtgcacctcgcagccctgctcgtgcagttttttggtcacggggtacgcgatggcgcagccaacgccgccgcccaccacggccacttttttcaggccctcggtgcgggtggcccggcccagcggccctacgaagtcgtgaagcatatcgcccggctgcaggtgattcagcttttcggtcgttgcgcccaccacctgaaagatcacggtgacgctgccttcctcccggtcaaaatccgccacggtcagcgggatccgctcgccgtcctcgtccgtccgcagaatgacgaattgcccgggttccgccttgcgggcgatgagcggagcctccaccttcagccgtgtgaccgtcgggttgagcgcctcccgttccaggatccgattcatgcgcatcagtctcctttaattatgaatgaaaattgcgatttcgggaaatgttcccgacttctaatttcgatgttttttcccgaaaccctgccgtttttcgacagaaaaggctggaaggactggaaacagccaaattggacaaaaaaaacgccccgcagattgaaaactgcggggcgcgaagcttattctttttcccgaagggccttgctttcccgaaccagctggttcagctcgtccatgaagctggaaacatcggtaaactgccggtacacggacgcgaagcgcacataggccacctcgtccagctgcttgagctcggccatgacggcttcgccgatacggcgggaggaaatttcgtcctctccggcggcgtagacctgcttttccaccttttcgacgatgttgtcgatgtccttcatgctgatgggccgcttctgacaggcgtggatcagcccttccttcattttggaggcgttgaagggctcccgccgcatgtcttttttgacgaccatgatgggcgaggtctcgatcttttcataggtggtaaagcggcggccgcagcgaagacattcccggcggcggcgaatggcgctgccctcttccgtggggcggctgtcgatcaccttgctatccagatagccgcagtattggcacctcatgaaaacccacgctcccttccttgcctgaatcctgtattcatgatagcaagttcaggaaaatatttcaagcaaaatctggccgggcagatcaggcggcggcagcggccttccgattcttcgcgatcgcgtaccacacaagcccgacgaccagacccgccagcgcggggcagatccagccaacgcccagatcgaagaagggcagcgccttctgcgcaaaggctaccgcgccccgcagatgcagggaggagatcatggtctcggacagcacgtccgcccccagcatggccttggcaaagtcgaacagggcggccacgaaggtgaagccggtcacagtgctgtacacgatacggctgtggccgaagaacttgccgaacagccccagcaggatcaacgtgatggccagcgggtagaggaacatcagcaccggcacggagcaggcgatgatggcgctcaggcccagattggcgatggcgaaggacaccacgctgaaaatgacggcccacgccttgtatttggggccctgggggaaaagctgctcgaaggtctcggcgcagctggtcaccagacccacggaggtcttcaggcaggccatcgtcaccgtggcggccaggatccacacgcccgcgtcgccgaagtaatactgggcgatcagggacagcacttcaccgccatttgcgcagaccacgcccgcgttttcggcgatcacgcggcactgcacgcccaccagcgtcaccgccagatagatcaccgccatgatgaggcagctggacacgccggctttcaccgtgcaaagagccacgtgctcgggcttttccacgcccaggccgcgaatgacgttgatgaccacgatgccgaaggccaggcaggccagcgcgtccatggtgttgtagccttccagaaagccggtgaagaaggcgttgctttcataggttccctgcgcttccagcgtggagatggcggcggtggggttcaccagcgcggcgatcaccagcacggccagaagcaccagaaagatgggggtcaggatcttgcctacatgggtgagaatcttgccgggcttgagcgagaacgccagtacgatggcaaaaaacaagaaagagaagatcgccagcgccaacgactggttggagccttccggcatcagcgtcgccaccgccacggtgaagggggtggtggcgcaacgggggatggcgaagaagggtccgatggtcaggtacagcgcgcaggtaaagaagtagctgtacgggcggctgaccttggagctgagctccatcaggccgtcgctgcgactgatgcccatggcggcgatgcccagaaggggcaggcctacgccggtaatgacgaagccaatgatcgcctgccacatattttttccggccagctgtcccatgtacgcggggaagatcagatttcccgcgccaaagaacaggccgaagagcatggtagcgatgagcacgttttcctttttagtcagccgttccttcatcccgatcacatccttgtgcgttatatttgcaataatataacaccaattcaggcatggcgcaaggacaatttcgataaagtacggctccggaaattgtatttatattgttttttcttttcgggcgaaaacagaaccgtttccgcccgccttttctgccctgcaggcggtttttcttgcgctggggcccgttttcccgtataatggcgttgccgtcttcttccctgttttctttttgattttattttggactgatacggaggactgcaacattatgcaacagaaaggaatggtttgggtcattggagcatcgggcggactgggccgcgctacggcgcaggccttcgcccaaaacggctggagcgtgattgcgggggcccgctcctttgccgcaggaacctctccgctgggggagggcgttaccgtccttccattggacgtgacgagcgaggaaagctgcacggcctttgtaaaaaaggccctcggcatggaaagccgggtggatgtgctggtctgcgccgcggcgcagctggtgctgggctcctgcgaaaataccacggtggacgaattggacaggctgctggacgtcaacgtgctgggcgcggtacggatgatccagcgggcattgcccctgatgcgcaggcagaaaagcggaaaaatcattttgttctcatcgattaacgggcttctgggcattccgttccagagcgcctataccgccagcaagcacgcattggaggggtacgccgagtgtctggccatggaaaccgcagatttcggcattcaggtctgtctggtagagccgggggaccatcggggcggcagcagccacacccgccatcacgccaaaaacgaaacggacaccgtctaccggcaggcgtatgaaaacacctgcgccatcattcatcacgacgaagaaaacggcctctttccggaccggctgggccggaagatcgtgcggaacgcccagcgacggcatatgcgcttccgtctgagggtcgccaagcccgaccagcatctggccgtgcttttgcatacccttcttcccgccagcctgaatcggaaaattctctgttcctattatcgtgctcatctctgagacaagtctctgaaggtacattctgaggaggaaaaaaattgaattcatcttacgctttggagcacaactgtgctcttcttgagcaatccaaaacgctggagaccctgttccgcctgacctgcggccatggggacgcggacgctgcgctttttctggaaaacggcgaggaaaagcgctggtcgtaccgccaatatgaggccatgacccggcagtacgccgcctgcctgcgccgggcctttccggaggagggttatatcgccatctccgtggacacgtgcaaggagtggttctccctgttctggggcgtgatcctctccggccacaacgccctgctgatcgacgcggcctgcgccgatgatacggctctgcggcttctgcgggaggccgactgccacgccattgtcacccagcggcggcgcagcctgtcggaaaccgttcagacgctggatttcgccgtgctggcggagcaggcggccgccgagccggaggacggcttccgggacggggccttcggccagtgcgtggccctttgcaccagcggcaccaccggccagagccgggtcttcgtctatgacggcgaggccatcgccgagcaggtgctcaattccaagctgatctatgaggaaaaccgacgcatcgtggaggaggccaaccggcgctcgctggcgtttctgcccttccatcacgtgctgggcttcatggtcgatctgctctggtgcagctttctgggctatgccaacatctacctgagggaccgcacccccgcgaccatcatcgaaacctcccgccgcttccagccggagctggtggtggccgtgccgcttctggccaacaacctctgcacctccctgcgcaagcaggtggcccgggagagccgcctgaaacgggcgctgttcgcctcggcgaagaatttcagcctgaacctgcagcgggtcgcgccggaggcgggcctgtggctggcggagaagatcctcttccgccgcattaccaaaagcatgctgggcacggaggtcaagtgcatcattctgggcggcagccacacgccgcaggagcagctgaagctgctcaacgctcttggctattacaccgtctgcggcttcggcatgacggagaccgccgtcaccagcgtggagatgagcaagcggctgaagaagcgggtcagcggctccgtgggcaagcccctgcgcagcgtggaataccgcctgaaggatcaggaaagcagccgggttcgccggggcgaaatgctggtgcggggcaaaaccgttcacaccggccgcctgcacgacggccggatgctcccgccggacacgctggagggcggctggtaccccaccggcgacatcgtccggctgaagcggggcgaccgggtgtttgtggagggccgcagcaaggaggtcatcatcaacgaatccggcgagaacatgtacccggatgaattggaagaaaccttctccgggctggaaaacgtgcggcagtataccgtgctgggactgaaaaagcccggaaaggatcagcattacgaggacattgcgctggtgatgagcgtaggcggcgactacagcgatgctcaggccatggaaatgctgcggggccgggtggcccagcgcaaccggaagctgcccgccgtgaagcggctgacccgggttttgattaccccggaggagctgcccatggtcaacggcatcaaggtgaagcgcatcgctcttcgggagatgatcgcccagaaccgtctgccctgccgggagctttccctgaacggcgcgcttccgcaagaggccgagccaaaggaacagccggacggcagcgcagcaggacaggacgaccggattcgccgcaccgtccgcaggctgtacgccgaggcgctggacgtgaaggagggcagcttcggcgacgacgagcatttcatcgacgatctggggggcgacagcctgcaggtattgtcggtttccctcaaggtggaggagcagttcggcgtgatgctttccgccgaggaatacggccagtgcaccacggtgaacgacctgacccgggtcatccggaaccacctgaacggcgggacggaggaaaaagcggaggagggcgggcctgttgcccccattacccgttttgaggacgcgccggaatatcaggccttcgcccggcgtcagcaggagctgaacgcctccggcgagggcaatccctactttgtctgccatgactctcccctgcgggataccagcctgatggccgggcaggaggtgctcaacttcggcagctacaattacgtgggcatgagcggacgcaaggaagtgcaggaggctgccaaggccgccatcgaccgctacggcaccagcgccagcggcagccgcctgctggcaggcgagaaaagcctgtatcaggaattggagcgggaaatcgccgactggaagcacgcggaggacgcgctggtctgcgtgggcggccattccaccaacgtgacggtggtgggcaacttctgcggcaggggcgacctgatcgtctacgacgcgctggcccataactccatcgagcagggctgccgcctgagccgggccgtttccaagcccttcccccacaacgacccggaggcgctggaaaacatcctgaaggtacaccgctcccacttcgccaaggtgctgatcgtcatcgagggcgcgtacagcatggacggcgacgtcgccgatgtgcccgcctttgtggccctgaagaagaagtacggctgcttcctcatggtggacgaggcccacagcgcctgcgtcatcggccagaccggcggcggcgtggacgagtacttccatctggagcccacggacgtcgatattaagatgggcacgctttcgaaggggctgggcacctgcggcggctatctggcgggccggaaatgcctgatcgagtacctgcgctacaatctgcccggcttcgttttcagcgtgggcatttctcccgcgctggcggcgggcacgctggaggccatccggcagctgcgccacaacccgcagatcatggcggacatgaagcggaacattcagtgcttcgcagactgcgccaaaaagcaccgcttcgacgtctgtctggcgggcgaaaccgccattctgcccgtgatggtgggcagggacgaggacgccttcgccctgagcaacgaaatgcgccgccggggcgtattcgtccccccggccgtattccccgccgtgcccaagaacagggcccggctccggttctgcgtcatcagcgagcacaggcccgagcagatcaagcgggcgctggacgtattggaagaggcggccgccgccctgaacatctccctcccccgcgtgcagcaggggtagtacccctgcaccccacaccgcgcccatcgggcgcggggatgtcgtggggatgcgggttggcttctttttaccgccgctcggcaacgggcctcgcggctcgcgggcctggtgtggttttctggcccgttcaggggaaaaacaggcggcgcgtcgaattttcgcttgcggaatgagacgaatttcgctatactctggggaaccgtgcacagcggttccccggaaagggcggaggcgcgggcttctgccaaagaactcggggctggaaaggctccgggcgtttttttgatttagggtgaaggaagcgaaagacaatgaagaaaaattctccccggtcgatctttttactgctgctgacggcgctggtctggggcttcgggttcgtggcgcaggacatggccacgggcagcgtccgggcctttacgttcaatggaacgcgtatggcgctggcggcgctggtggtatttctgttctgcctgtaccgggacagccggggaaagggcgacccggaaacgggcgacggcgtgcccttccggcagatgacggcctcgcagaaaaagacgctgctgctgggcggcgccttctgcggtctggcgctggccgtcgccagcgcactgcagcagatcggcatcgagcagggcacgtccgccggaaaagccgggtttatcacggccatgtacattctgttcgtaccgctgggagagttgctgatcttctgcaaaaagctgcgctggctgctgctgcctgcggtgctgctgagcgtcacgggcttatacctgctgtgcatgaaggcgggcgcggcgctgacgctggagggcggcgacggcacgctgcttctgtgcgccgtggcgtttaccgcccatattcttatcattgaccgggtcagcccccgcaccgacggcgtgaagctgagctgcgttcagttcgccgtggcggcggtagtcagcctgatcgtggcgctgatcgcggaaaagccctcctgggacgagatcatccgctgctgggtgcccattgcctatgcggggattatgagcggcggtgtgggctacactctgcagatcgtgggccagaaggacaccgaccccaccgtggcttccctgatcctgtgtctggaaagcgtgtttgcggtgctgggcggctggctgattttgggggataaaatgacagcccgcgaatacgcgggctgcggcatgatgcttatcgggattttgctggctcagtggccggagaagaagccggcggcttcgggatccatccgaccgtaaagcggaagatcacgaacaccagcgtgctcaggaaccaggtgatggggtagacgaagaccacctggcgcaggtcggtgaacgacgccgagaacagggagatgtagatcacccgcaccagacaccagcagacggcgatcacgaccatggggacgacggccttgccggtaccgcgcagaacgctggccacggcgtgggagaacgccatcaggaagtaaaacggcgtaaccgtgcgggcatatcgaatgccgaaggcgatcatgtccgggtcgccgccgaacagggacagaagctgcggggccagcaggtagatcagcagcgccacgccctcggccatcaccatgcaggagatcacgccgaaacgcgccccctccttggcgcggccatattccttcgcccccagattctggctgacgaaggtggtcagggccagcacgaacgcgttgatgggcaggaagccgaaaccctcgatcttgaggtaggctcccgcgcccgcgatagccgtcgcaccgaacaggttgatgccggactgcacaaaaatattgccaatggaaataatggaattttgcagacccgccggaatgcccatatgcagcactttcgccagcatggggccgttcaggcggacttttttcggctccacccggtaaatggcgtcggagcggatcagacggatgaagcccagcaccgcgctgaccgcctgagagatcactgtcgccagcgccgcaccgtccacgcccatgtggaacacggccacaaacagaaggtccagcaccacgttggtgacggaggaaataatgaggtaatacagcggatgcctgctgtcgcccacggcctgcagaatgccggtggcggtgttgtacagggtaacgaacaccacgccggagaaatagatgcggaagtacagcgccgaattggcaaagacgctgtccggcgtgccgatccaccgaagcagggtgggggacacggccacgcccaccacggacagcaccacgcccgccagcaggccgaaggccacggtggtgtggatggcggtgtgcatcttctgatgctcctgcgcgccgaagtagccggaaatgaccacgctcgcgccggtgaacaggccgctgaacaggcctaccagcaggaaaatgatatggccggaggaacctaccgcggccagcgcgtcgctgcccagaaagttgcccacgaccagagagtccacaatgttataaagctgctgaaacaggtttccccaaaaaacaggaagggcgaaacgcacgatttgccggcggacggagccgccggtcatgagcgttacgccctgagaatgttcctcattattttcccgggtgtgcataggcgatgatcatctccgcaatttcttcaggggtgtggtcgtcggtgcgcagcatcaggtcgtagttgctccgaacgccccagttgccgtcggcaaagaaattgtagtagctcttgcgctgcttgtcggttttgcggatcagttcccgggccttgtctgcatccacgtgctccagccgcatgatgcgctccacccgcttttccagcgaggcgtagaggaagatgtgggtcacatgatccatatcccgcagcacatagtcggcgcagcggcccacgatgacgcaggactgctccttggccagattggtgatgacctcgaactgggccagaaagacccgctggttcatgggcatctgcagcccgagccccacgcccgcgccgaagcccgttccagccgtgaccggcagcatgtcggacacggtggtcttttcatcgttgtgctcgaaaatctcctgacaaatgccgctcttctgagccgccagggtcaaaagctccttatcataaaacggaacgttcaatttctgcgcgaccaatttggcaattgcccggccgccgcttccgtattcccgtcccacggtgatgacgaaatgttccttcatagccttttcgctcccaactgtggcatggtttttgcagttttcctttccacagtcccattatacaacaccggcctcaaaagttcaaacccccaaagaggagaaattcattccgaaacgcccggacgggcatggctgcttgcgtctgcggccgcgtccgaatataataagaaaagaagcgagaacacggttctttcggggaagggggaaaggcgatggaatttgtttccgtccgggccacggcggagcgctggggcgtttccgtgcgcaacgtgcagcggcttttgaaggaggaacgcatccatggcgcgtacaagtgcagcggctgctggatgatcccggcggacgcgcccaagccggacgatccgcgccgggaacgcaaaaaggcccgggaagcgaaagcggcggatgctgcggctccggcggcggaaacggaaacgcttcggccacggcggctggggtatggccttttgtccgtcatcatccccatgccccggcgcgacgcggatgcggtgctgcccctgctgaaggaaaccgccctgcggcgcgaatacgaaatggagctggcctacctgcggggcaactacgagctggccgcccgccgcttcggcgaaacgcagcccgaggagccgacacggttctgcgccgccatgctgacgatgctggcctgcatccatatcaataacggggatctgtatgcccgagtagcccatgagatggaacaggaaatgctcatcggggacaaggactccgcccatatggcggaggtggcgctgacctatccgtccctgagcatgaaggatatgggccgggtatcgcaatgggtgcagaagggcgacttttcccggctgctgccggaagcccggcccatgggcatgtacctgagcctgaaaaatctgcagggtcagcggcgctacgccgagctgctgtgcgcctgcaaggcggcgatcgccctttgggaacgggaggacaccttcaccattctggatatttatctgcggatgctctgcgccacggcctgctacgagctggaccgggtggatgaatgcgacgatcatttgctggaggccatgaagatcgccctgcccaacgggttcgtcacgccgtttgtccagtcctggatgaccacgggctgcgagatcgagcatctgctggagcagcgctatccccagtggagagacccggtggagcgggtcagcatggccacatggaaaaactggatcgctttccacaaccgctacacccgggagaatatcactacgctgcttacccagcgggaataccgggtggcgcagatgatcgtggccggaagcacctaccagaatgtggcggacgaattgtatttgtccgtcggcacggtgaaaaagctggtttcatccctttatgacaagctgatgatccactcccgggcggaattagccgatatgatcatgtaagcggtcaaaatctgaccgggatttgacctggccgccctctggcagtccgccccgctttatgctatactgaaagacgccggcagcggccggacggaaaggagaacccccatgagcctgaatgaaacggcccatccctacaccatggaagccctgagggccaaaaaaggatacattattgatatggacggcgtgatctaccatggcaacatgctgctgcccggggtggagcgctttgtggattttctgaaaaagaacgataaacgatttctattcctgaccaactccagcgagcgcgctcctcgggagctgcagcagaagctggcccggctggggctggacgtggacgagagccacttttacaccagcgccatgagcaccgcggccttcctcaagggccagtgtcccggcggcagcgtgtacgccatcggcgagccgggcctgttcggcgcgctgtacgacgcgggctttaccatgaacgaggtgaacccggactatgtggtgctgggggagacccatacctacaattacgaaaagatcgagcgggcggtgcagctggtgctgggcggcgcaaagctgatcggcaccaaccccgacctgaccggccccatcgaaaacggcatcgcgcccgcctgcaaggcgctgatcgcccccatcgagctggccaccggccacagcgcctattttctgggcaagcccaatccgctgatgatgcgccacggcctgcgccgtctgggcgtcagcacggacgaggccgccatcatcggcgaccggatggataccgacgtgatcgcgggcgtggaaagcggcatcgacacggtgctggtgctttccggcgtgacctcccgggaggaaatgagcaagttcccctaccggccccgctatgtgctgaacggcgtgggcgacgtggtaggctgaccgattttcgcggccttcgccgcagcggaaaaacaaaaggggaatgcaaatgcacggaatttctggcatttcggaaaaaacagcgcgcgtgttgacggcgctgtttttcctgcttctggcgctggcgggcttcctgacggtgcgggattacggtatgccctacgatgaatacaccgaaatggcgatattccacagcaacgtggaggaataccgcctgcattggcccttccccattaaggagggctatttcgccagtgaaggaggtcagcccatttcccagagcatcgaaaaagatcacggcatctgcgcctattacccgctgattccgctgctgccgtggctgcggcaggatatcaacacctattcgctggtgtggagcatcctgaccgagtgctggtttttgctgggctgcatcgctgtgtacggcgtgtgccgcaatctgggcatgggatggctgagcagctgcgccgccgtgctgctgctttatctctgtccccggttctttgcggagggacattacaataataaggacgtagtgctgctgtgtctgttcctgctgaccttctggcagggagcccggctgctccgcaagtccaccctgtcccggggaatgctgctgtcctttttcggggccatggcgttcaataccaagatcgtgggcattttcgcgtggggcctgatgggccttgccatgatcgtttccctgacggcccggaagaaatggaaccgttccatggtagggctggcggtcgcgaccatccttagcttcgtcggtttttacgtgctgctgaccccggccctctggtcggatcccatcggctttttccactggtgcatggacaacgcggtgaatttctcccgcttcggcggcgaggtgctgttccggggcgcgcggttctgggatatcaatcaggaaacgcccctgccctggtactatctgcccttcatgatcctggtcacggtgccgctgcccacgctgtttctggtggcggtgggaagcatccgggcgctggcggaaccgctgcggaagaaaacgcggaatttgtccgatccccggcaggtgctgggtctggcctttctggcggcattcacggtgcccgttttgtacagctgcgtgggcaagcccctgatgtacaacggctggcgacatttctactttgtgtatgcgggcatggtgctgctggcggccatgggactggatggctttttgcgcgggctgcggcagcggaaggcccttcgccggacggcggccgggctgacggcgggcttccttgcgctgagcgccgtggggatcgccctgaaccatccctacgagtgcgcctattataatgtgctgattccccgagacgctaccgagaccatggaaatggacacgtggaacgtgtgccccaccggcgcgtaccggcagctgctgagccggactcaggggcatgtgaccatcggctgctatttcaacgacctgatcccggcggcctacaaactgcccgccgatctgcgggcccggctgaccgtcacccatgaggacaacgagccgtacctttattatggggctacctatgcgtgggtgtatcacgccgtgccgccggcgggctaccgggagcttttctccatcaaaagctacggaaataccgtgggaacggtctatgagcgggtggaggaaccctgagtgccgaactttattcctattttctcaaaaaacactccgaattttggagtgtttttttcttgacattcgtatcaacctctcctacaatgttacatacggtcagaaagctggccagaactatataaggatgatacagcaagatggacgaacttcgatttatccctatcaataccgaagacagcgaccccggcgtatttgttcagggcattcacgtccctgcgcggctggtagaagaaagcggtgtgtggatccgggaggcgggcagcgccattctgacccaggaccagtaccagatcgcgcctttttatcatacgctgtggctggtcgctgacgagggcgacatgaccatgaccttcggcaatcagcgcctatgcttcaagaagggcgaatgcttcgtcatcccggcgggcacgacggactgtcgtctggaagaagcccgggacagccgccttctgtggttcacggtggacggcgcactggccacgtccttcctgcggcagatgaacgcccacaatctggtgcccgcccggcagggcatcctgcccaatcaggtgctgctgatccggcagatcgtgcaggtgctggtgcgccacagcggcaccgatcaggccagcttccagctggcgcagctgctctgggcgctgctggcggcccacagcggccacagcgtagccaccaacgcggtgctgagccatgagatcgcccgggtggtggacgccatgcggcaaagccagtatcaggccaacttcagcctggcggaaatggccgccatcagccgtatgcccatggagaccttccgcaagcgcttcaccacggagctgggcattcccccgctgggctacctgcagttccagaagatggagcgtgccaagaccctgctgcggggcggcatgagcgtgcgccagaccggcgtggagatcggtatgcccgacccctaccatttctccaagcagttcaagcacatcgtgggcatgagccccaccacctacctcaagcacgtgggccccatggagcccgacggccgggcctgaccggggaaaaaagaaaagaaccttttatttctgcgcaagcctttgctcaaaaaggcttgcgtatttttctggctgtgttatactgaaagacggaattttttcctacattctttctttatgataaggagattgcgatatgatccggaagattggtatcctgaccagcggcggcgacagccccggaatgaacgcggcggttgtgagcgtcgctcgttgcgccgccatgaacggcatccagctcatgggcatcaagcgcggctataacggtctgctgggcctgagcaagaaccccgaggacgatatctgcgccctcgatctggaaaccgtgctggatattgccgaccagcgcggtaccttcctgcgcaccgcccgctgtgtggaattcaagcagcccgaagtgcgccgtcaggcggcggagaacctgcgccagctgggcatcgacgcgctggtggtcatcggcggcgacggcagcttcaccggcgctatgtatctgtgcgagctgggtatcccctgcgtgggcatccccggcaccatcgacaacgaccttggctacaccgaggccaccttgggctacgacaccgctgtgaacgtgtgcgtggaagccgtgcgctccatccgcgccaccagccgcagccatgaccgcccccatgtggtgcaggtgatgggccgcaactgcggcgatatcgccatgaagaccgctatggcgaccggcgcggaaatgctgatcgttcccgaagtggaatgggatgtggacgaagtggccgcccgcctgaactggctgatcgagcagggcaacacccgcgctacgctggtcatcagcgagcactgctgggacaacatgaagcccttcgactggcgcaagttcctcaacgataacggcaagaccgtttatcccggcgagcccatcagcgctgagtatctggccagcatcctcaagcggaagtgcggcggcgcggaggtgcgctccaccgtcatcggttacacccagcgcggcgctcagcccaccgcgcaggacagcgccttcgccttcgaggccggccatcaggctgtgcagctgctcaaccgcggcattgccaatcaggctatcggcatccgtcacggccgcgtcttcaatatgcccatcatcgatgcgctgagcatgaagaagaccttcgaccgcgaaatgtacaatctgatcaacaagctgtaagctgcttatggaaaaccccgccttttcccgtcatggaaaagacggggtttttcagccgataggaaaggtaattttgtatgtttctttccgattcggcagagtgccgaaaaaccagtccatttttctgcaaatttctgcaaacgttccctttttccgcgaaagcgacttttcagaaattgatttttgcgctatactatgattgaatacacccgcgatacagcaaaaaggagcgcgacttatgacggattttgtaaacaactggaataatgagcttctgacgactcccgtggctccgctgggcctgatcgccatgcccggctgcgaggaaatgggcaagctggtcaacggctggctgatgaagtggcatgagcagcaggaagccctggaagacacgcccctttactccctgatgggttccaatcggagcgactttctgatcgaagcccgctgcccccggttcggcaccggcgaaggcaagggcatggtcaagagtactgtacgcggatatgatatttacattctgaccgacgtgggagcctacaacaaaacctatcagatgtacggcaaagaggtgcccatgtctcccgacgatcattttcaggatctcaagcgcatcatcggcgctatcggcggccgcgccaagcgcatcaacgtcatcatgccctacctgtacgagggccgacagcaccgccgctccacccgggaaagtctggactgcgctcaggcgctgcaggatctgcaaaatctgggtgtgagcaacttcatcaccttcgacgctcacgacccccgcattcagaacgccgtgcccctgatgggctttgacagcgtccgtcccagctatcagattttgaaggctctgttccgcaaggataaggatctgcagctggatcgggagcacatgatgatcgtcagccccgacgaaggcgcgctggaccggaacatcttcttctcctccgtgctggggctggatatgggtatgttctacaagcgccgcgattacacccgcatcgtcaatggccgcaatcccatcgtggctcacgaatatctgggagacgatgtggagggcaaggacattctggtgtcggacgatattatttcctccggcgacagcattctggatctggcccacgagctgaagaagcgcaaggccaaccgcattttcgcttccgccactttcgccctgttcaccaacggtctggacgccttcaacaaggcctacgaggaaggctacatcagccgcgtgatctccaccaacctgacctaccgcaccgacgaattgaagaacgccccgtggttcatcgaggcggacatgagcaagtatatttcctacatcattgccagcctgaaccacgaccgcagcctgagccgcctgctgaatccctacagccgcatcaagaacctgatcgaacggtatcacgagcagcagaccgccgctgggttccgtctggtgtgatcgaaaaaaagccaaaaacgacgctttttcggaagcgtcatttttttacttgacaattatatcgtcaatcgttataattaaattatgatatatcgaataacgatatatcaacaggagagtgaaacgaaccgatgaatgagaatatggcgttgacggaatccacctactatatcctgctggcgctggcgcagccccggcatggatacggcatcatgcagcagacggagcagctgtccgggggacgggtgcggctggcggcggggaccctgtacggggcgctgaacgccctgtgcgaaaagggctggatcgtgccggttcccgctcaggaggaaagccgccgcaaggagtaccggctgacgcagcagggcgaaagcgtcctgcggggcgaactggaacgcctgcgggaactggtgcgcaacggagaaaccattctggaacagggggcgaaggaataatggaacgcaacgcggagaccaaaaccgtttttcgctggtggtgggagtgggactttgacaaggaggagcagtggctgaaccagatggctcaatccggctggctgctggataaggtagggttctgcatttatcgctttgtacgctgcgagcccggcgcttacagcgtccgattggaaatgcacccctgcgataaggattatctttcctttatggaggaaacaggagcagagtatgtcggccggatgctgcaatgggtctacttccgcaaaaagctgaccgacggccccttcgatctgttttccgatatcgattcccgcatccgtcatctggaacgggtagggaaccccctgctggtgttgggactggcaaatttggccatcgggatcaccaattccattcaggccaacgccgaatatgcatggatcaatctgctgtgcgccacgctgctgatgtacggccttggccgcatccacggcaaaaaggaggcgttggaaaaagaaagactgctgagagaataaacagtcagagccgcatgagtttcgtcatgcggctctgtttgttattcctgctgaaacatccgttccagctcgtcgtatttttcccgggtaatgagcgcgtcctgcgggatgccttccagccgggcggcgtaggtccagcggccatagggagtgat

SEQ ID NO: 2999 - DNA, 32759 bp, Unknown
  16S sequences of unknown bacteria
ggatacttctctataagttccagtattttcttttgcagtctctggtattccgcattatgctttttcagatagatacatacctgttctcctatccgtatccccagacattgctcgttccagatgatatctggctgtactgacatatcgttttctcctttctgtgtcgtttccctgttccaagcacaagactataccacacttccgggagaaagctattcagcagatctactgaaatgaccgggcggatactgtgcaacctatcctttctttataataaaaaaaggcatggaagaatcttattctttcatacctactacttatttctatattcaactgaatacacattcttttccattatctgtgtatcatgtacctattttcctctaaaagcaaactgtatacactccatacacgcctgccatctatacctcattttacgtccagaatcaaaagccgtgctttgtagctcagcgccagaagcactttcagcttcgccctcattccggtcgaaaactccgtaatctttcgatcaagcggaatcgcaagcctgcggcactgctcctgaaaccagtttctgtcaaatgcatcatacaggctttccataatcccacagacctgttttcccgtcagcgcgccgcaaaaggtgctgcccgacagtaccacgccgacctgctgtttccgctttggcgaatcaatcggaccgtcctgcccgagaagccgcatcgtgccgccctccgtgtgaatcagtcccagcatcgccttaaacgtcgtacttttcccagcgccattttttccgaccactccggtgattcgcccttcctccagctgcattgtgacgtccagctgaaatgctccatagctcttttttaccccttttagttctgccagcatcgattattcctccataatcaaattgaataaggttcggatctcctcgtcggtcagccctcgcattcttcctttttggactgcctcctccagatctgcctctgtctctttctgccgcgcttctttcatctgactctggcttgcctcggatacgaagctgccctttccgtgaacggtcacgatcagcccttcctcttcgagaagatcgtacgccttctttacggtcagggcgctgattttcaggtctttcgccagcgcgcgcaccgatgggagcacagctcctttttccagggtcccgtcaataatctgagccttgatctgcgcaatgatctgctcatagatcgggtccatggacatgtgattgatgatcatattcatagtgtttggcctcctgctatgcaaacagtatataacagcatggtactgttgtcaactgttttatactgttatatacgaaaatgaagattagtctcctctttaactggctcaaccgaaaaaatggagacagcatttttcactgtctccataattccggcttttcctttcaaacgttcctgccgcatccggccccgctcataaacgcaattctttcctaaaaataagatgtgcaatctcataagatggaacccgcttgtgggcggattccttatgaacctgttagattgagggaatgatttttcccattcaggtctctgctcctccgatcctgtccaccagcagacatttccggtcatcatcccacgaaagcgtccctgttttcatcgcttcttcgtagcgtgagatcttgtaggacagatgggacatcgtagcttccagctgctccttctgctttttgagcagctccatctggttttgcagcagctcaagccgcgccggaatcgtctcatcgccctcctgataaagccggagatactcgatcattgcctccatcggaagtccggcctttctcatgcagagcgccagctccagccaccgcaggtcctcttcctgataatcacggattccgccgctcgtgcggtgcacctccgggatcatccttacccgctcataatagcgcagagtatcctgtgtcaggtgataccgctccgccacttcctttattgtcatacatttacctcatgatctcagcgctttacttcagtacgccgtactgctcgtcgctcactgcttccagccactcgttggaaccatccacacccggtacctcgattgcaagatgtgagaaccaggaatccggtgcagctccatgccagtgctttacaccctccggaatattgatgcagtcgcccggcttcatttcaacagcttctttttcccattcctgatagtagccacgtcctgctacacagaccagaatctgtccgccgccctcttttgcgtgatggacatgccagttattccggcagcccggctcaaatgtcacattaaacactccgacctgtgacgtggataccggtgcaagatagctctggccaatgaaatactgtgcaaactccggggcaaatgtcccaagtgcatttcttcctgcggtctgtacgatttttgccatttttttgttcctccgtttttttgattatgcgactatccattttttaatcgctgctctggcgccgtccacactgcttccgtggatcgcaagtccgcgctctaccgttgcatttctcgtcacatttttgatatcctgctctgtgcggctcagtctgcttccctcatgtgtgcagaatggatgaatctttttccctgaaaaatcaaagtgctccaggaatgtataaactgccatcggcatcgttccccagtagttcggatagccaagataaatttcatcgtatttgtcgagattttccggcaggtttaccagctccggccgcgcctttgcctgaagatctttctttgcctgcgcgatgcaggtattgtaatccttcgcgtatggtgtcttctgctcaatcttgaaaagatcggcaccggtctgctcagcgatcatcttcgccgccttttccgtgtttcccacctcgatgtaccgaagctgccccccaaaataattttcgtctgctcttgaatagtaagctactaatttcgccacgctgactcctcctttttcctgcgtgaattttctgcattgatatcagtcagataaatttctgccagaacaagagtatcattttttattatcgtaatattctttttccagaagcaattcctttcttactgtcactatacgccctggagttcgctccaagtcaagatttttttacaatttttctcgttaaatgtaaaatgtacgcctggtgtctttctgtgcctgaacaaatgcagaaaatactctgagcgtacattgaactttaagaaagaatttttaatggccagattttcctgaaaacgaaaggatacccgaacaacggcaggcttttataccgcaatgatccgtcccatctccgcggaggtccggtgggaaatggaaaccacggtccggtttccggccacccgtttcagagcctgcaggactgctttttccgtctctgcatcgaggtttgccgtgatttcgtcgagcagtaaaagagagggatctgacgctgccgcccgcgcgatggaaagcagctgccactgtccctgtgaaaacagttccggcgtacataccgtatcgtaaccgttttccaggttttcaatcgcctcttttaatccggtcagttctgccgccgcatgtacctgtgcctctgtaatcgcagggtcaaacaaggtgatctcctcccgcaccgttccgggcaccatatggaacgtctgctccacgtagccgaacagcttccggcgctcttcctctttgatctgcgccgccggcgcaccgtggatcaagacctcaccgctttggggctcataaagaccgagcagcagctttaagatcgtgctctttcctgccccggtacggcctgccagcgtcacctgatcgccgtccatcaccttgaagctcacatgattcaggactatgtgtccgccgtaaccaaaaaccacgtcgcgaaactcgacaaagggaatctcttctgctctgtcttcccccgtccatcctgccttttctgtctcggttcctgcttttgtcgtattttcgttactacttctattctctgtttcgctttcgttagctgacgctgcgagatctttcgcatcacttccctcttccacctcctccagtgccaaaaactcgttgatccggtggatacccgcgaccgccgactggatcgtctggatctccatgccaaggctttcgaccggtccgaagatctgcgaaatataattgatgactgcgaccgccgttcctgccgacataccgaacagtttcagtacctgcggatttcccgatgcagaaagctgcatgacagccgcgaccacaactgcattcaggatcaaaacaaccggtgaatacactgcgtcataaaaattggtacgctccatcgcctggtagctctctccgatataccgatcatagcgctgctccatataagcttctttcccaaggcagtggattgtccgaatgttgtggagcgtctccggcacatggttggatgcccgtcccaccgcccttcggttttcaatctgcgcagccagcatatttttctgcacatgacgcgtaaaccagaacagaaaaggaagaagaacaagcagcacaagcgtaaggccacgattctgaaaccagatcaccacaagaatgctgatgattttgcatgcatctgcaaacatactgataagccctgatgtaaacagattttccacggtatccacatcgccgacaaaccgtgacacaagcgcacccggctcctgtctgctcatttcatccgctgtaagcgccgtaaatttttccatcagtgcgctgcgcagcgcatgtgtgattttctgcccgaagaccgtcagaagcccttcccttgccgactccagaaaaccggcagcggcaagcgaagcaaaatagagcagcaaaaaggaacatgcagccgtttttcctgctgtaatcgtatcgacaatgcgtgcgagaatgagcggcggcacaagcgccagaagaatcgcgccgactaccgcacagaaaatacctgccgacagatatttctgccgctttactgtcatgaaaatgaccgtttttacctgcagcttacgcttcatcttttctctccccttcctctgcacggatcagttctgcatattccggtactttttccatcagctccgtatgacttcccgtgatcgctttcccattttccatccagattacctgatccaattccggaaacagatacagacggtgggaaaataacaggaccacgttgtcctttgccacttttttgagatttgaaaaaatttcccgctctgttttccgatccagtgcagaaaacggatcatccagaatcaacagcgtttttttgtgacacagggtgcgtgccagtgccaatctctgcgcctgtccgccggaaaggcgtacccctccgctgccaacccgtgtctgcactccctcgctcatttccgcagcctcctgatccagacgaaccaactgtaagtacgttacgggatccccactgtcacccagcaggacattttccgcaatactgtccgcaaaaagctccggatcgtgaccaagatagctgatccatccgatgcgctctgcctgcgctgcatcctgcagttcccttccgtgatacagaatctgtccctcatacggatactcgcacaggaatgcctttccaagtgttgatttgccgcaggctaccggaccggtgatgccgatgatctgacctctttctgcagtaaaagaaatgtcatccagaatttttctgccgtccggataagaaaaagtaagatgcaacacctgcagaagcggaccagttccctcttcgtttctgtttgaaatggcttctcttcctttttctctctgccttttcctgctttcttctgaaccatcgattttcccctctgccttttgtggtgcaagcaagccccggatccgtttccacgaaacctgcgccttatgcaccgcattgaacagctttgctgcactggaggacttcactgacagctttacaaaacacgccagaaacgtcgtaaaggaagcaatgtcccatgccttccatcctgttccaagtacatttttctgtccgaagtataaaagaaacaaacatcctgtcatcgaaatcacacgatagagaggcggcatcgccgtactccagatattggccttcactgccgtcttttcatagtcggtcagatttttttcatatgcctgccgccgttctctctcacagccaaatacacggtacgtaagcgcattctgcgcacggtccagagtggctgtgctcagtaggccggcctgaaccttactggccgcaccggtctgctgtaccactttcttcattttttctgctgtaatgtatgaaatcggcggaaaaatcatacacagaagcgccagacgccagtcataaaaaagcagcattcccgcatatgcggccaatgccactcccgtgtcaaaaatttctgtcgtaaactttcgcattccttctacgcagtcatcaacatcgaggatcgcctttgtcataactgccccttcgccttcttcctgcagtccggaacggcttctgcgcaccagaccggcatagagcacctctttcatccggcgattgacattattcgcaaaacggcggacataaaaccttttgatatatcttcctccctgcaccaccgcaatcactgccacgtatgccgctgccagaaccatcatctccgaaaactgtccagaaccatttaaaatatcaaccaggcaccccgtcatctgcccttcaaaccagggtcctgcaagcaggccaagattataaatcaggccggagaccgttacggcaaaaaggactttccattccaccttaaaataagaaagaatccggtctgactgaaacgcaccttccttgtttttactcattttcaacctaacactttctgccagtaaaacggccattcgcaatccgcttcgctacttgcttatgaacgcagtcgcttcgcgatctgtcgttcacaccgagataatgcgccttctccagctgcatcaggaaatccccttccacgagaaaacgattggtaactgcaatcatatgctcgtattttttacacatctcacacataaatgtaatcattcagaaccggctgaagcccgccctgctccatgtcctgatacatggctgcaaaggaccggttatcgttaatctcaaactgctcatctccaacatccgcttcttcttttccttcatacttttcttcatgatctccgatgccggtcgatactcctgccgaaaccttggtcgcacagatttttgcgattccgtttcgaaatgcagcgctttcgcggctggacacagtgatccctgcaaacggaagaaagattctgtacgcacacagcacctggcaaagctccttttcgcctacgtcccgcggattgattttgtcattattgacaatcggacgcagccgcgggcagcttaaggacagttccgcatgcggatatttacgatttatataataaacgtggagggccgtggccaacgcgtccttccggaaatcatccagtccgagaagcgcggaaaaacctgcgcccctcatacctcccatcaatgcacgctcctgcgcatcgaaccggtacggccatacgcgtttatgcccgagaaggtgcagcgtttcatatttttccgtgttatacgtctcctggaaaacggtcacgtaatccacaccgcattcatgcagatactgatattcatccacattcaccggatagatttcaattccgatgtttttgaaatactttttggcaatttttactgcctctccgatatacgttacgtctgaatacgccctgctctcaccggtaaggatcagaatttcttccatacctgttttcgcaattacctccatctcatgctcgatctcttcaaaggtcagcttcttccggcgaatgttgttgtaacagttgaagccacagtaaatacagtaattctggcaataatttgcgatatagagcggtgtaaaaatatacacggtgtttccaaaatgattttttgtaagctcttctgcttttcttgccatctgctccagatatggggcagctgccggagacagcagcgctttgaagtcttcaatagaacaggattcctttgaaagtgcccgttctacatctgcagcagtatatgagtcatacgaaaactcatccatcgcctttaatactttttcttttatatctgactcgatcacctgcattccgtccatatattccatatggttggtccgaaaagacggatcctgctccagacggtgcttccgctccagcgccgcaagcggcagctgatcactgtctacgaaatatacctgattttcttcctgcatccttcacaccctccttaacgcaaaaagccggtcagcggatctgatgcgcttccgcctcttgcaagaactcttcccattccggtcaggtatgcttttcttccagcttcaattgcaagtcggaaggcctctgccatctcaggaacattacctgccgttgcaatcgctgtattcgccataattgcagccgctcccatctccattgcctcacaggcctgagacggctttccgattccggcatccacaataatcggcagatcaatttcatcgatcaacgcctggatcatcgccttcgttgcaagacctttattgcttccgatcggtgcggcaagcggcattacggcagccgctccggcgctttgcagatctcttgccacatttaagtccggattcatatacggaagtaccacaaatccttcttttgcaaggatctccgtagcctttaccgtctcctgattgtccggaaagaggtatttcgcatcccgcataatctccaccttaacaaaatttccgcatcccatggctctgcttaatcttgcaatccggacagcctcctctgcgtttcttgcacctgacgtattcggaagcagcgtcactccctccggtatataatccaagatattttcgctctcctgcgtattcgcgcgtcgcagggcaagcgtaataatttctgcccctccctgctctactgcagccttgatcagattcagattgtactttcctgatccaagaataaaacgacttttaaattcctttccccctaatataaatttatcttccatcttttttctccctttctgcaagcatctgaagcatatcctactgctccatgataagctgcactgctttgtttgcctcatgtgccgcacatactgccactcttggcgccatcagtccgatcccgcctcttgccagcataaccgcaatattggaccccagtcctccaagccccgcaatcgctaccttcgcgccgcgaagcttcaccggcatctcttttggaaatctggcttcctttagatactccagaagatttcttccgtcaagctgcttttcttctccattgatctttacaatagccaaactctcctttccaggacacctgtgagtaaaacggacattcgtaatccgctttgcgttcagaaaaaatttcttcatgatacaaaaaacaccggacgatacaatatctgtatcatccggcgcctgtctgcatctgtgaaaagtggtgcccccagttcacataaaaaacagagagcacggacacaaaatccaatcatttccgacatgtatttccctacgttggcattatccaaatcaggtttcaggtcaagactataacgtctactctcagcccatccatttgagctccccatttcggctcattatatcgcacctgacctttatttgcaagtaacagtacgaccgttttgtaaagaacttgtcggacgcatccatcgaaagacggaatacctttgtagcataatctaaaagttgttaatactattaaaaccacacggtctcatttttagccgctgattcataaattgcatctaagacctgtgtcacaaccaatgactgttccggtcgtacaagcggatccctgtcttccaaaatggcagtcaaccactccttagcctccagatacggcgcatcataccgcgttccaaaaaagtcatgtggctctcccggtgtaagcacttcttctgtcagccgaccgtattttccgcgattataaatcacttctttttgatttctaagttccgctcctgctttcgttccacaaagtgtaacctctgcttcacgcgcttccagtatatttaaagcccaactggattccagtacaaccagcgctccatttttcatctttatgtaaccaattgcagaatcttctacatcatattttgatgtatcccatgccccccataagtttccgtctgtggcctgcggcaattttcccagttttttaaatactgttccggtcacagattctacatcatagttgtccatcaaccacaacgcaagatcaagagaatgtgttccgatatcaattaacggtccacccccctgctggctcccctgtataaaacttccccaggtcggaacccctcttctgcgaatcgcataagccttcgcatagtatatctcgcctaaatcaccattctggcacgcgctgtgaaggtggcggacatccgcacgataacgattctggtatccaattgaaaattttttacctgactctttccaagcggccatcattttttccgcctctacagtattaattgccattggtttttcacacatcacatgctttcctgcatgaaaagcgtctactgcaattgggctatggctaatgtttggcgttaagacatatacaacatccacattcggattcgccagcagctccttataattctggcaaacctgtgcattttctactccatactcctgtgccgccttttttgccctgtcaagtatgccatcacaaaatgctactacttcacacaaatcaccatttgattttaatgctgataaatgttttcctgtcgcgattcctccacatccaataattcctattcttaatttcatgttctcatcctttcactgcgcccataataagcgcattttgtacctgtctgtttagtaacaaataaataatcaaaacaggggctgttgctactaccattcctgcaccaattggaccccattccgtataaaacattcctgaaagactctgtaatccgaccgtcaatgttttccacttgggatcacttataaacgtcattgcgaacatcagctcattccatgatgataagaatgtaaataacgcaattgccgctaccgttggctttacaagcggaaacataattttccaaaataactgatatatattgcatccatctatacaagctgattcttccatttctataggaagagatgcataggcatttgtcaaaatcaaaattcctgtcggtaatgcaaatacaatatatgggatcaaaattgacagaggattattaatgatatgcatctttcggaaaagtaaaaacaacggcagaagtgttgcatgaagcgggattgtcattcctgaaataaaaatccagtaaactattttctttaatttccatctcattctgcttagtgcatatgctgatgtcgcaattaaaatacacgcaacaatcacaacaaacatagacacccaaacgctgttaaaaagatagcaaaaaacatttccacccattaacgcgtttttataattttcaactttccatacaatcggaggcccggcaatatttcctccaaaaatttcttcattgcttttgaaggaaaagaaaacaagccatataagcggataaatctgcacagcggcccaaaaaaccaaaaaagccgtaatgataagccgtattaaaagatttccttttcttgaacgaagtctggcatacatcttctttccctcctcaagccgattcctctttcacgcgaaataccttctgtaaaataactgccataacaatacattcaacaacgataaatatagaaatagcacttccatagccatatttattaagattaaatatactgctaaacattaaagagcttggaacttctgtcatatgaaccggtccaccatttgttaatacataaatcatgtcaaacgcctttaaagatccaattaccacaaaaatcgcacatgttctaagcattggtttcactaacggaatcgtaatataccgcgctgccttaactccacttgctccatccaattttgctgcttccaatatatcttttgatatagaattaatagatgtataaagcagcaacatatggtatccgacattctgccatataattggaacaaaagcgctaaataaagctgtatttacatcacctaaccagtttctttgtaagctttccagtcccaatactcccaacagagtattcagtactccataattcgggttataaattttcaaccacagctgtccaattacaaccgaagataatgtcattgggataaaaaacactgtcctgtaaaatccttctcccttaatgccgctggtgagcagcagcgccagcaaaagcgccagcggcagctgcgtaaccagtgtcacaaatccgagtaacagtgaattaaccgcggatcttaaaaacaccttatcctgaaacattttcgcgtaattggaaaacccgacaaagattccttctccaaatccattccagtcaagcaaactataccggaaagacataataatcgaataaaagataatgccaccgaacagaatgagggaaggtgctacaaatgcagcaatcgctgttttatttcccaatatcttattcatacttatcttgtagctgccatagcttcaacgtaatcatctgctgtcatctgctgtgcataaattccctgcagtgacgtagaatgaacatctgctgtttccggatccagcaatgtatcccatgcaaggcagaacccatctgcaccctgcatcgaatccagtaatgtctgctgaaatggtttcaattccatatcgccactatacttccatgtcggaaggattgctccctcttcatatgcataattggaaaaatgctcactcataaatgtcataaattcaactgcttcttttttatgagcgctcgtcgctgatgctacaagcgttgcacttgcgcctccgacaaatgcattctggtctccgtctgcaccagaaactgccggccagtttaccatggttaatttgccctcgagcggagatccttcttcacagagttggcctacctgccagtttccgctataccacatagccgctcttccctgacggaattcctctgttgcctcatcatttgtaagagcaacactatccgaagcaaatacaccttcatcaaccatcttctgaagttcttccgcggttttctgcacaaattcctgatcaaagtttccttcgccattcaacagcgttgttgttgcttctacaccgccatatcgaagtgccagtacaccaaatggaaacagtcccggccacttatctttttcacccatcgcaattggcgtaattccattttcattaaaggtggcggacacggcatataaatcatccattgtttttggtatttcaagaccatattcatcaaacagagactgattgcacatcagcactcctatgaagctatccaatggaagaccgtacaatgagccatcataataaaagttgttacaaatatccggcatcatagcgtccagatcaatcgttccatcttccacgtacggatcaagattttctaccattcctgcctctacaaatggctttgtaaagccacctccccaagcataaaatacatccggaactgcacctgctgcaagttgcgtcttcagcttagttttatatgcatcattgtctgcagtgtcttctacgatcgtaatattgggatgagattccttatattcatccaatgccttataccatcctctgcactgcccatctgtctgatccacgaagatatgggacacgtttaatgtgatctgctctgcatcctctgcaaaagccgtggttgtaaatgctcctgcaaccattcccgtacatgccaatactgttgctgccttttttaaatgttttttcatttgccttttgttattattcttcacgtgaataataacttctcctttcctttgtttttgatggttttattataacaaaagcttttctcttccaatctcacactttttacatttttcaacacttattttacctgttagctgtttttgatatttttttgctttttattctatatttattagttgtttttccttttattttttctgttttttctattttccatatctgttttgcactatttttcgtattgttttctgtattcagccggcgttacgcccactttctttttaaataaaatcccaaaataatttgcattataaattcccactttttcgcccacttcgtaaactttaaagttcccatattgcaaaagctgctttgctttatcaatacgttgttctgtcaaatactctacaaatgaactttttaccttttctttaaaaaaacggcttaaatagctgctattcatatagtatacctttgccaatgccactaatgaaaaatccgggtcatctaagttttcttttatgtattgtttcatagaataaatgagtttgtaactgtctgccgctgtctcccttccccttagcatctcctgcaatgcctgacatcctattaaaaatgcattttttaactcaagtatattctccgcgtgttttacattttcataaaaattcatatattgcactgcaaatgcatcaatgcaacgatctccgaatgaagtgtaaaaataaaaatagatattcaataattgcatccgcaacagttccatatcatctaacgtaacatctttccatttcagaaaataactatcaattactttttctacttcttctaaaccctctgcctcaacacaatattgcagccttttcaactcgttgagatcccataactgcttggtttcttttttttgctgtttccatctccatatatcttccggtttattttctccattaaccaattcgatatttaattgattaaccgcctctatatagccctcatgaatactcttttcctgattatatataacctctgtcccataatacaacggacactcaaattcctttttccattcctctttcagctgctttagtatcgtctcaggcatgatatctttttcaggatcaagaataatcaacctattatccattccatgaacccaaaccattttttttaatttttccttacaataattgacaatccacatctcacaatctgaaagttcttcattcccagcccttttggcagtcaggtttattttccattgaaaaacaactatccatactactgagcttgtttccaaagccaattcctccatcaactggctattcacaattttttccggcacatcagattccagaagctttgtcaaataataatttttaacgatttcctctgcttctcttttaaataccgaaagagtttctatttcatttctctttctgttttcttccagaatttttttcttgatcttaacaatacattctgtaagttcttcctcattgatcggctttaaaatataaccgtccaaccctatgcaaattccccttttcgcgtattcgaaattatcatagccggtaattgcgatcacttttgtgtctggatttctaccctttattttttctgcaaaagtcagaccgtctatatctggcatgcagatatccgtcaaaataatatccggctttaaagactcaagctgccgcattgccagatctgctgatgccatttctcctacgacttcaatatctaatgctttccaatcgattatatttctgattaattgtctaagtaaatattcatcatctacaataatcagctttagcatattcaacactcctccacttcaattttcattgtaattgtagtacctccattttcttccgactcaatactccaccaaattcgatctccataacaatactgaagtcgatgaagcgttgcaaataatccgaaagatttgccatttcttccctcttctcctgaaatagcctttttcagagcttctttagacattccgcggccattatccattaatgtgattttaatctccttttctcctgtccggactatatcaagattaataatcccttctgtcgtaaacccatgtatgccatgattaattgcgttttccaccaacggctgtaaagcaaatttcaaaattttccactgcataatttccggatccgccgagtatctatattcaaactctccaccaaaacgcatttgttgaatatcgacatagctttttaacatcaccaggtttttctctattgttataaaatcatctcctttgctgagattaattttataaaatctggagagcgcatctatcattgcatatgcatcatcatatcgttttaaaacaaacaatgcttttatggaatcaaatgtattatataaaaaatgaggatttatctgtgcagtaagcacttttaaatctgcttttccctttaatcgttctgcctcctttgttttttccagcaattcattgattttttttaccatttcattgtaaacatgtattagttcctgtatttcgtaatgagcagaattcattttcactggctgaaatacaccgttttgcaaacagcgcatcgcaatcatcagctcctttatcggtcgtgtatatagtttagaaatcataacaatgcaaaccagggtgagcatagcctgtaaaataatcaatgcaatatccattaaacttctctctcggtttctttgataggcatcctctaccgaaatggcatccatataatacccttcctccgatttcaaaatacaaaacatatatttttcatcgaacatattccggagcaccattgtcttttcattctgaatcatgtcttttccgattttctgcatttcgtccgtatacacatcatcagagatcacaattacagattcctcattattcaaaagacaaaatatactttcgtatttgtctgcattatccgccactaaaaaatcctttaacacgtcggaagagaccgtcataatcatataaccgatttttttaaaattagtcgtacttcttactgctcttctaaaactgatctccggcatatcaccttctctgtaaaaatcatcgcttgaaaaatcaacatgatattccccatattcctcttcatcataccattcataatcttcaatacaacgatatcgcggataatgcagcgcctgcttatctgctgatgctaccaatccattgttactatacaaataaatagattctatctgctttacatttacaaccagttcccacagataattattaaccttgtcctgcaatgcaaaatcaacctgtccactcgaatttttttccaataactcctgaactcccgcattggaaaaacaaatcctcgaataaccatccaaagtgtctactaaattttccatcatcttatctatactatccaaatatgtcaaagacgcattttcaagtttttgatatacgaaaaatgaattataatatctgtttacgccaagaaagaccgtgaggattaaaacaatcgacacggtcataacgattgacattttgctggaaatacttactctgcttactttctctttcattaatttatgtatattcatatccctctataatgtgattttatacacactttctgctgttttatataacacttgttccatttctttttctggcacaacggttttgattgtttcatattgcacagcaacattgtttacgtggtctgaagaaaacatcatcttctctgcccccagttccttataaatcatgcccatatctgcaaccccggtccaagtcggttcaagatacacattttcacaaatctgcgccaaaataaccgcttctctggccatcaatcccattcccgcatgtgccactacaatttttaattcaggatactcttttgcagctttcaaaatatgcatcggacttgaaaatggtattcctgatccggtatgaaccatcatcggcacacccaattcagctgccacagaaaaagcatacataccatcctctgattcaggatcacaggcgtgaccaattggtgttaatttcaatcctacaaaaccaagctcttttacgcaccgaatagcttcttctctatattcttcctgtgtgaaatgcggataaatagatgccatcccccagattttcattttatcacacttcgaaaattcaaaaattctatcatggatttctttatttgcctttaatgaaaaccgtggtaacgatggctgtacaattgctccctgtacgatcgtatccttatagccatccagtaaattttcctctgtaattacatgtccaaacacaacatctttgcccaaatgagcatgtacatccagtgctctcatatttttacccttgctccttcctgtcattttatcgcttcactcgtgcgccagccccctgcataactgcctcaacctcttttcggtttgccatactggtatctccaggtgttgtcattgcaagcgctccatgtgccactcctaattcaagtgcagtttccggatctcctgtcgtcaacatcccataaatcagaccagatgcaaaagagtctccaccgcccacgcgatctaaaatctcaaggttctcatacctttttgaagtataaattcgaccttctgcccagcaaatagcaccccaatcattcacagtggccgtctttacctctctaagcgtcgttgccaccattttcagatttggatatttctctactacattattaatcatattctcatatccttcaagatttaatttctttaattcattatcattgccatctacatcaaatcccaaacacgcagtaaaatcttcctcatttccaatcattacatctacatattttgccacttctttatttacttcctgcgctttctccataccaccaattgcagaccacatagatgggcgataatttaaatcatacgaaacaattgtaccatattttttggcaatttttattgcatccactaccgtttcacatgatttttctgaaagtgctgcataaattcctcctgtatgaaaccagcgtacaccaagctttccaaaaatatattcaaaatcaaaatctgccgaagttgccttggaaattgcagtattcgcacgatccgagcatcctaacgctccgcggattccaaatcctcgttctgtaaaattcaggccatttctgcatacccgtcctattccatcagtatctgcccacttaatcaatgatgtatctacttttccctgacagatcagatcttctaacaacattcccacttcatttttggcaaatgcagaaataactgctgtatttaacctaaagcacttactcaggcctcgaattacattatattctccgccgccttcccaaactcgaaatgaacgtgcagtgcgaattcttccttcacccggatccagtcgcaacattacttcgccaagtgaaactgcatcatatttacattcacacgattcctttagatgtaaatccattttttcattttctccttttttcgtttctatttttctgacctgatttcatcttttaattttgcagcttctgctaccagacttcggattctgtcaaattcactgttttgaatccattctctttttaccatccagcttcccccgcaagctgccactgccttacatgaaagaaactcttttaaattatctttatttattccaccggtcggcacaaatttcatttcattatacggcgctgccaacgctttaatcattgccaccccaccaaactgaaccgctgggaaaaatttcaccatttttaaaccacaggcgatcgcctgcattatttcagatggtgtaacgcatccaggtaaaactggaatttttcgttccaggcaatagccaaccacttttgaatcaaacccgggacaaacaataaatcgtgcacctgcatttatcgcacgttcaacctgttctacatttaaaacagtcccagctccaaccatcatatcaggatacttttgcgtcataatgcggatactttcttccgcagcctgtgttcgaaatgtaatttccgcacacggaagcccacccgccactaatgcttccgcaagcggttctgcatttttcgcttcatcgatcacgataaccggaataactcctattttttcaaatttttcctgaagatccttcatactactgcctctttccctcaatattaacgatgctgcatctatcattcgttctcataggtaggaattactgctccttttgatgcagatgccacattttttgcatactgatacaaatatccttctaccttttggtgacatgtgtatttctttttccttcgttcttcaaaatctacatctattgcatcaatttttccattttccacatcgactgatatcatatccccatcctgtaaatatgcaatcgctccatcgtccgcagcttcaggacaaatatgccccacaaagcacccgttgtttgatcctgaaaatctgccatctgtaatcagacataccttcgatcccaagcctaagccaactaatagcttcatagctttatacatttccggcattcctggtccaccttttggtccttcatttcgaatcacaacaacttctccaccttgtatttctccattccgaattcctgtcaacgccgattcttcactttcataaatctttgcttttccacaaaagtgtactgcctcttctggaattgctgacggcttcgttaccgcaccgtctggtgctatatttccatacaggatcttaatacctgctcgcttatgtaccggattttgaattgcatgaattacttcccgcgatctattttctgcatgtatcaaattctcacataatgtatctcctgtgcatgttaatgcatccacatacagttttgcttccatctctttcatcaaagcctgtacgccgccagcttcaaagaaatcaaataatgtatattttccggccggaatcatagccaccaaatgctgaatctcactgctgatcgtctcaaaatcatctattgttaaatcaatttttccactatgtgcaattgccagcaaatgcaatacagcgtttgttgaccctcccatcgctgaatttaccattattgcatttgccagcgccttttttgtaataatatcctgaatccttatattcttatgtaccaaatcaacgattgcttttccactattgtaggcggcggccatacgtttactatatactgccggaatcgtggctgaacctggcagcatgattcccatagcttctgcaaggcatcccattgtatttgctgtaccaagcatcgcgcaggatccaactgtcggcattgcattatcctctatccatttaaactctttttctgtaatcttttctgcctgtaaagctccttccgactgctgaatgcaggaatggtcgatccactctcctccatagggatttccatctgccatatgtcccggaagacttggtcctccattaataaaaattgtaggcaaatttaccctcattgcccctatcaacattcccggaataattttgtcacagcttcccagtaatacaatgccgtctaaacgatgagcctgcaccattgcctccacatcatttgcaatcatttctcttgccggaagaatataacgcatgccctcgtgtcccattgcaattccatcacaggcaccaattgttccaaattcaattggcatcccccctgccgcctgaattccttcacgaattctttctgccatctggcgcaggacaatatggcccggacaaatcgaattatatgcatttgcaatcccaatgattgggcgtttcagctcctcttctgcatatccgtctgctttatataaagctcttacatttgcatacccgggaccctgtaaaatttcatgacttctgtaagacatcttttatcacccttccataaattataatctctcgcaatcttcagcctaataaactcaaaacttttatcgtattaactccagttttccatagtcatacagcctgctaaaaaaggcaggctgtatttcttattatttctcacatgtaacatatctaaactgatagttaccggatccaatttcttttctttcttgtcccgggatcagcaaaactgcatccgtatttggcggaattaccacagacactaaaatttcgtcttcgtttctctcccaatctatgcagacttctccatacggtgtctttacactggatgatacaaatctaagatctcctatcattgccggcttaatttcaattttcttgtatgccggctttaatggcttaattccagccagcttttcgtaaaagaagctacttatactgccgaacatcggctgattatgattcgcaggacactgataaaatccatactctttttcccagtattcccataatgtagtggctccatttgtaatcatatatccatagcttggatacgttacgctagtaatcatatgataggctacttcaccaagaccaaattcaacaagtgtttcaaataataatggtgtcccaaaaattcctgtatctaagttcccttcgcactccttggtaatatgtttctccaaatactgttttacttcgcaaagttccctttctctgatagcacccaacttattcgcaaatgcttccgttccctgtgccccaatactgtacctgccatttttagaatcataaaactcgtttctaaagctaagcactgtttcattatattgattttgaaaatattctgcatctgctgaccgtccaagcacctctgccaattctgtcataagtttcgcattatatgcatagaaaaaagtattaacaaatcgcggaggtattaaaatttctccaggtgtcgaccattctccaagacaatccttatctgtaccttcgccctcaacaattcctttttccattccggtctgcaggaattgcatccaatgaatcatattatcaaaatactcttctgcgctcttcgtgtctccgtagtaacgatacataagccatgtgataataatcaaagcacttccccaagccggaccaccaccgccgtcctgacatggtactgtgtgtggcaaaaatcctgttgtcttgtcctgtgcatctataaagtcatccatccagtcggaatagaattcatgcatgtcatagctatacatcatagcttttgctgtaaccaatgcatcccctccatacccctgccgttctctgtgaggagaatcaagtggaatgcctccatgtaaaccactctccatcgaccacagacttgctttctgaatctgattgatcaatgcgttagagcatataaatttacctgaccgttcgacccctgcccgaatatgcactgccacaaagtcttccatctttggaactcccggatatccctgtacctctacatatcgaaatccatgccacgtaaatgccggttcataatattcttctttttttccacttaaaatatagatatctttttgctgtttccacccacttccagtactataataatttattttcccatccggccacagttcttcaccaaaccgcagctgaaccttatctccctctttgccagatactctcattttaacccagccagtcatattctgcccaaaatcaatcacatacattccgggcgttacttcactgatcttcttgggaaaaagttcgcaaatcttttgatctgacggagctttctgtttggttaattctccgcctggttcctctgctttacctgcaaatttccaatccaggtcttcgaaatctttttctcgccagcctacgctctccttacgtgcatcatatatttctccaaaataaatattattataaattctaggactttcatgccatttcgtattttcatcgcttataaatacatctttgtctccatcttcatattctatttcaatctggaacaaaagctttggatatccataccataattttttttcgttaattttatctttttggttataccatccattgccaagctcaataccaaaaacattttctccgcgaacaatcgcagttgttatatcatatgtatggtaataaactcgttccacataatgcgttcgattcggcgtaagaacatcttctccacatttttttccgttaagataagcttcataatatcctaacccggaaatatacaaccgcccggttttcggctgcttctctatattgcagacttttctaaaataaatcgctgctgccctctctgacgcacaaatccactctgcttcccaatccgtcttatttaataaaccagcttcaaaaaaagcctcatcactccattcagaaacattttccttttcatcccatatacgaactttccagtaaactctctctctggataaaagcggctttcctttatacgaaatgttcacagattcttcggaataaactttttcgctatcccaaacaagaacttccttaagatctgaagcctttttaaatgcctgaatctggtaggcactctgtttgcggttttttccatacgccttcattctccaggataagcgcggagctacattgtgaattcctatcggatttaccttataatcgctacgtaaatcgatggccttaatttcttctttactgcccttcatcttatctccaatccagaacaacacccagtgcctgcgtgcgatcctttaacagcatctgatacatctgcggtgcctctttatagcttacacgatgtgtaatcatttctgacatatctacctgtttgttgtaaatcaacttaaaaaatgtttcactatttctttcacatgtccacggattgtcataagtttttaccggtgcctgtgaagatgtatgtgcgccaataatgtttacacttactgcattacaacaatcatgaaaatcaattaaggtttttttcttaggtgaactcaacatacaaagctttccctgctggtgcaaagctaaaaattcttccggaatcgcatccgcatttcccgttgtttcaataacaatatccgccatatccccatatgtatattcttttataatcgagattggatcttcttttgtagagcaaattggaataattgccctctgatcaggtaaatgcttcagtcttgcttcactcctgtttaccacaaaaatttctgtacatcctcctgcaagtaaaaacctggccgccagttgacctacaataccagctccatatactacaaccctgtttcctaattcgataccagttcttcgaattccattgatcgttgtttctgcaagtgcaaaaaatgttgcttcttctggtttaatttcataattaatcatacgaagctcatttacattcacaatgacatactgtgaatgtccactgaaacttgctacacgtttcccaattaaatcctttgaaacaccttcacctacttcttcaataatacccacatttgagtaaccgctcttttgcggatagtgaatatattctgaccattttgatttttccggacattccccagtcaagaaagttaattccgttcctgtgctaattaaggtttgttctgtccgaatcaaaacctctgattttcctggcttaggacaatcaatttcttgtatttcaaccttacatggttcagtaaaaataacagtattgcttttcattttttcttcctccatccgttaaattgtttgtttttcgttcatttttccatattttttagtaactttattatacatttgttttttctattttcttctcagtatttttacctgttttgtatatttttttgtctttcataatctgatgttctacacataaaaaaactgcattatttaaaatacagttttaggtaaaaaatatccttgcacaggctcaattggttttaccggaatatttctttatctgccgcatctgtttcacccatgcatactcctgatataaaatgcaatctgatagggcagtctttcttccggggtcttcagctcgtttcccagtacttttctgatgtttccaatacgatataatatggtattgcgatgtgtatagagttcctccgctactgcctgaatgcttccgttgtgtttcagataggaccgaagtgtttccacatagcccgcatggtatttacgatcgtattcttccaatgctgccaggcattctgtttccatctcttttagtactgctttgtcttccaccatatagagcagccgaaacagtccgcagtcgtcaaactttaccacctgctttttatgcgtgaccgccatcctggctgccgctttcgcccgccggtagcttacggaaagccgcgaaatatccatacatttgcttcctattcccacacacagctccagctccggcatacgcctttttcctctctttatagcaccttcgatcagctgatataaagtctcttctggaacctcattggctaccagcacaaaatctgaattataataaaaaaagcttgcattatgcgtaatatcctccagatagacctgtatccgataagacagcttccttcgctctaccgtatccattgaatccagcccttcacaagtcagcaaaagcacctgaaagcttccatccacagcaaaatactgcagtaattctttccggtaggcttcctgattgtcaggagtctcaatggccgcaatcaatgcagatgcaatctgctcatcggtattatcctgcaaaaacacacgaatgctgaaatcctttatcatatctgacaaatggacttcccagggcaccgtcagcagcggaaggtcgttttcatcacagtatgctcgcaattcttccggtatctcattgatatactgccccacattgatgatcagaccggatgcatggtaccggttcagcttccttgccagattcatccagtcttccttttggggaaatcccaatcctgttgtcaccgcaagctccttgccccaaaagttctgaataattgttgtatcttccagaagatgcacccagctgatcgaattcgcccagccattttgtccggccagaaatttcatctcatacttcttttctcctgtcaatatcatatcttctattgtaaaactcatacgatatgccttctccctccatttttgttctgcacttacacttttccgtttttgctctgcacttacacttttccgtttttgctctcacttacactttctcgtttttgttccgcacttacacttttccgttttttcctcattatatcatacctttgtgccgtcagcacatattttgcctgcgctttttagagttgaaccccatagtttttctctgattttgtgctaaaatgtaaataacttaagaaattattaaaggaggcgtgattatgagattcgcactttatacaaactctccggatgcacttccggccccggaatggatcagaacggaacgttatatgtattgtgacaattttataaatgactatatgaagtccagacgttttggtcttctttcattggtcagacgtctgcttcacaaatgatatacggatctttgttctaaaaaggacatcctcttctcggatgtcctttttctctgctgatcttatttatatttcgtacgctctgagcttttcataattgtaatcagtgaactaagcagcaacagcatcgggtaaaacagcttcggcatgatctgaaatgcagaaatctcacagcctaattcattcaccgccgagatcgcaaccagcatctgtgcgccataaggaatcactccctgaaaaatgcaggaaaaggtatccagaatggaggcggtctttctcggtgtaattccgtattcctctgccatctcctttgcgataggatttgccattacgattgccactgtattattggcagttgcgatatccatagttcctaccaaaagtcccattccaagctgtccgcctttttttccacggaaaattttatgtatccagctaagaagtgcatcgaatccaccgtattcacgaatcagcgcacacatggcagctaccagaattgccaccatacaggtctcaaacatccctgagacacctgatcccatatttttcagaatctctaccggggtgacatgcccgcctatcagcatgataaatgcaccggatacaattcctgtcagcaagaccacaaatacattgagtccaacaattcctccgatcaataccagcacatacggtattacctgcagcagatggtacggctggctgacctgccctctgatttctatctgaaaggacaggatcagaatcaggatcagcgtgacggctgctgccggaagagcaatccagaagttttccctgaatttgtccttcatctcacagccctgtccattgcatgcagcaatcgtcgtgtcggaaataaaagaaagattatccccaaacatggcaccgcccataacagaggccacacaaaatgccagattaaatccggatgccgtggaaactgccgccgcgatcggcgtcagaagcgtgatggttcctacagaggttcccatcgccacagatacaaagcaggcaactacaaacagtaccgccactgaaaatctggccggtatcaggctcagcatacagtaggcaacactctccgcactgcttcttcccacgacccctacaaaagagccggctgcaaggaagatcaaaagcatcgtgatgatatttttatctccgaccccctgcgccataatctccagtttcttatcaaaattcagttctctgttctgcagacatgcaaccagaatcgctgcaagaaatgcgatcacgataggaacattataaaatcccattggaattttcattacatactcaaacaaaatccccaagccaaggtataatgcaagaaatacacaaattggcaacagggcaatccctcttccttttctcatttttcatcctctttctgctggaagctgtttataattaactgttctttgctcttttttcatttcatacgtaccatgcaaaaaatttatcctgcgtaattttatcctatatgtcgttctttttccataaggcaatttttctcaatgccgcgacaaaagaactacagtttcacaatgcacagtcgaacagaacatgtcaacgcagcaggccttttccacccgataatcgctgcggatcaggacatccagatcgcgggcgagacttgtcggcttgcaggaaatgtagaccatgcggtcgacgccataggcgatgatcttcgggagcgctttcggatgaatgccgtcgcgcggcggatccagaacgataaaatccggtttttctgagacttcatcaagcactttcaggacgtcgcctgcaagaaagctgcagtttgacaggccgttgagcgctgcgttttcttttgctgcctcgactgcctccccgacgatctccacaccgatcacttcttttgccacagatgccagaatctgagcgatcgtaccggtaccggagtagagatcaaacacggtcatgtccttcgtatctccgatgtaatcgcgtgcggtactgtaaagcacctcagcaccaagagagtttgtctggaagaaggagaacggtgtgatcttgaaacgaagcccaagaatcgtctcgtaaaagtaatcctggccatagaggatccgcgtctcatcgctgcgcaccacatccgcaacggaatcattgatgatatgcaggattccaacgatcgttccctccagcggcagtgcacggatctgatcgacaagcggtgtcagatcgtattcccgctgacttgtcgtcacgagattcacgagaatttcgccggtcgtctccgcgcggcgcagcagcaggtggcgcagccagccctcatgggtcattttatggtagtaaatgctgccgcttcttgattccttccgttctatctccttgaaatatgcaagcacgcacttcagaatctccgtcatatcggaatgcacaatcttacagtctgatgcggtcagcacatcataggtgcttccctttttgtgcagtcccagggaaagcggaccatccttgtattcatccccaaatgagaattccatcttattgcggtatgcaaattccttcgggcttcccttgatgccctcaaaaagataatccggctttccctcttcatccgtctgtcctgccccggcaatcgccgcatccagaaggctcttcacctgattcgccttcattgccagctggtcttcatacatcatcgtctgatacatgcagccgccgcactgtgggaaaatgctgcagaccggatctcttttttccagcggtgacttttccagcacctctaagagtctgccctccatctgatttttgcgttttttattgatctgaaaacggaccttctgccctggaattccgtttttgatggtcacggtgccttcctccgtatgcactcttcccttgtttggaaaatccacccgctcaatgatgccttctgaaatatctccttttttcatacatggttcctttcttttcctgtatctgcttccttttataacaatccgcctgtctgcccgtaaccgggctgccgcccaccagctgcctgcatctgctcatgattgaccaaaaatgagcaggtgccttccggccgcctgcccatctgcttcttttttgatttgtaactgttcagagccaagcaaaatttcataaaacaggcggaaaatgcttgcatttttaagcctgtttttgaaattttatttggcggatacgccacaccgacgaaatgcgtagcattttggaggttggctctgaacagttactttgattttaatctgaaagcaccgcaaagactgtcctttttataactctcttcgcagaacttttctcccttactcttcctcggaagcctcttttttctcttctgcttcctctttttcttctttggcttccggagtagcctcttccttttcttcgtctgctttctcctcagccttttcctttttgtccatctccgggaaatcgtcatcatcaaagaagtcatcgaaatcatcttcgaagtcgtcttcgtcatcgaaatcttccagataatccggtgcaaagtaacggtatactgcatatgcgataccggccactgctgctaccgcgccgacaattgcgagaacccagagtacggtatttttatttttgtcttcgtctcttttctttaatgcttccatgagttcatcaatcttaatcattttgccacgtcctttccggtgcagatcatgctgccctgtaaattactgcgttctctgcagccttttttatagtatagcacatcctctcggattttactatataatattcgttcagagccaggtaaaatttcataaaacagaggttgttgtttcactcagttctccgtcttcaccagcttcgcaaatgatgcaaacatcttcttcacaccgacccggtcaaaattgaccgtcacttcgtagtctctcccgccctcggcgatattcgtgaccgttccattgccaaacttgatgtggcgcacgcggtcaccgacattatagctcagaccgtctgccttcttcacttcaaactgctgctgtgccatgatcttcgtcttgaaattctcacgcatctgtcggtaagccgcatgggccttcgtctccggcagatcctttttttctttctgcgggatttttgcgcgctcattttccgccatgaattcttccggaatgtcatccacaaaacgagatacacggttgtaatggatctcaccgcgcaccatgcgctgttttgcactcgtcaggaaaagattggtgcgtgcacgcgtgatgccgacgtagcaaagccggcgctcctcctccagttcgctttcatcctcggaagaaatgctgatatagctcgggaaaacgccatcctccatgccgaccatgaaaacgaccggaaattccagtcccttggcgctgtgtaacgtcatcatcaccacatggtctgcatcctcctcaagattgtcgatgtccgctaccagggcgacttcctcaagaaatccatccagggtcggattttccgtcttctcatcataaagcgctgctttatttaaaagttcgtcaacgtttgccatacggtcaagtgcctcgtccgtaccctccgcctgcagttccttcatatagccggtctgctcaagaatgtcctcgatcagtgattttactttataaaattcctgcttcgtgcgcagcacctggatcatctgcacaaatgcctgcagctttgccacgctcttgccgatgcccgggatcgtctcagccacacgcagcgcatcgtaaaaactcgcaccgtgttctgtcgcataatcctgcacccggctgatcgttgtcgcgccgattccgcgcttcggtacgttgataatacggcgtactgccaggtcatcctttccgttggcgattgttttcaggtaggcgatcacatccttgatctcttttctggaatagaagttaacgccgccgacgatcttgtacggcacatttgcgtacagaaatttttcctcaaacattcgggactgggcattggtacggtaaagaatcgcacagtcgccatacttccatttgcccgcgccaaccttctggctgattatgccagccacgtactcggcttcttcaaagctgttcatgaactggcggaaccgaatcttttcgccctccccattgtccgtccagagcgtcttttctttccggcccttgttgtggctgatcaccgcgtttgctgcatttaagatattctgggtggaacggtagttctgctccaggcggatgacctccgcatccgggaaaaactgctcaaaattcaggatatttccgatgttggctccgcggaacctgtaaattgactggtcatcatcaccgaccacacacaggttgcggtattttgccgcaagcagacttacaagtttgaactgcgcagtgttcgtatcctgatattcatccaccatgataaacctgaaacgctcctgatactgctccagcacttccgggcagctctgaaaaagctctacggtacggcagatcagatcatcgaa

SEQ ID NO: 3000 - DNA, 5178 bp, Unknown
  16S sequences of unknown bacteria
ccaggttgatggcagtggccggactgaggaacgccggttcgcgtatggcggcaatgagacagaagacgaccatgacgtaaatcagaatcatgggcgtactggtcagcgccattttcagtttctggtttttcgtggtcatttctcttcgacctcctgttccgtagtctgtgcagcgctttttgcggcatcggaggcgccgatcagcagattcgaaagcgacagttcgtcgatggaattatccacagcggcctcaaccttgccgtcgcgcatcacgatgatcttattgcagttctgcaccagctccggcaggtcgtcggaaatgacgataatgccaatacccttctgggccaggtcgcgcaaaatggcatggatttccgcctttgcgccaatatcaacgcccaccgtggggccgtccagaataaagagcttggggtcggtgttgagccatttggcaatgaccaccttctgcgcgttgccgccggagagcgtccgcaccgcaggcttgggcgagggcgccacaatattgatctcgtcaatccagcggcgcgtaacggtttccattgcctgctcgtccagcttgccgcctttcatatacttgcggatagaagaggccaccgtattgtcctgaatagagcgatccataaacagcccctgggtcaggcggtcctccggcacatagccgatatcgttggccatggcatcgttgacgctttttattgtgatctccttgccattgagcacaattctgccgctttccgccggggtcagaccgaacagcgcctggccgatctcgccgcggccgctgcccagaaggcccgtgaggcccagcacgtcgccccggttcagggtaaaggacacgtcctcaaaagcccccttacgggtcaaatgctctacgcgcaggatttcttccgcattttctgcaggatggtatttttcatccgacacatcgtggccggtcatatcacgggtgaagcgagcctgatcgtattcgctgatgggaccgctggatacatacgcgccgttgcgcaggatcgtcagccggtcggcaatgcggtagatctcatccagcttgtggttgacgatcattaccgcgatgcctttttccttcagcttgcgtacgatatcccacagtttgtccacctcgcgggcggtcagcgccgtggtcggttcgtccaggatcagcagctttgcgtcgttgatgatggcgcggcagatcgccaccatctgtttatttgccacactcaggcgctcaagcttcacatccgggtcgatgtgcgcaccgacctgctccatggcaagccgcgccgtttcgtgtatttgtttccaattcacaaattttattttatttttcagttccccattgagcgcgatgttctccgccaccgtcaggttcggaaacacggcaaaatcctggtaaatcacctggatgccgcggttgatcgcgtccatgggcttcatcttttccactttttctccatcgatccagatagagccttcatcggcattgtgtacgccggagatcgccttgatcagcgtagattttccacagccgttttcaccagccaggcagtgaatttccccttttcggatctccaggtcgactcccttcagagcgtggacgccgccgaaggattttttgatgccttccagtttcaaaaagacttcatcagccatagtaccggccccccgtttttcctatatagtctgtctatgcaaacccccatgcggggcgtatgccgccgcatgggggtttctgatgcatccgcttaagtattgttcagttggtattgcgaactcttagaaatcgtaatcgtccagattgtccttcgtcacgtccacgcgggcgttgccgtacagaacagtgggaacatctgcatcgggcgtcagggtgtcgtaaccggcagcgttcagggacagtgcggaggtatccagctctgtgccggctgccttggcatccagaacggcgatggccatctcgatcatagccttgccagcctcagcgggatcccacacggagaaggtggcgatggtgtcgctctccacgaactgccgtgcgatggaggtcatggaagtgccgaccacagcgaccttaccggtcaggcccagttcttccactgcctgcgcagcgcccacgacgtcagtggaagcgctgccctgaatggccacgatgtcggggttggcctgcagcagttccttggtctggttgtaagaagaagtggtgtcgtcgcccgtctcataacggccggcgttggtcatgttggtgtttgctgcgaaatactcgtccgctgcatcgcaccattcgttgtgggaaacagagttcaggtcgcccacgaactggatgtacttgccttcgccgccggccagctcagccagctcctcggcaaagtgcgtgccgtaatctgcgttcacgaacgcctcgacgtcatagtcgaaatacttgggatccatggaggaagcctcgtgggtgatgaccacgatgccctgatctctggccttctccagcacgggagccagggactcggagtcgaagggaaccacgcagatggcgtcccaatcctctgccagcagctgctccaccacgccggcctggtcggcgccctcggcgctgccgcggtagacgtagttggtgccgttatcggcattgtaggcgttcacgccttcttccatgcgctggaaccagccgatgttggtcatcttgggaacgaccgcgatcttgtaatcggtcccctcagcgccgctgttcggctcgttggtgctgccgccattttccttggggccgcagcctgcaaacagggtagcagtcatgactgccgctgcacccagcgcaaggagtctcttatgattcttcatggtaatcaggtcctctcttcatctgattttattcggtcttccaaccgtacccttatagtaaaatattcatgccttaatgtcaagaaaaattccacaacaaaacaaaattttgccatcattttttgtcgaatttctacagacaacacccctcaaaacatgcaatttgctaaaaacggggaaaaatatgttctgtcctttgtaacattatactaatccccggcaaagattctcccatatacggccattcatccatattcagcggacaatctttgtgcaaatgagtgtcccgcgcttgatttcgcagcacaaatccgttatgatgctgtcagaaccaccaaaagaaatgggaaggagtcctgttttatgagtaaatataccattggcattgattacggctccctgtccggccgggcagtcctggtgcgctgcgacagcggcgaggttgtggccgaaagcaccatggactatccccacgccgtcatggacgccgccctgagcgacggaacgcccctgggccaggactgggcgctgcaggacccccaggattatctggacgtgctcgataccgtgatccccgccgtgctgcgcgagagcggcgtggcggcagaagacgtgatcggcgtgggcacggacttcaccgcctgcaccgtgctccccgtgaaagccgacggcacgccgctgtgcttcctcccccagttccgctccacacccaacgcctatgtgaagctgtggaagcaccacgccgcggaaaaatacgccgcccgggtgacggagatcgcagcccagcggggcgagccgtttctgcagcgctatggcggcaaaatttccagcgagtgggagatcccgaagatctggcagattctggacgaaagcccggaggtctacgaagccgccgaccacattgtggagggcggcgactggatcgtctggcagctcaccggcgttttgcgcaagaacacctgcgccgccggctataaaggcacctggagcgcttcggaaggctatccctctgaggacttcttcaaagccctggacccccgtctgtccaactatgtttctgaaaaactgaacttccccgccgcggccctgggcagcgccgtgggcggcattacggaggaaatggcccgcagaaccggcctgcgccccggcacccccgtgtccgcctccatcatcgacgcccacgtggccatgccttccgccggcatcaccgggccaggccagctgctggcgatcatgggcacctccacctgcgacatcctgctgtcgaaggaagaacgcatggtgcccggcatgtgcggcgtggtggacggcggcgtatatccgggctattacgcctacgaggcgggccagtcctgcgtgggcgaccatttcgcctggtttgtggaccgctgctgccccgccgcttacaaagaggaagccgaccggcagggcaaaaatttgcacgtttacctcaccgagctggccgaaacgctgcagcccggcgaaagcggcctcattgccctggattggtggaacggcaaccgcagcgtgctgacagattacgacctgacgggtctgatcgtgggtatgaccctgtccacccggcccgaagaaatctaccgcgccctgatcgaagccaccgcctacggcacgcggatgattgtggaaaattttgtgcgccacggcgtgccggtaaccaaatttgtggccaccggcggcatcagccagaaaaatgccatggccatgcagatctacgccgacgtgctgaacatgcccgtgcacatcgccgacggcaagcagggcggcgcattgggcgcggcgtgtttcgccgccgtagcggccgggaaagcggccggcgggtatgattccatcaccgaagccgccgccgtcatgggccggcagaaggacgccttctatgcccccatccccgaacacgcggcagtatacgaaacgctctaccgcgaatacggtgccctgcacgactatttcggccgcggcggcagcgacgtgatgaaacggctcaaagccatacgcaccaaaatcaaaggatgaccggaaagcgcaaaagggagcacggaaaattttccgtgctcccttgtttcaggttggatcgtcccagtcttcttcgtcgccgccggtttcgcgctgcattcggcgcacaaagcgccgcgtcggcatatccagaaagcggttgccgttcaggggcatgcccatttcctcctgatagatgcgagccactttccgcagggtttccagacaggtctcgttgtccagcgcgtcgttatccagcacccgcccgatgcgctccatggcacagatggcgcggctgttcaaagcgtcgtccatggc

SEQ ID NO: 3001 - DNA, 24921 bp, Unknown
  16S sequences of unknown bacteria
tcgcctgattttaaaaagaatcaaaatgtgattctttttaaagtgcaaggtttttcgcaaaattgcgcaaaaaccttgcacctgaacaattcaaaagtttataccaacatgctcgggttaaggttcttttgaattgttcagcaggcattaatatagaaaaaagcggttttgcaaccgctttttcaaacaaaatcagcggaactttctcttgcgagcagcttccgacttctttttacgctttacagagggcttttcgtaatgctctctcttgcgcacctcctgaataacgccgtcctttgcggtctgccttttaaagcggcgcaaagcgttatcgagagactcgttttctttaattctaacctgactcatccgtattccctccctccgcagaatagcaggggtaatttaaaatgcacaaagcctgtccacaaagggcggctgcatgcaaagggctgttaaccccttaaagcaataacatttgcaacaatcgccaaaatgaaaaacacaacggcgatccacttagtccaacgcgccagagacgcgtcgaatgttcttgctttattcttggaaaggaaagtatcggcgccgccggatatagcgccgttaataccggcgcggtgaccctgctgcaaaagaaccacggcaattatgaaaagagaaaccaaaataaccgcaattcccaatattatttcaactgcactcacagattacacctccatattacgaataggcacaatatataataacacaaccgattaaaatatgcaacaaatattttgcacaaatccgcattttatttcacgacaatattaacaagctttttaggaacatacagctccttaataatacttttgccctcgattgcggccgtgaccgctccgtccgccttagcggcggctattgcatcgggggcggaaatatccgccgcaacatttatgcgcgcctttatcttaccgtttacctgaacggcgatttcaaccgtgctgtcggcgcacttcgcctcgtcgtacttcggccattcagcctcgttcagcattccctcaaagcccgcctgctgccataattcctcggtcatatgcggtgcaaatggattaagcagaataagatatgttttaaattccgcctcgtttatgccgccaaagccctgaatatcgttaagtaaggacatcagcgccgcaatagcggtgttcatcttaagcccctcgatatcctcggtaacctttttgattgtgcggtggaaagcggattccagctctgtgcggtagctgtcgccctcggtcagcttatccgaaagcgcccagaccttatcaagaaaacgcttgctgcccttaattgaggactgactccagggagctgccttttcaaaatcgcctataaacatctcataaacgcgcatggtatctgcgccgtaatcccgcacaatttcatccgggtttacaacatttccgcgcgatttcgacattttctcgccgttttcgcccaaaatcataccgtggcttgtgcgcttggcatacggctcgggactgggcacaacaccgatatcataaaggaacttatgccagaagcggctgtaaagcaggtgaagtgtggtatgctccataccgccgttataccagtcaacgggagtccagtatttaagcgcctcgggggaggctagttccttatcgttgtgcgggtcgcagtaacgcaggaaataccaggaggagcctgcccactggggcattgtgtcggtctcgcggtgagcagggccgccgcaatgcgggcaggtggtgtttacccaatcggtcattttagctaaaggcgattcgccgttgtcggtcggctcataggaatcgacattcggcagcacaagcggcagctcactttcgggcacgggcacatagccgcacttatcgcagtgcactatcggaataggctcgccccaatagcgctggcgggagaatacccaatcgcgcagcttgtagttggttttgcgctcgccgaggtttctctcggtaagccattcctgtatagcctttttcgcgtcctcaacgctcataccgtctaaaaagcccgaatttacaagcttacccgttgcgcactcggtgtagggggctttctgcacgtcctcaccgccggctacaacctcgattatcggaagaccgaacttctttgcgaactcccagtcgcgcgtatcgtgcgcgggaaccgccattatagcgcccgtgccgtaggatataagcacataatcggcaatgaaaataggcacttccttgccgtttacggggtttattgcggtaacgcccgaaattttaacgccggttttatcctttgcaagctcggtgcgctcaaagtcggactttttggcagcctcctgcttatatgccgtaacctcgtccatattggttattttatccgcccatttatttataagcgggtgctcgggcgacattaccatataggtgacgccgaaaagcgtatcggcgcgggtggtgaacacctcgaacgtatcgcctatattggtggagaatttgacctgcgtgccgtaggagcggccaatccagttgcgctgctgcgtttttacgcggtctataaagtcaacctcgtcaagcccctcaagcagcttttcggcataatcggtaattttaagcatccactgacttttttccttgtggatgacctcgctgccgcagcgttcgcagtgaccgtttacaacctcctcgtttgcaagcacgcacttgcaggaggtacaccagttgaccgacattttctttttataggcaagcccttttttataaagctgtaagaaaatccactgcgtccacttgtaatatgccggatcggtggtgtttatttccctgctccaatcaaacgaaaagcccaaggatttaagctgccttttaaagttggcaatattcttttttgtgacctccgccgggtgaacatggttctttatggcgaaattttcggtcggcaagccgaatgcgtcccaccccatggggtaaagcacattgtagccctcaagcctttttttgcggcagacaatatcaatagccgtgtatgagcgcgggtgacccacatgcaagccctgccccgacggatacggaaactcaaccagtccgtaaaacttaggcagagaataatcgtcctttgcggcgaaggtctgcttttcatcccatatatcctgccactttttctcaatttgcgcgtaatcgtaaccctttgacattttaatctccattctgccgctaaagagtcggcacaaataggttatgaaatctccctttagcggcgaacggagattataccggtatatttcgcggctgccttttattaaataaaaggcgagcggaatgccgtccctatattgtgtttagcgtgatttttcacgctaatccccctcaacctctgtaagcaattcgcttaaatctacctgttcgccgtcgctccacattttatcaagcgcgtaaaactcgcgctggtcgcggctgaaaacatgcactataaccgagccgtaatcaagcacaatccagcccgtagttttgccctctgtgtggtggggctgaacgcccgcctcgctgagcttttcttcaacctcgtccgccagcgcccttacatgcgtagagcttgttgcggtgcacattaaaaaatactccgcaattacggttagcttgtctattttaacggcggcaagctccttcgcctttttttcgttcagcgcgttcgctgcgatttttaatatttctgtactttccataattcaccccaactccggtttatcggtaaattcgatttccggttttcctttcagtccgtcgctttcaaaaataataacctcgttttcgccctttttaataagcgagcgcggcacataaagcgttttttgcggccctacctcccagtatctgccgagattaaagccgttaagcagcacaaagccctttttaaaattatccgttcttaaaaatgtgtcataagcctcgtccgccgaaaatgttcccctgtaaaacgccggaatgtccgcagcagctttttcgccgaatttaagcgcggatatatcggtcatcggcagcgggtatacatcccacgaaaaatgaatcttgttaccgagcagcaccctgccgggcagcccctttttgcgcatcattttattgccgaaattcgctctgcccatattttctgcaagcaccgtgagcttatcccccgcctttgcggttatattcaccgtaagcgactcgtttatataggcaatgccctgtaattcgtcatttacaagcacctgcgcgcggtcgccaagctctgcgaatgtaagcggcgcgtccgtataatcgcggtttaaaacggtggtgtaggctatatagccgtagcccgtgccgtagtgctccatagcgcgcggcacatcgctgtgtatcgggcttgaaataatatcaagattgggcagtaaccccgcgctgtttgtaagcccaaccctgccgtaagcatactttttgcggtttgcgggcacttcgggcggtgttacgcccgtttccttggctataacttttcgtacagcgaaatatttttcggtagtatcgccgcactccgacagcagcgcgtcataatcgtagcttgtaacatcgggcgcgaacttttcataatggttagcccccgaggtaaacccgaaatttgtgccgcctataaacatatacatattaaggctgccctttttaagcatatcccgcacaacgcccgcatacgcgtcagcgcttgttgtgtggtgcttttcatctccccacgcgtcaaaccagccgttccacatttccatacacattttaggcacttttgggaacattttatcgtggcaggcaaaattctcttcaaccctgctgccgaaattaagggtcggcaggcagccctccgccgtgccgtcggcaagctcggaataacccgtaccgtccgatgtaaacagcggaacgtctattccgcggcggcggtaaccgtctcttaaatacagcaggtattccttatcgtcgccgtaatagccgtattcattttcgcattgcagcataattacgggcccgccgtttgttgcaagcagcggctttattttcgcaagaagcacatcaagataacggtcgaaatgcttgatataagccttgttcatgcagcgtatttcaatttcttcatcgcactgaatccaccaaggcaaacccccgaattcccactcggcgcagatatacggtcccgggcggacgattaccataagccccgctttttcggcggctttaataaagccttcaatatccagcctgcctgaaaaatcgtatttaccgggctcgggctcgtgaagattccacgcacagtaggtttcgacacagttgcagcccaaggctttcagctttgcgaaaatatcgtcccaggtatcgggcatattgcgaaaataatgcaccgcgcccgatatcagctttataggtcttccatccttataaaaatcgccgtttttaatttcaaaattcataatttcaccgatttcaaagcaccgcttcgttgtatgccgccacggtatcaagatgcaccgcgcgcgcctgctctaccaaatcctttatggaatactgcaacgcgtaaacaaatgccttttggagcgattcgtccacatattcgcgtattacgtccacatcctcataatcgcggtcggctgatgtaaagtccgcaaggtaaagaattttagcaagcaatgacatattcgcctttgccgtggtgtggtagcgtatcgcgtctattatctcggggtcgtttattcccaaaatatactcaacatacgccgctcccgacattgcgtgccacagcttttcggcgcctttttctatttcattcggtattataccaaaatcggaaaagattttcaagtgctcgtcttcagcggcgttcttggttatatcgtgcaaaagccccgcaagatatgctttttcggcgtttccgccgtatttttccgcaaggcgctttgcctcgtctgccacgcatagtgaatgataataccgcttttcgttaagccgctgctttaaaattagctttaaagcctcgtaatcggttttattttcacacacggtaaattcccccgttcttaatatactcataaataggcttgggcaaatattcccgcgccttttccgcgttgttccttataaaggttgaagaaacggatggtattttgtccttaggtactgtaagcttcatcccgagggatataaaatactccgcgcggcggtcaaattcctcgccgtcgcacccctcgcgccgaaatactataaagggtatttcccgcaaaagctcctcatatttataccatttatcaaaggatataagcatatcgccgccgcacacaaacgcaaagcttttttgcgggtatttccgctttaaaagccttaccgtatcaatagagtagcttttgccctcgcgctcaaattctataaggcaaagggcggcttttttaaaatccgccgaaagcagcctgcacatatttatgcggtctgcgtccgacgctaaaaaatcgcacaccttatgcggcggtatacggtcgggcagcagcataatttcttcaatatcggggttgttttcaagcgaacgcagcatttcgtaatgccctatatgcggcgggttaaaggtgccgccgaaaattgcggtgattcccattatttcacaagccttatctgcttgttatcgcggctttccctgtaaagcacaaagcgtgtgcctattacctgcaccacgtcagagtgtgttttttcggctatctcgtccgccgcctcgcgggcagaaacggggcttgtttcaagcacgcgcagctttataagctcgcgcgcttcaagcgcgtcgtcaacctgctttaccgtgttttcggtaacgccgccctttcctacctgaaaaattgtatcaaggctgtttgcaagcccgcgtaattgcgctctttgtctgctgtttaacatttttcttctccgaatcaaatatattttttaagctcttccttaaaaagccgcaaggcgtttccgcggtggcttaccttgtccttttcctccgccgtcatttcggcgtagcagccggcatcacatataaacagcgggtcatagccgaagccgccgctgccgtgacattcctctgccacgaagcccttacactcgccccttacggtaaattttctgccgtcggggaaaacgcaggcaatagcggatacaaaggtggcggttcttttatctttcggcacgcccttcagcgccgccaaaagcttttcgttatttgaagaataggtagcgccgctacctgagtaccgcgcggagtaaagccccggcgcgccgtctaaaatatcaacgcttaaacccgaatcatccgcaacggtcgtaatgcccgttaccttaagccccgaatacgcctttaaaagcgcgttttcctcgtaggtctcgcccgtttcctcaacctcgggcaacgggctttcaaggtcgttttcactgagcacctcaaagcccatgggctttaaaattctttcaagctcttctaatttatggtggtttttggttgcaataaatattttcattttttactccccgaaaattccgtcggcaaattcggctgcgtcaaagggctgcaaatcatcaattccctcgcccacgccgacatatttcaccggtatacccagttcattctttatagctactattataccgccctttgccgttccgtcaagctttgttaaaataattcccgtaatatttgcaacgcttgaaaactcgcgtgcctggttgacggcgttttgccctgtcgccgcgtcaagcacaagcaatgtttcaaccgatgaatcgggcaactctctgcctataacgcggtatatttttgcaagctcatccataagatttttcttgttgtgcagcctgcccgcggtatcgcagataataacgtccgctccctttgatttagccgaggctattgtatcaaacacgaccgaagcggggtctgtaccctcaaggcttttcaccattgcaacgcccgcgcgctccgcccaaatgcccaactggtcaatagccgccgcgcggaaggtatccgccgcgccgagcaccacggtcttgccgtcccttttaagctgtgaagccagcttaccgatcgaagtggtcttgccaacgccgtttacgcctataaccagtattaccgagggcttggtctcgagctttaacccctcgttttcgcccagcatttcggctattatttcctttagcatacccttaattttgttggggtcggtctctcccgtttcttttattttgtgccgcagcttttcgcatatttcacctgccgtgtttacacctatatcggacattacaagcgtttcctcaagctcctcaaaaagctcctcgtcgattttggtaaagctgtttataacgctgtttacgccgtttgcaattgagtccctcgttttttgaagaccctgcttaattttactgaaaaatcccattttaaccctgctttcggaaataaattttacgcgcccttgttctgcaataaggtcttttcaagctccgctacattaagctcaatcagctttgttatgcccttttcctgcattgtaacgccgtaaagcatatctgccgcctccatagtgccgcggcggtgcgttacgcagataaactgcgtggcaaagcccgaccttttcatataatcggcaaagcggtcaacgtttatatcgtcaagcgcggtgtcaacctcgtcaagaaagcagaacggcggcgcgtttacgcgcattatcgcaaaatatattgaaagggctataagtgccttttcaccgcccgaaagtccgtcaaggctcggtacgtttttgcccggcagcttaacatttatatcaattccgctttcaagtatattttcggggtcggaaagggtaaggcttgcgctgccgccgccgaaaagctcggtaaaggtcttgcggaagttttcatttatcctgccgaagccctcggtgaaaatatcctgcatttggtgagtaagctgatttatgagcctgtgcagctcggcacgtgtggtctccacgtcgtttatctgcgccgacataaactcgtaccgctcgcttacttccttatattcctcgattgccgaaacattaacgctgccgagcgaccgtattttggtctttatctcggcaaggctctttttagcctctgccggcttatcgattgcaacgcctatcttttcggcctcgctgcgggtaagctgatattcatcgtaaagctgctttataacgtcgtcgtattctctgagcattacctcgcgccgctccgtaagacgggctaactctccgcccgttttctcgcgcagcgcggttttttcgcgttcgcccgtgcgcagttcaacacccgctttttcggtttggtcgcgtttttcgagcatttcgtttatattgctttccgattgctttatctgctcccttaaggccgcgatagcgttttcggtattccgaattttctgctccaacgcgctgtttgccacattcagctgctctgtctccgcagcaattgatttaagcctttgcgccctgccgcttaccgaatccttaagcgccgcaatcgaattgtccgccgcctcaatatccttttgcatttcaattatattaagctttaaggcggttatttgctcggctgagtcctcacggtcggcgttaagattatccctgccgcccgtcatatccgcaacgcttgcctgaacctcgtttttctgcttgtcaagctcggcaatagcccttgccgccgctgccgcagtctcctttagctgctttagcttttcgtcatagctgcccttttcggcggtcagctgctttattgcgccttcggcggatgtcctaaggtctcctattcggcgcagctctgcaagcgcccttattttatcctcattggcggtggtgatttccgcgcgtaccgcagttatatcggcatttaccgctgcggcggcttcctccgcctcccgcagcttttcttcaagctccgctgttttttgctttaggctttcggctgcgtcttcaagagccttaatatccgccgcgcggttaataagccccgcgtttttggtaagcgagccgcccgtgagcgagccgccggggtttactatctgcccgtcaagagatactacctttatgcggtagccgaattttttggctattgccgcagcggagtcaatgtcctcggtcacaacaacggcgccgagcagatatttaattatttcgcggtacttattatcggtttccacaaggtcgctcgcaatgcccacaaagcccgccatagcttcaaagccgtgctctttaaattcgcgcgatttaattgtggctacgggcaaaaacgtagctctgccgccccccgtggatttaaggtagcctatagcccgctttgcatccgcctcggtttcaactattatgttctgtatagcggcggcaagcgcggtttccaccgctacgccgtactgcttttccacacttataagctttgaaacagggccgcaaatgccgcgcaaagtgcccgtttccgcctgctttacaatttcctttacagagtggctgaacccctccatgctgctttcaaggtcgcgcaggattttcgctctgcggcgcttttcctctgcgtcaagcctcgagttctcaagctccgctttaattttttcggcggcttcttttttagaggtcaggcgcagctcatagccctttacggcgttttggcggcttataatctcttcctcgatattttgtatcagcttttgggtcccgttaaattcctctgtcagcttatcaagctgttctgtgtattccgctatctgctgccccgcgttttcgcggcgggaaacggtctcctcggcggcgctttccgccgttaccatttccacgcgcttatcggcgctttcggcagttaaggcgttcaggcgcttaacctcgttttctattttgcgggatatattctcgctgcttgtaagcaggtcggaaaggtgcttttcaagctctgcaagcttccgctctgtctccgccttttgcgcttttttctcatctgccgcagcctgccttttttcaatttcctctgccgcagccgcgtcggaaacgcccagttgctctgcctccgcctgcaggcgctcaaaggactggcggttatgctccatatcgtttttaataaccgtaattgcgccgtcgtttttgagaatttcctcgttcaggcgcgaaatattaagccgctccccctcaatatccgaggtaaggcgggcgaaatacgccgtgttttcttctgagcggcggtcaaagctgctcaactcctcgtcaacttcgcggtaggcaagctgcgccgcggcaattttgctttcctgcgcgcgcagagcctcctttgaattatcgagcgtgtgaatccaaagtcctatttcaagctcttttttgcggtcggaaagctccaaaaatttctgcgcctttgcgctttgctccttaagagggcctacgcgggcttcaagctcgtccgaaatatcatgcagccttaaaaggttgtcctctgcggcggtaagctttctttccgcctccgattttctgtagcggtattttgaaattcccgccgcctcttcaaaaatatcgcgccgctcatccgattttgagctgattatattatcaatcttgccctgacctatcatagagtagccgtcgcgcccgagtcccgtatccataaacagctcgtgaatgtccttaaggcggaccgaaacgccgtttatggcgtactcgctctcgtgcgagcggtaatagcggcgggtaacggcaacggtatcgttatcgaaattaagcgttctgtccgaattatctatattaagcgtgacctcgcagtagccgtgcggacggcgggtctcggtgccgccgaaaattacatcctccatagactgcccgcgcagacttttggtagactgctcgccgagcacccagcgcaccgcgtcggatatattgctcttgccgctgccattagggcctacgaccgcggttatgcccttgccgaatttgagtaccgttttatcggcaaaggatttaaagccctgtatctgaatggagcttaacagcattttgtcacacttctctttctgttctgaaattaagtcccgtaagggctttatcctcccttacgcggcagttataaccctttccctcgaggaaaataagattttttcttttctgccccgtcatttttgaaacacagccgggggatacataaattatataatttcctttttctttaaggcttttaagtatacccgtcagcattatctgcgattggcaaagctcgctgaacgcggggtgccacgggcctgcgatatacgcatcttcttcaattgagtgcagcccgagccttataaccctcacgccgttttcttcaaacatagtgtaaagctccgccgctaatttaaccgcctcagaaagcgtttgcggcttgtaaatattatcggcgtaaagcgctgctaaatcggtatcctttaatactattgtagggtaaattcttaccgtatcgggttgcagagcaataattctttcggcagtatgaattgcagatgaatcgctgtcgccgtaaagccccgtcatcatttgcagccccagttcaaagccgtgccgctttataagagcggaggcgttttcaacatcctttaccgtatgcccgcggttattcattttaagcacgcggtcgttcatgctctgtgcgccgagctctattgaggtcacaccgtagtcctttaaaatgcccagtatttcctcgtctatcgcgtcggggcgggttgaaattctgattccccgcaccgatccatcgcgcacaaaaaccgccgccgcctctaaaaggtcggtcatataattgcggttaattgcggtaaagctgccgccgaaaaaggcaatttcggtggtagcggggtcgtagcctttactgctttgcgccgccgctgccgccgcgccgacatcttccgcccccggacccttgcagacgcctgttatatagcgctgattgcaaaagctgcatttattcgggcagcctatatgcggcacaaaaatcgatatattagagtgctttcggctcatatttcggcacccataagcctaagtgcctcttttgccgccatttgctcggcttgctttttgtttttgccgatacctatgcctataatattggaattaaggcgcacctcaaccttaaagcttttatcgtggtcggggccgctggtacccgtgagaacataattaacgctctcctcggggttgcgctggattatctcctgcagggcggttttgtagtccttgaaaacctcgtcgtcagtgtgctttaattcccttaaaacaaagttcataacatggtgctttgcgggctccattccgccgtcaaggtaaattgcggcgagcaccgcctcaaatgcgtcggctaaaatagagtcgcgctctctgccgccgcccttatcctcgcccttgccgagcataaggtatttcccgagctcaagttcccttgaaaaggtgcaaagtgatttttcacacacaagcgaggctcttaatttcgtaagctcgccctcggacagggagcggaagtgcctgtaaatataatccgaaactataatagaaagcaccgaatcccccaaaaattccagcctttcgtttgaagaaaagccgccgcgcacctcattcgcgtatgaggaatgggtaagcgcgtttttcagcaaatcaatatttttaaatttatagcctaatttttcttctaagccttccatttttatttttccttttttaatgttttaaaattaaagtttgcagcggtttaagtaatatgcttccgtttattttttctccgctttccgcattcagccattcggtttttgtttcaagcattttttcgctgtaggtaaagttctgaataaacgcataggtgatgtccccgtccgttctgccgtgcgccgtaacgccctcgggcagctctccgtcgaacacactgcagatactgcactctttaagcaattgcgatacaaggcggtcagtaaactctccctcgtctctgaaagcctgatagtaagccctgcccttaccgtatttattcaccgtaagagcgggcataccgctgtaaaaatcctgcgaatatacagccaagacttccgccgtgtttgtatgaataagctcgcagtaatctgttgcggtgtactcttcgtctccgagctttaccgagtttttctccccggggtaaagcgtgtcgatctcctcattccaaattccgaaaacctcgctgagccccgcgcccggtaaaccgccgagatagcacaggtcgttttcgttgaccattgcggaaatataggtaaataaaagcgttccgccgttttcaacaaattttttgagcttttcgcccagcgccgcagaaacggaatatctcataggggctataataaggcggtagccgtcaaagcaatcctccgcgcctataatatccgtatctataccgcgtttccaaagcgcgctgtaatatgattgaagcgtgggtatgattttcttgtcataccttgcaaagccctgtgaattatcaagcgcccaccggttatcccagtcgtacagcagggcgactttagcgtcaggcatagtgcctacaataaaatcaagcccctttaatctgctgccgagcgcggcaacctctttaaatacccgcgtattttccgttcccacgtggtctacaaccgcgccgtggaatttttcggatgaaccgcggctcttccgccactggaaatactgcaccgaatcagctccgtgcgccaccgcctggagcgaagaaagctcgttcatacccgggcgtttaagcttattgtattcatgccagtttacaaggctcggagtgctttccataaggaaaaacggacgcttttttaaagagcgcataatgtcgtgcgtcatagacgcgtttatcgccgcggaaatatcgcctttatcgttcccgcgccattgcggatatgcgtcccacgaaacaaaatctatttttttcgataatctcctgtaatcaagtccgttataaaagcccataaggtttgcggttacgggtatattcggcgtaaatttacgaaccgcggctatctcgacgctcataaaatcggcagtctgttcggtaacaaagcgtttccagtcaagcgtcaggccgagcaggtcgctgtctcccaaaggacccggcgaaattatctgctcccaatcggtaaaggtgtgcgaccaaaaggcggtccaccactcgtggtttaaattatcaagcgtaccgtatttgagcttcagccattctctgaaagccgctcggcacagcgggcaatggcactcgccgccgtattcgtttgaaatatgccacgctataagcgcggggtggttcgcataacgctcggctaatttttcgtttattatacgcaccttttcgcggtatatcggggaggtatagcagtggttatgcctttcgccgaattcattccttattctgtcagtaccaacgcgcagaacctcggggtatttttgcgaaagccatgcgggtcttgcgccgctcggcgttgccaatatcactctgccgcccgccgcatatatatcgtccatcgctttatcgagaaagctgaaatcaaatacgccctcttgcggctcaaggcaactccatgcaaaaatgcccaccgacatctcgttgcagcccgcaagcttcataagccgcatatcctctttaagtatatcgggtctgtcctgccattggtcggggttgtaatccgcaccgtgaatcatatgcgggtaattccgcaaaataatatctttcatcattcatcccccgatttttccgaaagcgaggcggaaattttatccaccacgccggtctcagtgaatttaaccgcctgacctatcgcgttctttatagcctttgcgtccgaattgccgtgcgcctttataaccgtgccgcgaacgcccataagcggcgcgccgcccacctcggagctgtccatcatgcttttaagcgagcccaaatcgccctttacggtaagtgccgcaagcttatttttaagatttttgtaaaacacctgctttataagcccgaaaagggtggaaacggtgccctctataagctttagggcgatatttcccgtaaagccgtcggttataaccgcatcgcacacgcctttaggcatttcgcgtgattccatattgccgacaaagtttatgggcgcctctttcataagcttatatgccgccttttgcagctcgccgccctttgtatcctccgtgccgatattcaaaagccctattttcgggtttttcctgcccgccacgttttccatataaacgcttgccattactccgaactggcaaagcatttcggggcggcaatcggcatttgcgcccatatccataagcatatatgtaccgcccggtgcgggaataagccctgcaagcgcggggcgttttatgcccttgatgcgctttactataagcgtgccgcccactaccacggcgcccgttgagcctgcggaaacaaaggcgtcggctctgccctcagccaactcgtaaaacgcctttgccattgagctatccttatgggctttcacaagcgatgtaggctcgtcgtgcattgaaattacatcgtcggtatcgattattttaaggtcgcccgaaaaatccagaccctcgcgggctattatttcccttatggtcttttcattgcccgtaagggtaatatccaccgaatattcccgcgatgccagcgccgcgccctttattatttcaagcggcgcgttatcgccgccgaaagcgtcaactgcaatacgcattttcaaatttcctccgtttttatattctccgcaagtatcccgagtgcccgcgcagccaaagccgcgtagcgctcgcgcttgtcccttatatgggcttcaagcggcggaattattccgaaattagcccccatgggctgaaaattctccgtaagcgggtttgttatatatgaaagcagcgcgcccgtcatggtggtttcgggtaaaacaaggggtttttcgcccgttatttcagccgccgcgtttattcccgcaattataccgcttgccgccgattccatatatccctcaacacccgaaagctgccccgcaataaaaatatttttatctgccttaagtgataaattgcggtttaataacttcggcgaatttataaatgtgttgcggtgcataaccccgtagcgcataaattcggctctttcaagccccggtatcattgaaaatacccttttctgctctgaaaatttaaggttggtctgaaagccgactatattgaaaagggtagccgccgcgttttcccgccgcagctgaaccgccgcccacgggcggtgccccgttctcggatcccgaagacccaccggctttaacggcccgaatcttatagaatcctcgcctcgctttgccagtacctctatcggcatacagccctcatacacattgggcgctttatcaaagccgtgcagtggggcggattccgcatttatcagttcgtgataaaaggcggtgtattcctctttgttcatgggacagtttatataatcgtcgccgcccttatcatagcgtgaggcaaaaaacgccttgctcatatccacgctttccgccgttacaataggtgcggcggcgtcataaaagcttaaatttccgccctcgcaaagctttgaaagctccgccgccagtgcgtcatctgtcaagggacccgtcgctattaccgtaaccccgctttgcggtatttcggtaacaagcccttcgatcacggttatattcgggtggctttttattttctcggttataagccttgaaaaaatatcgcggtcaaccgcaagcgcgccgcccgccgccactgccgatttatccgccgcagcaaggcaaacagagccgagcctgcgcatttcttcctttaaaagccccgcggcagagtctacccgagatgctttcagcgaatttgagcagacaagctctgccaaataatcgcttttgtgcgccgcggtctttctggcgggcttcatttcaatcagctctacctctatgccgcggtttgccgcagcataggctgcctcgcagcccgcaagcccgccgcctattacagtcagtttattcatccgtttttttatccgctttcttctgccttgtggggcattccgaattcatacagtattttctgccgcgaacgccgcttataataaagctgccgcactcggggcatttttcgcccgtgggtatgccgggggctgcgaaatcgcaatcggggtaatttgagcagccgtaaaatttcttgccctttttagaggtttttttaaccagcttgccgccgcatttcgggcagggctgcttaacctcgtcctcgggcatgggctttgtgtttttgcactcggggtagccggggcatgcaaggaacttgccgaacctgcccgatttaaccaccatttttctgccgcatttatcgcagattacatcggtttcctcatcgggcacctttacgcgcttgccctcaagcgagtcctctgcttttttataaagcttatcgaaatccttataaaaatcctttattgtatcaacccagccgcgcttgcccgcgcctatttcgtcaagctgcttttcaagtccggcggtgaacttaacatccactattttatcgaaatactccaccataaggtcggataccaccataccgagattggtaggctttaagctctttttctcgcgctcgatataatcacgccccaatatgtttgaaagtatcggagcataggtggaaggtctgcctattccgttttcgtcaagtgccttaataagggtcggctcggtgtatcttgcggggggctgtgtgaagtgctgattaggcgtcaattccttcagcttcagcttatcgcccgttttcatttcgggcagagcgccgccctcggcactgtcatcgtccttaccctcctcgtaaagcacggtaaagccgtcaaactttacagaatacccgcttgccttgaataaatagtcgcccgcggtaatatcggcgtttacggtgttctgcacacagacttccatgagcgaggcaataaacctctcccaaataagcttataaagcttatattgctcggcggtaagcgcgtcctttacagactcgggcgtaaagccgatggaggtgggtcggattgcttcatgcgcatcctgcgcgccgctttttgttttgaaataacgcggcttttcgggcagatattccttgccgtagcgccctgttatatacttataagccgccgcgcgcgcctcttccgaaatgcgcagcgaatcggtacgcatataggttataagacccgtggtgcccgctcccggaacatcaacgccctcatacagctgctgcgctatgcgcattgtgcgctgacccgtaaagcccaatttgcgcgaagcctcctgttgaagcgtggaggttataaaggggggagccggctgctttttgcgggtgccctttttaagcgccgaaacaatatactccgcaccgctaagctccgatactattttatcggcctcctccgcgttcggaataacatctattttcttaccgtcggcaaagccgtagagggctgccttaaagctttttgtgcctgcaagcagctttgcgtctacgctccaatattcttcggaattaaacttctcaatttccctttcgcgctctacaatcagccttaaagccacagtttgcacacggcctgcggaaagcccgctcttgacctttttccataaaaacgggcttagcttatagcccactattctgtcaagcactcgccttgcctgctgcgcatcaaccaaatttaaatcgattttatgaggtgcggcaatacctgcctttacgccgctttcggtaatttcgttaaaggctacgcggttcggctcgtttagatcaagcgccagcaagtgcgccaaatgccaggatattgcttctccctctctgtccgggtcggttgcgagcagcacaccgtcgctgtttgcggcggcgtctttaagctcctttataagatccttcttgtccgacatatttatatattgcggtttaaaatcgtgctcggtatcgacgcccagcttcgatttgggaagatcgcgcacatggccctttgaagccataacggtatatccgctgccgagggtctttttaattgtctttatttttgagggtgactcaactattataagcttagacatttcattcctccgttttcagtttttgataagctcatatctgccgccgggcagcgagcgtataagcccttctatttcaagctctgtaagcgccgataaaatatcgcccggcactaaagaagtattatttatctcatcgggataaaatataggcttattcaattgattatatactattttcgcttcatttgaaagggtttcaattgataattttttgtgaacttccgttttttcgggttttgcccgctttttaattgctttctcaatatcaattttatcgggataccgcggcagatattcattcaaaatatcgcttatgtcaagcagcggtcgggcgccgtcgcggagtaacgcgtttgagccggcataattttcatccgcaggcgaaccgggtattacaaaaatttccttgccttggttcagcgcgtgatttgcggtgttgagagtcccgctgcgagccttcgcttcgaccactatgaccgcatctgacaaagccgaaagcaaacgattcctcacggggaatgtaaattttgaggctctttcaaagggcggatattcgcttacaagacagccgttttcagccacggcatgccgaagctcggcattctcacgaagatagtccgcctcaattccgcagcccataataagcacggttttgccgttcgctttcaatgcgccgctgtgggcgtaaaaatcacatccgcgcgctccgccgcttaccaccgtcatcccggcggacgccaaacggtagccgagggaatatgccgccttttgcccaaacccgcttgattcacgcgggccgacaatgcaaaccgttggcgtttcatcaacattcggcagcttgcccttcaaataaagcaaaacaggcggcgcagctattaccttgagcttttgcggatatttgccgtcggtgtagggcagcacggttataccgtgcctgcggcattccttttcgataagcttcgcttcgtcgagctttactgcgttaagcgcgccgatgtctttcggggtaaaaagaccgctttgcctgcgccccgaatcattcatttcataaattttctcggcgcttccgattgcttcaagcgccttcgccccgcgcggattgcccgcaccgagagcggtatgcagccagataaggtattcaatcatttcatcatttcccaaacggctattgccgcggcagccgccgcattcagcgattcggctctgccgcgcattggtatggtgatttttttatacgccgccgcttttgtttcttcggtaagcccgttagcttcgttgcctatcattacggcgcagcccggcaaaaagcttatatccgaaatgctttgagccgccggtgacggcacacaggcgtaaaatttcagcccgcagcgcctcatttccgacggaaaatcaccgaaaacaaaaatcggcattctcaaaagcgttcccattgaagcgcgcaaggctttcggcgaatacgggtcgcagctgccagaggacagtataagcccgtctgccccgagcgcctccgccgtgcgggagaccgcgcccaaatttgaggggtcgtttatgttttcaagagcgacatacctgccgtcacttttaatatttacgctctcggttttcggaattttgcaaagcgctattattccctgcgggttttcggtatcgcttattttcttaaaaagcgaatcgggaacggatatgcattcatcggcgcgtcgtgcaaattccgcgattttttcggcatgcccgtccgccgccgaaaaggagacgatcaacttatcaaacctgattccgttatcgcacgcgtcagcgcacagccgcagcccctccagcacgaaaagaccgttttcgcgccttgcagacgcgcttttctgaagcgaggaaacaagcttgataagtggattttctctgctcgtgacctttttaaagtcctccaatcgacaccgcaccctttctttatattaaaaattcgcccagagagcaaaccccgggcgaaaaaaattacttttcgagagccttaacggcagcctttaccaaggtggtaaagcccgcggcgtcattaaccgcaagatcggcaagcattttacggttgatggttattcccgccttattaagaccattcatgaagctggaataatttataccgttcagcttgcaggcggctgaaatgcgggttatccacagtctgcggaaatcgcgctttttctgcctgcggccgatgtatgcatagttgccggatttcattacggcttctttagcggttttaaaaagctttgactttgcgccgaaatagcccttagccagctttaaaatcttttttcttctttttcgtgttgccaacgcacctttaactcgtgccatttcttataacctccgatttcagtcgtaccttatttataaggaatcattttcttgatcttcgctacattcgttacatcagccgtaacaaccttgcggagatttctcttgcgctttgtggtcttcttgttgagaatgtgcgacttgaaagcatgagcacgcttaaccttgccggtttttgtgagcttgaagcgcttttttgcgccgctgtgtgttttaatcttaggcattttaaatcctccctgatataattcaactgcaattatttacccgatttcggagccaaaaacatcagcatatttctgccttccattttagcagccttttcaaccgagccgtggtctgcacagtattccgcgaagcgccgcattgtttcaagcccgatttccgggtgacccaattctctgcctctgaagcggatggaaacctttaccttattgccctcgtcaagaaaacgcattgcgtgttttcccttagtctcgaaatcgtgaacatcaatgctgaggcccagtcttatttccttaacctcaaccgttttctgattttttctggcttccttttctcgctttgcctgctcgaaacggtatttaccgtaatccattatcttacataccggcggaacggcgttcggcgaaatgcaaaccagatcgagatctgcggcatacgctgcgtccaatgccttggcaatcggtaaaattcccaactgagaaccgtcggaaccgatcgtgcggacttccttgaatctgatattttcgtttacggaaagctctttactgctgatattaatgcacctccaaaattcgtgctgctgcaattcaaaaagcgcggacgaaatttcgcccgcgcataaaaataccaaaccttaaggtctgaacttttattgaccctgcagctttttgcttggggtgaggacgaatagtcgtactgcttcattgttacttcattatagcacaacgttccgttttgtcaagcatttttttacccgctgccgaaaaataaaaaaagttttacaaaaagggttgcaattttgtaacccttttgttataatatcgattgtagaaattacaaaatgtaacttttgaaagaagtgactgttatctttagggatattcttaataaagaaacctttattgaaatattatcacagaacaaattcttcggcaggcttttcgcctttattaaaggtaaaaagctcctcgtgcgcgctttaagcctctgccttatcggcatgcttgcagtaggcgtcagcattgtatccgccggaataacgctcggctttaaggtgaactatgccggcaactttatcgccacgataagaagctccgcagtgtttgacgacgcaaaaagcatcgccgtaaacaatatagaaagcagcaacgccgagggagcaatagagcagccgtactttaagatgacgctgacggtctccaaccgcctgtgcagcgcgttgaagcttgcagacgcaataatagaaaacaccaacgatatagttgaggcttccgcccttgtggtaaacggcgagaccctgctttgcggagacgccgaagcgctaggtgattgccttgaaaaacgccgcaccgcctttgaaacaaacggcgcggaaaattcctcggaatttacagacgaggtcaaaaccgaaaagggctattatttaaagagcgagattgcctccgctgaggagcttgaagcggcggcgcagaagcttaatgttaaaaccgtatcggtaatcacgaccgataccgcaataccgttcaccaccaaaatcgtaaaaaccaaggacgagcttataggctattcttcggttaaaacggcagggcagaacggcataaaccgtaaaacagaaaatgttgaaacgctcaacggcgaggttgtatcccgcgcggagataaagacggaggtcattaagaagccggtagaacaggtgaccttggtcggaacggccaaaagcattgcaacggcggcgcagcgcatttcggctcgcagcaagggccttatctgcccgctgaccggcggatcgttcgttatatcctcttattacggtgacggcagaggccacaagggaatggatcttgcggcagaccgcggcacgggaatttacgcggcggcggcaggcacggtggtttcctccgggtttgacggagcatacggctacagcgttgttatagatcacggcaacggacttcggaccagatatgctcatgcaagcgcgctcaaggttgcaaagggcgctgcggttgagcagggagatctgctggcgcttgtgggcagcacgggaaattccaccggaaatcacctgcacttcgaggtgcttgtgaacgaaacaagagttgaccccgcaccctatataggtcttgactgaaaaagacattctgaatttaaatgtaataa

SEQ ID NO: 3002 - DNA, 5992 bp, Unknown
  16S sequences of unknown bacteria
cgcttcatatgggcgagttctggcgaaatgttcgacgcgaagtatctcaagatattcttcgacagatccccgaatttcgaaaacaggcttgaccgctcgaacccggcgaccgccgagatccgccgcctgctcgacgagatcgaggaggaggcgaccgcacgtagcagtgagtatgagcttatgatcaaggtcaagctcctgacgatacttgtcctgctgatacgggactacgactatgtttccgcccgggagaactatactgagacctcgaagtacgcgcagataagccgcgccatgaagtttcttgacgataacatctcggaagaattcacgctggaggatcttgccggacaggcaaatctcaaccgcacttacttcatcaccttgttcaagaaactgaacggcgtcactccgtgggaatatataacagcgagacgggtggaactcgcgaagacatatctgagggaaggtcggatgagcatccttcaggtcgcgacgacctgcgggttcaataacgcgtcgaacttcaaccgcgcgttcaagaaggtcacgggacagccgccatccgcgtacagggcgtcaaaatcaaagtcgcagcgctgacttttccctcttagatatattctatcacattatatcccgcgcgtcaacaaatatatttcgtttttttatgcagatattacggaggttgtcaatatgtcagagataaacctgagccagagagacataaccggcatcgcgatacgccagtcggcagtggatatggggtgctctccgggggactttctaaaaacggaaccggtcattgtcccgagccgtgttcactccggcgcgagggcgtatcttgaggagccgctgtttttcgacatcgcgagctacgggtcgaacgtcgtcgtccagtgcgcgccggagatgacggatttcgcgcgggaatatgcgtcgcgcgcggacattgagagatgttttgagacgccggcaatttacagactcaacgctgagctcgcgaaatatggtgagacgatatattatatggcggtatattatctgcctgacctcgcgtctctgaatgcctttgacggctccggcgcgggtgatcgcggatatgagacgcgaattctcgggcgggaagacttcgcagggctttacaccccggaatggagcaacgcgctgtcgtcaaagcgtcctcacctcgatatgatcggcgtcggagcatatcttgacggcaggctcgtcggtctcgccggagccagcgcggactgcgacgctatgtggcagataggcatagatgtcctcccggaataccgccgcatggggatagcgtcgaccctcgtaaaccgtctcgcgcgggagatactctcaatcggaagagtcccgttctactgcgccgcgtggtcaaacgtgaagagcgcaagatgcgccatgagagcgggcttccgcaccgcgtgggcgcagatgacggcgaaaaagatctgaaaaaacagaccgcgtgaaaataacgcttcacgcggtctttcatatattctcattttgaaaacagcccggaaatcatctcaagcagtctgaacctcactttcacttccgtgctgtcaccggtgataagccttatctgtgacggtgtgagacccgcctccacgagctcctctttttcgcaccccgcggctcccgtacagagctccgggaagagtatgcaccaccagttcttgccctcagcgctgccaatgagcaccctcagcgacctgtatgttccagcgggcagcgtcacgcatccgtatgcccgcgtcgggtagctctcatatgtcagcgtgacgtcgaccgggagttccgagccgttctcgcggagtatcttctccgcttcgaggcggatcttttcttttccggcttccagcaccgcgttcgcgctctcaatgtcctccgtgccgtcgagcatatcatccataatcccgagaatgccgtcgcggaccttcagcttgagtctctgcgcctccggctcgtccgagtcggcgagcacgtgaagacgtatcacaccgtcatatatacccatgtcctcgcgcagcgccgcgaatggcatcatcagaagatacaccaccgaaaacacgagcaggaacaccgtcagcttatcatgcttcataaaaagatcacctccggaaaggattattgccctccggaggtcttatattcagttctgcggatcgttttttgattcatccataacagtcgaagtgtaatcccggtcgcaggttatcaccgcgttatagtttccgggcatcctctcgtgtatcttcatgtcgatgagatcaacgagcgccttgtcgcttacgccgcagtcgaccgggaccgcaatatcaaagatcagattcgtgtgagtcgtgccgcggaccacgcggaaatcgtgcatagtcacggagccgccgacctcggaggatacctccgagaccacctgaatgagctgttcgtgaatgcggttctgctccgggtcatttgtcacgacggggtcgagatgtatcacgacgtgaatgccggtctccttgagaaaatcgttctctatccggtcgatcaggtcgtggctgacgattatgttctgttccgcggggacctcggcgtggacggacgcgaagcatctgtcgggaccgtagtcgtggatcacgagatcatgataaccaagaatgccgtcgtagctcatgatcctgtccccgaccttcttcacgagctctggcgacggagcctcaccgaggagcgggtccgacgtctcgatgacgagatttatgccggaccagatgatgaacccggcgacggcgcagccgaaccacccgtcgaggtcgacgccggtgaactttgagatcagcgctccgacgagcaccgcgaaggtcgtgacgacatcgttccggctgtcggacgccgccgcgatgagggcggtcgactcaatatgctttccgaccgtgatatagaacccgcactgccagagcttcaccgcgatggacacaacaagtatcactacagcgagcgtagagaacccggtcggctccggcgaaaatatgctcttcgccgagcttatgaagaactcgacgccgaggacggttatcaccatcgagacgatgagcccggtcaggtattctatacgcctgtgaccgtaaggatgctccttgtcggcgggcttcgaagacaggcggaagcctatcagcgttatcaccgaagaggcggcgtcggtcaggttgttcaccgcgtccgcggttatggatatgctgttcgttatgatgcccatgaccatcttcatgaccgcgaggagaaaattcgacagtatccccacgataccggcgcaggacgcgcatttcgtccgcacctccggctttgtcgggtcatccgagccggggacgagcagatacagcagttttttgttcattgacagactacctttcaaaagaagagtattggcgcgatctgaaagctatcattcgcggcgggcatcgattttctttactttcctaaatatctcgccgcggcggaaagtataccatactttccgctctcataggtcagaccaccctgcatgaaagcggtatacggcgcgcgcataggtccgtccgcggagagctctatcgacgcgccctgagtgaaggttcccgccgccatgatgacgtcgtcagcgtatccggggatcggaaacggctccggagacacatacgcgtcgaccggagagcccgcctggatgcccttgcagaaattgacaagagcctccggagtgccgagctttatcgtctggattatatcggcgcggcgctcgttccatctcggagcgacctcacagccgagcttttcgaatatgtacgccgcgaagtgcatcgtcttcagcgcctgcgccaccgtgtgcggagcgtagaagaagccctttatcaggctcttgttcattccgagggtcgcgccgccgtcaaggccctcgccaacgctcgtcagtctgtaggacgcgagttcgaccgcgcgctttgtgcctgcgatatatccgccgcactcagccattccgccgcccgggttctttatcagcgagccgacgattatgtccgcgccgaccgccgtcggctccttcgtctcggtgaactcgccgtagcagttgtcgacgacgacatacgcctttgagcgcgccttcacgaactttatgatctcgccgatctggtctaccgtcagggtcggtctgtcaagatatcccttagagcgctggatgaacacgaccttgacgcggtcgccgaattccttcaggcgcctgtcagcctcctcccagttgaccttgccgtcgacaaggtcaacctgactgtactcaacgccgaaatccgtgagagaaccgttgcccggctcaccgtttattccgacgacctgctcgagggtatcatacggcttgccggtaattgcgagcatcacgtcgttcggacgcagaagaccgtagagcgcgatcgttatagcgtgcgttccgttcgagatagagtgtctgacgaacgcggactcggcgccgaagacatcggcgtaaatcgcgtcgagcgtgtcgcgccccttgtcgtcgtgaccgtagccgctcgtgccagcgaagcagctctcatcgacgcggtgctcgcggaacgagtctatcactctcgccgtgttctgatacgcggtcctgtctatgtccgcgaatatgtccttaagattttcttccgcctcaagggcgagtttttcgagatccattttatatatataattcctttcgtgtcaaacgacagcccggcactgcttccatgccggactgtccgtattttatatatccgtgtccgccaaaactgcggttttcaattattcgtcctccaaagagcgcacaatctccttgaatctgtttccgcgggtcatgaaattcttgaacatatcaaagcttgcggacgccggagacagcacgaccgaatcgcccggctccgccctctcaccagccgttctgaccgccctgacgaacgccgcgtcgtcaagcccctcaatttcgatgatctccggagaaccgtcgtaatcaggatcggcgagcagcgcctcctttatcttcggtgaggtcgcgccgacgagcacaacgaccttcgcgcagtcgatcagcggtttcgcgagcggctcatacggtatatgcttgtcatacccgccgcagatgacgatgaccttctccttgaacgaacgcaggcacgcctcggtgcgcgtcggactcgagtcgatcgagctgttgtaatacttcacgccgccaacaagcctcacgagctcacagcggtgctcgacacccttgaactttctcgcgacatcgtatatggtgcggttgctgacaaagccccacgtgagcgctatcgccgtcatgaaattctcgacgttgtgtattcccggcaccttgatcttcgagatatcaagcacctctttcaccgtttccccggcgcggcgcataatgaagccgttctcaagataatacagaacgtcgtcctgccgcctctgctcaggcatagtcttcgcgctgaaccacgacaccggcatatcgacgagcggcgccatctcacgtgtcgcgtcgcacccgtaattgagcacgagccgcccgcaacccggatgaaggaatatattctccttcgcgcgggtatattcatccatatccttgtgccagttcaggtgattcggcgtaacgttcgtcactgccgcgccgtaaggcgacacctcagtcagggactggagctgaaagctcgaaagctccgccacgacataatcatccgccgacagattatctatctccggaagcagcggacgcccgatattgccgccgacaagcaccttgaacgtcccgccgcgcgccctcttctcggactccgtcttaagcagcatccccgcgagcgtagtagttgttgtctttccgtcgcttccggtaacggcgaacaccttgcacgggcaaagctcaaggaacatctcaatctcgctcgtcacgacagccccgcgcgccctcgccgcctcgaactccggt

SEQ ID NO: 3003 - DNA, 5147 bp, Unknown
  16S sequences of unknown bacteria
cttttaaacacattcaagaaagtcgctttaccgaggctacaatggcttttttgccgattgaaagcaacaataagtccacaaatatcaaacaacttcctgctggaaaatgcgttagtatctatcatatgggagattatctgtcgattggacgctcttatcaaaagctgttacattattgtaaggctaattctctgaaaattatatctgatgcatatgagttttgcatcaacgactatcttacttctcaggatgaaaatgaatacatcactaaaatcgtgttctatgtggaataggtcagaaaaaattttataaaagccaatgggatagataaggacagaggatctgcatcaagcgcgcttataagcaataagcaaataggcaaaccaaatatggcattgggcgaatacgctcgcggattaaaaaacagaatacggggcaaaaatggtatcatatttcgaggaaagaatgtaattgatgtcataaaaaacaaaaaccaccgatttctcggtggttttttggtagcgcataggggaatcgaacccctgttaccgccgtgagagggcggtgtcttaaccgcttgaccaatgcgccatatctaacagctttattatagtatcctatttggcccaagaatgcaagccctaattttataaaaaacaccccgatttatttcggggtgttttggcagcggaactaggattcgaacctagacaatacgagtcagagtcgcaggtgctgccgttacaccattccgctacgacaaattgtattatacgcacttttggaagaaaagtcaactcccatagtgccgtttgtttcccagtttataacccgccattgctcggcaggtgggtatcctatctggctttttccgcgatcccgcttaaccgtggcaggcctggcgtactccgacagaactcgaattcccaatgtaaaactgtgggtttttaacaggaaacttcacgcacaccacaggattgaattggtgggcgatactggactcgaaccagcgacctccacgatgtcaacgtgatgctctaccaactgagctaaccgcccatgcgtcaaacgcaatatttattataccgactttacagaattttgcaagcacttttttaatagcattgcttctctgccctctgcaatggtatgatagatatactggaaaagataaggagaggttttatgacaccgttacccaaagcaaaacttcagcttttatatctgatccacaaggccgataccccggcacgttatgaagagcttgtggaggcctgcgtggattggcttccctattttgattttcagctttccctcaatgaattggtagagcaaggcttgatagcttataaatatggcaccgacagcaatcgtcgtattgtcgtccaagacaaagggcggcagattctctccgttttcgaaaaagaaattcctttgcataaccgcaaacagctggacgtgcaggcggccaagcttgccgccaaggctcgcattacctctgagtatgcggccagctatcagaagcttgaccaaaatcagtatgttgtatacctgcgaattttggaaaaaggctttaccatcatggaaattcgcacctatgtttccaatctcttacaagcacagcatctctgcgatttatggccgcaaaatgcaaaggccacctatgctgccatgtgcgcagagcccgctgacgggcaggacgcataaaaaagagccctaagggctcttttttattttacgccaatatcttttctaaagtgcatatcctggaaagaaatttcttggacggactcatatgcatcttttatagcttgcggaagagtgaaagcagtcctcacaacgcccaatacacgtcccccagccgtcaaaaaggcatcttcttcccttcttgtgccagcatgatataccattgcgcctgttttttcgcattctgccaatccatggatttcatagccactttgatactgtttcggatacccgccagatgccaacacgatgcagacagcagccttatcctcccattcaatggaaagctgatccagcgttccatcgatggttgccaggaaaatttccgctaaatcgctcttcaacagcggcagaattgcctgtgtctccggatccccaaaacgagcattgtattccaatactttagggccactcggtgttagcatcaagccacagtacaatacacccttaaacgaccgcccttccttttccatggcccttaccgtaggcagcacgatggtgtcgatcacttcttgtttcaattcttttgtaaaagtaggcgtaggacagaaagcccccataccgccggtattcggccctttgtcgccatcgtaagcacgtttatggtcttgggcagccggcatcggtgcaatatgcttgccgtcacaaaaacacaaaaaggaaacctccggccctgtcaaaaattcttctatgagcaccttggacccagcagtgccaaacacatgatcctccatgatctccgaaaccgcctgtttggcctgctctagtgtctggcaaatgtagacaccttttcccagggccaatccatctgcctttacaacgaccggcagcggatgcgtatctaaaattcggtatgcctcctcaacagattcacatacgctgaacccgcctgtcggtattgcatactttttcaatagctcttttgtaaaggctttactggcttcgatctgggcagccgcagcgtttgggccaaatgctttgatccctttttcattcaacttgtccaccatacccatagccaatggatcatccggtgcgacaacaaccagatcaaactgctccttgacagcataggctaccatgctctcaatgtccgtcgctttgatgggcacacaggttgcgatctgggaaatgcccccattgccgggtgcgcaccatagcgtatgcccctgcttgtacagggtttgcgcaatggcatgttcccttccgcctccgcctacgattagtatcttcattgatctgtatgcctcctttaatgcttaaaatggcgcatatgggtaaataccattgcaatgcccaattcatcacaagccttgatactatcctcatcacgaatactaccgcccggctggataatcgctgtaatgcctgccgcaccggccgccttgacgcaatcatcaaacgggaaaaacgcatccgaagccagcactgcgcccttgacccgctcccctgcatgctctatggactgctctaccgcccaaatccgattgacttggcccggaccaatgccgcagcttacctgatctttggcaatggtaatggcattggattttgtatgctttaccagcttccaggcaaacaagagatcctccatctctttttccgtcggcttacgcttggtgggcaccgtcagttccccgatgcctccctggttaaattcctgtaccagcagaccgcccatgacctttttcatatccagcatgccttccggcagttcctcacggatgccgggcagctctaacacacgaaggtttttctttttgcaaagaatttccagtgcctccggcgtgtaggcaggcgccacaatgatttccaggaaaatcttagccatctccgcagccgtatccgcgtcgaccgtcccgtttgtcactacaatcccgccaaaaatggatacaggatcggcctcatacgccttttggtacgcctttgccgtggtatctgccaatgctacgccacagggattggcatgctttacgcctaccactgcaatcttctcggtattatcgcggaattcacgcaacagttccagtgcgccgtttgtatcgttgatattgttataggaaagctcttttccattgagctgctttgccatcgggagggttgccggcgaagcgtctatctctttaaagaacatcgccttttgatggggattctccccataacgcatatcctgtaccttttcataggtcatggtaaattgattcggaatctcagcatgggtataatcgcgtagatattttgcaatcattgcatcataggccgccgtatgttcaaatacctttcgacataatgccagtttggtgtcgtagctgacttgtccatgcgctttcagctcctcaagcacgacgtcatagtctgctacatccacgactaccgctacatccctatggtttttcgcagccgcacgcagcatactggggccgcctatatcaatattctcaatgcactcttcaaaagagacaccgggcttcagcatggtctgcttaaacggatatagatttacgcagaccacatcgatgggcacaacgcccaatgcatgaatctgatccatatgagccggattttcacgcatagccaaaataccagcatgtaccatggggtgcagggtctttacccgcccatccagacactccggaaatcccgtaatatcgctgacattggtaaccggaacccccgcttcttttaaggccttttccgttccgcccgtactcactagttcaaagccgcactctaccagcccctttgcaaaaggcaccaggcctgtcttatccgatacgcttaaaaatgctctccttttcattgatcttcctcctccacgtacaccttacgctgttttacacagatcttatcctgtaccaataaacgcactaccttcggcaaaataatatgctctgcctgttccatcacccgtgcctggagcacctccggcgtatcgctggggtatactcgcaccgctttttgcatgataatggggcctgtatccgttccttcatctacaaagtgaaccgtcgcgcccgtgagcttcacgccggccgacagcactgcctcatgcactttaagcccgtaataccccttgccgccaaaggagggaagcagcgaaggatgaatgtttacaatgcggttcggataggccttgatcacgttttctcccaaaatggctagatacccggccagcacgatcaaatcagcgtcaaacgctttgagcgcctctaagatggcctggtcaaactcctccttgctttcatacgccttgcgcatgatgatcttactgggaatgccatgcttttttgcccgctctaacgcgtatacatcctttttggaggaaatgacgccggcaatacgtgcatcgcggatctctccgttttctatggcgtcaatgacgctttgcagattcgtgccgc

SEQ ID NO: 3004 - DNA, 17790 bp, Unknown
  16S sequences of unknown bacteria
tcaccccaaaggatgacccggaagcactggctacacaggcatttttgcacattttccagatcgatcagcaccgcccctttactgcgcccggcgtccgggaactggtcgaccggattgccccgctttatgtgacactggaatacatcacccgtaaccgcaaagaacatgcacagtttcttaaagaaggaacacaagcgctgtttggcaaataaaagacggcccaccagcgtaccatatgtgcagtacgtcggcgggccatatcatacctttgcttcccgacacggtgtcgggaagcagattcattcgtcttccagcaagctcttgatatccatgctgcgcaggatctccggcgggatttccagaatcacggcctctcctttttccgcttttttccggaagtagggcaggtctttttcggtcaggtattcgatctcactccaatcgtccatttcgattcacctcctttttggattgtccgtttgccgctataacaggctctcgctcacggtaatccggttctcggccaaaaaaatctctgagagctcttctttggaatacagggcctggccctgatcggtatggcaggctgtgatggcatgcttcttcatcggtcccgccgccgtctggatcgtctcggcctgtaatgtaaaaaacggatagagctccagtccttcatagaaatagccgccgtaccattccggcagatacagaccgtcccccgttttctgtatgtccttccatatctgagactcctcaaaaatcccgccatagctttctacctgataccgaaacgactgcttctgcgccgtttctccggtggcatcaatataataggcgatctgggcgagctcaggcaggtggtcctttgtatgctgatagatgccaagctgctctgcctgacggtattctgctttctcccacgtgcggtatttttcatcacagaccgcatcgtaccccttgacgatcaccagcgccagcttattatctaacttgcgcacctcatctggcgtcaggatttcccgtccgatcacatcgtagttgcggctgctcgatccgtgaccgccccggctctccccggtcgtctttttgtcgatcgtctgcttgccaaggagcttggaaatgtattcgtgggagccctgctcgttgccgcccaaatacacgaccgtatcacagcttccgggtatttcctcccacgcatctttgaacagggtctttagctgggcaaggttctggatgataatgttgcaggagatctcgcggctccggcaggtggcaaggatgcgtaagaagtcgtccgggagtgcggtattggcaaattcatccatccagagagcgacatggatcggcagctgtccgccgtatttgtggtctgcgatgtaatacagttcctgaaagagctgtgtgtataacaggccgacaaggaaattgtaggatttgtcgctgtccggaatgacacagaacagggccgtccgccgatccggattttcgtagatcccttccccgagggtgcggatctccatctcgtcttcgtccagaatccggaggatcgcttcattttgcaggtaggctaaacgggaatgggcggatatgatgatgctccggatcgtgtctgccgcaccgcttacgacttttttgtatgtaataagcgccggatggttctccggaagctgctgcatcaggatgtccagctcggaatcttctttgccgctctgtgatacttttgctttattgagcaattccatcacaccacggaagttcgccttctgtccctgctttggaaattcataccagacatacaaaatgaccgcctgcaggtacatgctctccgccttcgtccagaaagggtccgaagatgaggaacctttgggcgtcgtattcgcgatcaggttcgtgacaagcttcaccacatcttcatcggaacgcagataggcgagtggattgtagccatcggactctgccatattgacaaggttcaggacacggatgcggtagccctgcagttttaaataattgccgatatcccgtagcagctcccctttcgggtcgcaaaagacataggaactctcttgattgtagccgtttggcttgaccacccggaagctcttgcctcctccgggaccaccaatgacgagcatgttgttgtttaagtttgtctgccgcgtattcaggctgatccgcacgtgttccgtgatgatcttgttgcggtgcggatcactgtcctgcaaatggcggttcagctcttttggctctgccagccgcgctgtaccatattccctgccgggcatatagttgcgtctggcagactcgtaatacaaggtgccggtcagcgcggctgccacgcagaccaggatcgattttccggtcatcggcgtcagctgtaatgggaagggatgcagggcgatgcttcttaactggtctgctgcagttttgaaagtatgatccgttccatacaggcttccgatacagtacccaaggtaaattgcaagcaaaaacattgggatcagcaagactttttgcgtgtgctttttctctggcatattatctcctcttctgctgctcctgctcccgttcccggtcggcccatgtggcaggcttgcgcggcttttgcagctgtgatttttgcggctctgcctctggatgttttcctgcttttccggtcagctcctgatcgcgctgcaccagtatttttctcgtctcttccggcagaagcttccagatcctctgcaaatcttccggctgctgtccacctgcgtttctttctgattttccgtttgggggctctgcgaagaagtcctgcagggcttcagtgagctgctgggcttccccacttccggtttgaatataatcggcaggccggatcgggcctgccttgatctttccgtattttccactgaaatggtcgaggagaaatgccctgcatttgaccatatccgacggggatatgacatactgagtgcggttatccccgccgcagaggtctggcaggcgggcatacaaaataccgtgctgcttcatctccttttcgatcgcatgcaggatcttcttttcttctgtcgagacattgaggaactgtacttcatcccctttgattttccgcagccgtgcataggagacgctgcccttccactttgcgaggtaaatggtatctaaggtctttgcggtcaggatcgccgctttgagagacagatttccggcaaggaacatcaccttgccggaaatcacgatcagctggatcgtatcgcttacttcactcatcggaccacctcccgcttttggtctgcccgctctggcccgtggcgggcttttgctttttcttcttcgtagcgtgccgtaatcaggctgacaaagctttttcggatgtccggtgtcgccgcttccacaagtcccacgatccgcccctctggaaaatcataggggaacagcacccgtactccctgcgctacctccgtgatctggataccatcgatctctatgccttcatactgcatcgccgcgtaggcattcactttcccaccgctgcagagctgtatccggatctcctccggctccttcatctggaaccagcggtctgccgcctcccgcgtggccgcaagcacctgttctttaatgagttcccacagcaccggatccttgatccggatgacttctttccatgtgccgtctttctgctttttacgtggcagcactacgatcgtgcgcagcgcttcgccttcccgctgcagcatcagtaccttgacgttctgaatccggagaatgccgcccagggtcaccgtaccaatggcaaacagatctttatctgaaatgatccgcatatccgctcttatttccatttttctcctcctttctagcgtcccgtccggtcgggcctgtgctcaatggagcgtgcttcgaagtctttgcacatgacaattttcttttcggcctggtcgtatacgtgtgcataatcggaaagctgttcctctggcgaaacccgttcttcgttgatttcccgtatcatagcagaaagtttctccccgcaatctgcgatggaaccatgatatccttccattggagctatcaggcattcctgcgtagaagatggaagcacgtagtaaccatctggaaatgcttcggcgagtttttcacacattcccggataaaataacacggcagctccattcattctttcgctgttcgtcagtatataaaggcgattctcttctggtgttggcaattccagtcctagattcattgcttttaccacttcttctaaagattctaacgttaccggataatcccgctcactatttttcgtcgcgatctcaaagagccggttttccgtaattccatactccttcaacagatccttgttgatgggtatcgtaatcctggcatccggtgtcatataaattttacatacaactgccatatctcccatgacccgatgtggcagatcctccagcatttctttatgccttgtcactcctattgcacataaataaatctgatcttttacccttgcaaattcaacaatagaatctgcgtctttgccaagagcttcttgatttttcatactatttacgcacagctccgcaaaccttttacaaagcggctctacaaaagctcctttctggtaaatctcataggcaggatccattttcacaaccggcttgaaccgatagcccggctgagaaatgaccaacaaagtctcttctcttccctctactttgtaatggtctatgcgcaccgttctgtcctgatattcttccgggaaatgttccagaatatggtctttcatgtaatcacaaaattcttcaaactccatcattttccttcccctcctttgcttcttctgttcgctggatttttgcggctgcatctgcatagcgctgcagccggtccttctggttttctttctgtgcttcttctgtgtggacctcaaaataatactgaggtgctttcgtggtctgctttttcatgttcggtctccttcctgtatcctttcttttaactgctgataggtcaggcgctctgcatctgttaggatctgttttaacttcccggcggtgcaggccgggtctgcaatggccttgcggatcagcttttgctttcgccatgcatcgaaacggctcggggcggccttggcctgtccggattgcagatactcatactgctcttttatctgttcctgtgtctgcttcaaagcttccagctgaagcgcaaattgttccagctgctgtccgatctcctctaagattgtcgcgatgtcgggcgtgtgctcctgtttttgtgagatggcttctgcaaacagctcgatcgcgctggcctcttccgtctcttttcgaaaaaatcgggaaagtacaaagtcctctccggcgaagaacgccatgccccgcatcaggtcgagatcctgcgatgagatacccgcatcgtcctgaaaaaaatgcctgataaaagaatcggaacagccctgactcaccatgagaaaaagctgttcccgtttgtggatgtatggttcttcatgcaaatagtcatattgcaaaagcagtttttcatagcgctcctgcaccggttcctgattttgccggatgatatgtgttaccggtctgttttccagatgtgtccctcctctctgtctgagcaacttttctggtgttgggggtcattttctatctgctctgtctgcttttggatcggctgcttttgccgctcctgtgattcggtaaacaattgatacgtctctctggccaggcgatgctcctgccggatatcccgtaatgtgactttgcatttttcgatctcctgcagttttttcaatccattgtcctccggattgcgccggtattttttccagagcagatccttctgcctccgtgttgcctgctgttcctgttccagtgcttcaagacgatcctgcagtgcctccggcgtcccgatttcctgatcaatgagatacgcgagtgcatctgagagcttctgcacctcgagaatgtccttccggtatctccacgcctgctttcgtcccggcttccggatgccataggtattgttccatctccggtaaaattccttctggaagggcgtcattttaaaatgcggtgcgcgctgcactttctggtaaaagactgctttgatggcagcgcggtcgccataggtgcggtatcggtattctacctgtaaaagccctttttcctgtatacgctgacagatctcctgctttccatacccttttccaagccgcccggtacgcaccggacgttcgcggccttccgggcgcagggataaatatttaccgtcccgcaccacgtaatgctcccgtcggaaccatgcgaggaatgcctcatagctgtctgtctcatggatcgcctgatcgatgtcgtcccttatgatgtcataccagcgatacgatggcttttccggtcttttaccggcctgccagtcctggtactgcatgcccttccggtcgcctgccggatcgtactgcaaagttggcaagccatatttccgacacagctggtctgtgattggctgaatgcgccgctcccagtcctttttgggggagtgaaaaatcgctccgccctctttcgagactgaatcaaatgtaatatgcgtatggatgtgggatcgatcgttgtggacggcgaatgcataaaagtaccgctcccctaaaagcgcggcgcaaaattcctgtgcgacctggcaggccgtctcttcggagatcccgcagtccggcggaaaggaaagcatgtagtggaagccctgcgtgcagttacccgctagattactctcttttccccacaatctcttgttctgcttcatcgtgtcatagatgatttccggcgagaccccggcgtttcctccgatgtacaaaccatcggcggttttatccggacggcagatgtagaacaggttcttttttaagtgcgccgccgggttactccccggtgtctctttgatccgcaaaagccgcgttactgccatctgctttgtcgacctcctctcggttttctgtctctggcagccgtgttgacaccgtcagcatttccagctgctgataaaactgctggtagcttcggcggatctcttctaaatacttcacaagcagctgatagtcttctctcgtgatgaaccgcttggagttgcaggagcgcacgacctgattgatattgatgccgacgcgccgttcctgctcggtcagcctctggagcattgcattggtctcgggcgggagccttggctgactgccatagaacagcctccgacgcatatagccggattccgtcattcgatactcttctgcctgtcgtgccagctgcatggcttcctcttccgtcacccgcaccgcctttaggactgttcgagtgctatggactttctcttttctttttgtcatcgtgattcctttctttgatttttgggtatagaaaaagcagctaatctgctgactaactgctttcctgccttttcctgattcttttagttttcaaaatcctgtttcatttctgcttccacttcatctgccgaatagactctacccgaccgaatatcatccattcccttttctatctctgcatcaaactgtttttttgtaagagtgtcataccttacaggctcctcacctaaagctatgtttcttacttttgccatacataccgcctcctacatctgattctattgcctttatcttaaaattgcaatatacttgcaaacactttccttgcgactccaaagctggcctgcagccagcttctacatccgcgcttcctcgcggatggcaagatacgccaatgttatacattcgcatcttgtcaggggaagctcccctgatacccctaaattgccgcccgtttgccagtttttccggctttttccagggctgtctgtaggcggctgattcttgaacaattccgggctgctgctaacgagcagccaccgcctccagcctttgggccttgcgatcgcaattccggctctggccgcttttcttttcaactgcttccagtcctttttgcttttgccgatccatatcgtgatcgctatgctgtgccggtcctgcaggtacagctttggcattttctgatcgagttgctgcagaagccataagatggcaagattctctgccagcttttgcgaattggaaagcacaccatacctccctgatatcagaatgatttctgctttactcatccatttcctttcacacttttttcaaatgttttccatatttctgacacagaaacacagtatcctgtaatcacatcaaagccatacagcttttttacatagatttcttttttatatcgccggggcatttgccccggccctccttttttattcggaaaaatatctgatttcctgtttctccaagagttcccgctgttttttctgatagacttccttgctgattgttccctccatataataggccaaaagtaactttgcttcctcatccggcactacctggtcgtcgatggttctcgcgttgtctccctgcatgctttaatgctcctttcttccggttcttcgatttgtggacggagtttttcttttatccttgggctggcatccagaatcaggttggccgctttttttgcctgattcgccgcaaaatacaggtctgtcggttttcctgccctgatccggctgtaccagccctgtaggtaagccacattattttccatgctccgatcatcctgcagcctcgtcgccgcacagagaaaagatgctgaaatctctgccaccagctcttcttttgcataagtcaatcccgtccgttccgctatgaattttcctgtgctgtgtgcaagttcatggaatactgtagagtaatactgatattgactggaaaattgctcttttgcgggaagcacgacggtctttccctgtgagtatgccttatccccaccctcccgcgtcacgacctcgatcccatatttgtagctgtaatccgcaatcagtgcatcggccagcctgctgatcttggtcgcatcatgcgaaaactccggtatcttgaaatggctctgcagccctttcacatctgcgatgtggaactccctcgtatagcgcacgcggaatgtctcgaccaccggctgtccattctcatccagtacctctttcccctgttcatcttttttaaataccggaatattctgataaacgtaagcctgccgcgcccctttccggatatgtacttccggcctttctttttgcatctggcaaatgctccggtagctcaaatattctcccggctctaagaaaaaataattgactgccgcggaaaaaggacgatttggggtatgatagctgcaggcatacggcgcatgcgtccacggctttatccacgtgaaacgctccccggtatcgagtgcttgctcaattttctgcagtagctgtgcctgtataatatcaaaaatacttaccttttttacctgacctgctgtttctgactctgcccgcatcccgtttcaccccctataaaccactgaactggaagctgtttttctgcttgttgtaaatagcgttaaggttctgtccggtactgagcgtgatctggatgtttgcttttccggcattcgcatcgatctcataattattcatcgtccccgtgatcgtaccggtcagcccggactgcacgacataatcaaatgccttctggtaaaaaacctcttctcccccaacgtaatctaaaaacgcagttgagacagataacaagtctaaagagatcgtcacctgctgaacgggctggctgctgccaccggatggcagataagaagaaggggacgatgctgcgccacctgcctgcgtgtcctgtgtagttccctgtggtgatccgcctgccgtaatctgtgcctccggcatttctccggtaaacgtataggcatcctgctgtacatcgtagactgccagcaccttccactccggatcatcgttgaaataaatgtagtggaatattttgtttgcatctgcttccccggcataccgttctgtgctgaatgtcacatccgtcacactgcggtactcggacctggccgaatccatatgcagggcatccccaagctgctgcagaaatttttcttcttcaaacatcccgttgtaggacgtaatgatatctgcatcgagcccgtgcaggcgcaggccatacggcagctgtttctctgtctgcggctgtgtttccgattctgatgtctctgactcctgcgtctctggctcctgcccggttcgcgtttcggccgccttttcggtctcaagatcgcggaacctgaaactcacgagtacatccttttccggcatgggaaagagcacccgctcatcttctgccgccgttctggaacgctgcgtattgatgctgttaaactggtgatccatcacggagacactctccagctctttcccttccttcggcgatacaatcagttccaccattgtgtccggaacaacgtcaagcacagcctcatcctctgaatcgctctgcagataagactccggaaaagaaatgtccgcctccccggtcttatacagccgtacctcatatttgaccggtgctggttctgtcactttcccccgtccggaaatatataacagtgctaccgcaaccaccgtcagaaaaatgaccacccccattaaaatatacatttttttatttctcctcctgtacatgggcttcctccttatctcgtacatccttcaatgaataaatgctgtaaaaatccagctctttctcataactgcataaaaagagctccgaatttccatccgaagcaatgatttcaatctgatacgtcagctctgcctcatcctcactgactttttcgactacatcaatctgctgtacttctatgagcccaccgtagagcatgtacaggtagtccgatactgcatctgaaaatgcttcccgcctggttccgatcagctcctgcattccgccttgggcggtctcggtataggccggatggaagttgcgtctggctgcctcgagctgtgtctgcatctcttccgcctgcttttgcgatggctccgatcctgctgctgttgccggttgcgtttcttccggatctgtctgtccttccgattctgtctcatccggcagattcctttcgatgtgctctgtttgcattttggtttcttttatctggtacagcgattgctccgtgtcccgttccagttgctttgcagccttctggacgatttttccggtcacggtatggagcactcttgggactgccatcgtaagaaggaagagcccaaaaagtaatagtagataaattgcaattcgttttttatgattcatagcgtcacctctttctcaggaaccaaagaaccagttgctgccgatttttacggcattcggcccggtctgatttccttttttgctccggaaacttgtatatttatggttccgaatgccccgtttcaggcaatccgaaacagcccgcacgacatagtccggcacatttccattcagacgttttttccagtaatgatccatgctgtagcaatattgccccggtgcagtcagctgagctaatgcattcccaccaagcctgccccactgcgccgattctgtgcggttcattgccgagctgatgacggccagagcaccttcatagctgccgttatcctcctgtgctacgatcgcgtagatcagttccaattcggatatggtataattcgtcggatcgatccggtaatttccttctgcgtaaccagattctgtattgatcagatagcgccggatcgaagcaatcggccggtagtccaccgcacagatcgtaacaccgcgtcccggattcgctgccgtgttgttccggtcaccggaacactgcgcaacctttccgttcccaaggtagatccccacatgcgatccgtagcatacaatatcaccggggcgagccagtgcaaggctcgctactgactcaccggatattccctgctcttccgcaagacgcgggatggaaatgccaaatttccggtagacagactgtgtgaatccggaacagtctgccccggcgctcaggcttgtcccgccccacacatactgcaagcgtccggcaaatccggctgcataagcagcgatcgctaccccggtctggttcgctgatacagcctcctgtgtggagcgcagggtataatataaagaccggttgtcctccggctctacacaggcggttgcggtctgtgtaatgtcctgatccagcgccagagttctggctgccaacccggataacagccgttttttttccacaaatccccgcacatccccggattcgatgtacacccagccattttcattgtccacaagggcatataccgttgtcccagatgttgtggttccgacgacctttgatgtttctgactcatactcatagaccggcccgccctgcagcataatcgcgtatcgctttgacgcaaggaccggctgtgcggtcgtatgcgtgtaagtataagcggcattctctgctctttcacagaaggcgattcccgtctttaagttcttttctccgatcgtctctgccgtcttttcggcaaagatcccttcgatcaggttctgctgctgcacaaagccccgtaccgctccggactcaatgtacgcccagtccccttctgccgtttctatgtgctttaacagataagcagtccccatatatgggatgtagcccaccactttactgccagtagttgtttgctcgtataccagtgcatttgctgtgttccggacaagtgcatattgtttttccacctgaatgaagcgaaaatccggccggatataccagctggcatcccagtagtatgagttgctgccggagaaatctttctctgtatctttcgtttcatctgattcggtttctgcctctgattctggctcggagtccgattcactttccgactccggctcactttctggttctgtgctggcctcggtgtccggttcgctttctggttctgtgctggcctcggtctctggtttgctttctggttctgtactggcctcggtctctggctcactttcgttttctgtgctgccttcagtttctgattctgtttctacctcagatgcggtttccgattcactttctcgcgtttccgacttgtcctcggtctccggttcgctttccggccacgatacatccccggtctctgacccgcttcctgatccagttcctgtctccacctcggtatctttcattcccgtctctccggcccctccaaatgccgatgctccatctgtctcatccatatttccggcggacggctgtgtctcacctccggatgatgtcctgttcagatcctccggagcttctatctgctctgcatatacatagctctgatgcacggattgttccgaaattccagataacaaaattgtcagagccagcattgcaggcaatccattttttcttctgcgcatatttcccctctttctttaaaatccaaaataccagtttccgccgatctgcaccgcgctggcaccggtctggctccccttccggctccggaaacttgtatatttatggttccggattccttttttcagacagtcccatacagcctgtttgacgtaccccggcacgttaccaccaagccagcgccgccagtatgaatcgttgctgtaacaatattgccccggcgcagtcagttgggccagtgccgtgcttccaagggatttccacctggctgattccgttcggttcatcgaagagctgatgacggccaacgcccctgcgtaactgccgttgtcctcctgtgctacgatcgcccatatcaattccatttgcgctttcgtgtatgccgtcggatctgcccgatacccaccgcctgtcccgttttccgaaactgttcttgccggtagccggataatgtagtccacctgcgtatccagataagtggtttttaccggcccccatttatcaaacacatacgtgcgcatctcccagccatcttgatcctcatgtccgaaattttcccagtgtccatttgtcccgcctcgccctgcatcgaaccatttattttttccggcatatacattgatgtgttgcagggaatgccagcagcagatgtcgcccggcttcagataccccgatgcgatcagactacgcgcacgtttgtgaaccggaatgatttccgcatgcgccttcagatgcgactccgtgcttccgccccacttgaaagtgttgttgtaggtaaaataaaagaagtcatttttctcaatgactcccagttcctttaacgcccaccggatgagctgtgcgcaattggttgctttctttgcatttatggatgtcgctgccgcccaggtagacggcgtccctttattcgtataccaccacttgactcctttttctttgtcggcttccagcctcgtattatacttttccagtagtgcaagcagctcctccggcccggcctcatccgtatgaactgccatggctacccgccggattacatagcgccttccgtccgctgccacactgcccatgcagacgccgcgccccggattggaaaaggtattggcccttccaccggagcaatgaatcatctgtccgtctcccgcgtaaatcccaacatgcgaactgttacccgccgaaatactcccagagtaaaacagaatgaggtcgcccggctgtgcgtttgaaagaccacccgataccagtgtccctgcatgttcctgctcataggttgtccagccgatttcatagcccaaatgtgcaaacacaccatgcgcaaatgaactacagtccgcataatcctgccagtctgttgccgagcttcgtccggcaccccagacatagcgcgtgacaccgatccattcgcgggcatagtctacgatctcgtatccggatgccccgtttgaagctccataggtcgactcctctgcttcgcttccggcaagtcccccgatcagtcccatcaggattgcatataaaaggacgaccagaaagaatagcccggataatggtaccagatacctggccagcgagaatcccgcccgctgcattgcggatcgaacatcccttcgcgtacgctcataccggaggcgcagtggtatcagggaggtcgcagccaccgttttggccgtctcatactctgcctctgacatctggatctgctctgagcggatgtcctgtttgatcccttcggtacgtcggatgtcacggtcaacgagcccaagtagttcccggatcgtagattctgacttcctgtcccttcgtttttctatccggtttggcggcctgctatccgtttccggtgctttctgtcgcagtccttcccggctctgccagctgacggtagttgcctgcacccctacctgactctgccagcaagtggttgcggactgcgtttctcgcttctgtgtagtgttataatcacctttcttttgcgtactctttttttgcgccgccgtccggtattcggatctttcccggccccaccgctgttcttctaaagcagctctctggtagcaccgtttcttctttgccgctcttctcgcctgcccgaataatttttgctttttgcgcgttgagtaagcgttccagcgccgcttctgtgcaggattcatcccggatgtcacttcacgaatatcggactgctgtagccggattgctctctcctttgcccgccgcaactgcatttcttacctccttttctcctccactttctcatggaaattcgtattaaagagttgatacagcttgctctctttatccagccgattatccttcgggatatatttgtcctcgaattttaaaaggccgcagccgggcgggacattgtggacgtactctaataaggtgtcggaaatgccaagtgtgcgatgcagtagctccagctcgatgtccgactggttcaaaagggacagataggcgctgttgcacagcatcgtctcgacgaccttgctttgcagaaggtctgcaagattctgcgtcgcaccggtacacaagccacccaacttacgaacctccttccagattttttcaagataccgggcggaaaattcctgcgatgcgaggttatggaactcgtcgatataaagccaggtcgcttttccttttctcgcgtttgacgcaattctggcccggatcccttcgagcatgatcagcatcccgatcgcggcctgttcctgcccaagcccggcaatgccatacacggtaagccggttccttcccttttggcgctggatgtgcgtctgaccgttaaacagatccagagatcctgtcacaaacagctctaacgccagctgcagctgacgggcctgcggttctggctgttcccccatcgtccggtacaggtccgagagggtcggcggctgttccatctttttccggctctgcagcttcgcataaatctcatttacgcaacgtccgatcagggatttatcctgcgccgtaatttcccggtccaatatctgagaaaaaataccaagcaccagctcggtcttgtccgtgatgtatgctttcacatttggaaaataactaagcgtatccgtatccaacgggttcacggtatggcctgcctccgccccaaaatcaatgaacgtttcctttagatattccgcaatcacctgatactcattttgcgggtcgatgaccagaatatcatcttttgtgttcagatacacctgcatcagttcctgcttgatatccatcccttttccaccgccagttacgcccaacacaaacccgtttccattccgaagctttttccggtcgccgatcagcacatttttactcaactggtttacaccgtagaacaggcctccgggttcgtacagctcatgtacatgaaacggagtaaacgccgcgagtggctgcgtaaacaccggctgcatctgtgcgatcgcccgcatcccggtcggaagcgccgtattgacggcttcgatctgttcccattttgccacggaaaaggaaaccccttccccctctgccgtgcttaaaaaagcggtcgcgtcatgttccagctgttccttcgaatttgcagaaaggatggcataaacgccaagatagtacagcttctcgtcattgtcatttaaaatatcgaggtaagattccagctcttcccgttccctgcgccgttcatacgtgatatctgacgaccatgcttttgccttgtttcttgcttcctgctgcttctcgatcgcccgcccattctgtaagtacagatccatcaggcgtttccgtgcaacattctgtggcaccggaacagaatccagcgtcaggattgcatgccagctgcctgccatcagccgggcaatgagttctggatcgaccgcattcggtaactgcggcagatagtatgcccgcacatatgctcctgccatttccaaggtctgtccgtcaaatgctccctgttcattctggcaatgccgcacatagaaaggcgcgataaaatccttccagtctgccccggtcttcaccgccctgtcaaaatcaaacacataccgttcttccttcccctgccggtaaaatgcgtgcaggtaatacaaacgcgcctgcgcatccagcgggatcaacgcactccccatctgccggaaactcacggcaaggctcgcctcaatcgaccgaaaaaagctccttgccgcttcgacgtccgccctccgacaggacagcacaaagatcctgcactgctcgatcccggaacggcccttttgcatggccgcctccacatgcatctgaaacgactggtacagctccccatactccggttctgctcttaaaaacagttcccttctcacccggtccatatcccggttctgattgatcaccagcaatttgaacgggacattcaggctgtttaaggcactgcaatattgcttta

SEQ ID NO: 3005 - DNA, 17985 bp, Unknown
  16S sequences of unknown bacteria
ttcgcgtacagatttgtcaattgtaatgaaatatctgtgattaatcagcggttccttaaggatcagtccttcttcctgagcataaggaagcgaggcgttcagtaagcgaaatatactctttatggtgctgtaggccaaaccggaggtttccaattgaaaagcaaaatcatatatcacggcaggagtcaattccggcaacgtaaaatgaccgagaaggtgggaagatgtccttcgatctgtcgccgatagacttgaaacgaagtttctttcacacaacccagtatttcattttccagccagtattttaaccagtctttcaataatggaatccggctttgggggcaataggatcgttccagacattccgccttttttgcagcaaaacacagcgtacttcggtatattgatacccatagacataaccaaatttggtttttcctcccgctgttttcccaatgacatagcggccttcatagcgaccgtcccgacgcttataaatattttctccgtgcctgggcattcttgcaacctccttagaactgtatggattttgacggcaattttgacggcttatttaatttcgttcttcattttttctgtgcttcttcctgcgtttctaaagcgatcggtcgttgtctgctcgcattgagcgaaagagattgtgatacggtttctagttctgttgacatgcccaaaatttctgcttataataggaaagcgatggaaattggctttcggttttttcctattatcgttgggatcatcgtaaaatacgaaattttgcgacacggtcaggcacatattggttctctaacccaaagtaaaaaggttgcgggcatcgttagtttttgcactatatcacggcgtattctcctgcagtgtcgacgatgaaaagaatacttggaaaaacgtgctgaatacaaaaaaacacgcgcttttgataacgcgagcttctgaacctgacttttctctacaaagggtctacgaaagatgaaaagtcgtgtgtatttttatgcatttttgattttggtggagtggggtaaaaaagtaggctcgaaaatgctgttcaaacctttatgtatcaaagcttgcaagaaatgcaagtaggcaaaaagtagggaaaaacagcatacattcagatttgagagcattttcagtctgctttttgaacaaaacaaagaatcccgaaaacccttatcaatcaaggtttccgggaagtggtgggattagtagggctcgaacctatgacctccacgatgtcaacgtggcgctctaaccaactgagctataatcccattttgacgactgatgatgtaaagcatcagcagcgaaaataagtataacatgcgtccgaaaaaaaagcaatagtggaatccaaattttttcagcgaggaatccaaattttttcagcgaggtgggacgaaaaacaaaacggaaaaaacacacccgctgctctgaaaaaacgctatcagagcagcgggactggaatggaaccattatccccgggaaaacagtgcgcctgcaataccgcctcccgctacacccatggcgatgtcgctgagataggaggtcaggggtaactgctggccggaaaggagggcgtagagcaccacccccaggagcatgtaaagaaaacccaccagagcgccggtcaacaggccacgctcgccgcccgtgccaacggccagacgaacgcccacaaaaatggccgccagcttgatcagctggttcactacccgaatgacgccgtcggagggcttgagccattgcatcatgaaagcaaagagcaggatgcaggccagcgtcaccccgaccgcccccagtaccccgcggatcagtttcgtcagaagcgtttgctgtcgccgtcccgaacgcctgcgcgtgggacgggaggcggcctgagttgttgcagccatagaaaaaacctccctcgttcgctttgtactaccctatgcgaacgggggaggctgttatgcctgtaaggcagagaaacttagttcagcagttcgccgtcattttccacggtgacttcttccacattgcggatggcccaacgggcaacgatcatcttggtgtcttcacggcccacggacaactcaatggtgtcatctttgatgctcttgatggtgccatagatgccgccgatggtgcagatgcggtcgccgggcttcagcgcggccagcatgtctttgaccttcttgtccttctttttctggggacggatcaggaagaagtagaacaccacgaacatcaggatcagcggcagcagcatcccgagcatttccaccaggccggcgttagcggtggcggcggttccgtcagcggcggtggccgcagcagtgctggcggcggtttccagagcgtaaatcgaaatcattttcattaacccctttccaatgataggcaaattatagcaaattctttcgtaaagtacaagcgcagattgtgaacagattgaaaatatccttatttttcgctctgctccggctgatattgataccagggcagcatcaggctgtcggcgggccactgctgtacctcccagatccggccgtcggtcagcaggaccagcggctggcgggaggtgaaatacagaggaaggttccgcttgagaacggcggttttctgcagcttcacgtcatggctggtggggccgttggacacaaagcacagctccggcgagaccacatccagcaggtcgggagagataccgcccacgccatgatgggggagcttgagaatatcgctcttgaactgcccggcatattctcgcgccagatcccgctgagcggtcagaccgatgtccgccgtaaacaggatgctccgttccccatagcggatatgcactaccatggaacggtcgttggtgtttttggtgcccatgtagcggtaggtctccagctgcgccccgcccagcgacagggcctcgcccgcttcgcagacacggatgggaatgttcagctcccgaagctgatggatcagctggcgctggtatttgtccgaatccagcggaaaggtggaaaggtattcgtccgccggaattttggcaagcagctccgcaaagccgttgatgtgatcccgatgaggatgggtgttgaaagcaaagtccagccggtcgatccccagcgcgtcacacagacggaaaaggaaatccggcgtgggttcccgtcctacgcccgcacagtccagcaccatggcgtggccttcacaggtgataaagtagcaatcctgcgcgcccacgggaatacagaagacccgcagcgtcttgtcctgctgccagagatccatctcccgatcctgatcgaaaacaaagacggtctgttgcggcgcttcagcggtttctgccgcggcgggtgcaaacacggaaagaagcagcactgccagcagaacgacggcagcccggagcaacgagcgtttttgagtcataggcttgattcgtcctttcacgcccggaaatcgtcttccgtcacgcagcgtctattgtagcggacggacgaaaggcttgtcaatcggacggaaaagttttgacgaagaacttcgaaaaaaacgggacgcacatcgggtttgccattgacaaaaaggccggttccgtgatatagtaactgggtgagccgctcaagcggggctttgaagtgcggaaatcgccgcccggcgcttggcgagtatggatcaggaggtgcttgaccatgtatgcagtgatcgtatctggtggcaagcaataccgtgtgtctcagggagacgttatctacgtggaaaaactggatcaggaagtggactctaccgttaacttcgacgtgctgatgctgggcagcgaagacggtgtggaagtcggcactcccaccttggccggcgcgaaggtcgagggcaaggtcgtcgctcaggtgaagggcgaaaagatcttgatctacaagtacaagagcaagaagaattaccatcgccgtgccggccatcgtcaggcctacaccaaggtggaaatcacttcgatcggctgatgacccgcgtcgtcgtatgccgggatgagcggggcgtgcgctcgctgacggtcagcggccactcaggctacgccgaaagcggacgggatatcgtctgcgcggcggtcagcaccctcatcaccacctgtgccaacgccatggaaagcgccgccggtctggtgccgctggtttcgcaggacgaagccgcgacggaaatttcggtagcgctgccggaaacgctttccccggagcaggagcacgacgctcaggtcgtcttccgcaccgttttgcagggattgcgcgacgtggcgcaggaataccctaagcatctgaaaatcaatgatgggaggacattatcatgttgaagctgaatcttcagtttttcgctcataaaaaaggtatgggctccacccgcaacggccgcgaaagcgaaagcaagcgccttggcccgaagcgtgccgacggtcagttctctctggccggcaacattctggtccgccagcgcggcacccacatccatcccggcctgaacgtgggcatcggcagcgacgataccctgtacgccaaggtggacggtatcgttcgtttcgagcgtctgggccgcgacaagaagcaggtcagcgtttatcctgtggctcagtaatgacaaagccagaagaccagtacggtttcaaaccgcgctggtcttttcttttgtttgaatcataaggcgagggcacaggggaaaaattccgcctttctatggacgcacatggaacagatatggtaaaatattccaagatattttaggagaggtgattacatggattccgtgattcgggatatcgatctggccccgcaggggattcagaaaatcgactgggttgaaaagcacatgcccgttttgagcggcattgccaaacagtttcgggaagaacagccatttgccgggctgaaagtggtggtcagcgttcatctggaagcgaagaccgcctatctggcgcaggtgatccacgaaggcggcggcgaagtgtacgccaccggctccaatcctttgtccacgcaggacgatgtgtgcgccggactggccagccggggcgtgaccgtgctggcgacccacggctgcacactggaagaatatcatgacttccagtgcagggccctgtccgtgaagccggacgtcattatcgacgacggcggcgatatggtgcatatcctgcacgaagagcaccccgagtgggcggtcaacctgcggggcggctgcgaggagaccaccaccggcatcattcgcctgcgcaaccgggccaaggcgggccagctgcggttccccatgttcaatatcaacgacgcggactgcaagcacctgttcgacaaccgttacggcaccggccagagcgtgtgggacggcgtgatgcgcaccaccaatctggtggtggcgggcaccaccgtcgtggtggccgggtacggctggtgcggcaaaggcgtggccatgcgggccaaggggctgggcgcgaaggtcgttgtgaccgaggtcgacccggtgaaggccatcgaggccgtgatggacggctttaccgtgctgcccatgatagaggcggccaaggtgggcgactggttcgtcaccgtgaccggctgcgacggcgtgatccgccccgagcatatgctggaaatgaaggagggcgctatcctgtgcaacgcgggccacttcgacgtggaggtggacgtggccgggctgcgcgctctggcgaaggaaagccgcgaagtacggcacaatatcgagggcttcctgctgcccaacggcaaaaccatttatctgctggccgaggggcggctggtgaatctggcggcaggcgacggccatccggcggagatcatggacatgagcttcgccctgcaggccgagtgcgcccgccgtatggcggagtgcggccgggacatgaagcccgatctgtactccgtgccggtggacatcgacaaggcggtggccacccggaagctgacagcgctgggcgtgtccatcgacgttctttccgaggaacagaaagcctatctgggcgtataatgcgcccgaaagcagagaagaacatacataagaaaggggaaatgttctgatgaagcgcagaatcggtattttgaccagcggcggcgactgcccgggcctgaacgcggctatccgcggcgttgcgcgcgctgcttatgaaatgtttgacgcggagatcatcggcatccgaaacggctacggcgggttgatcgagggcgactatcaggaaatgcgcaagaagcagttctccggcatcctgaccttgggcggcaccattttgggcaccagccgcacgcccttccgcaatatgcggatcatcgaggaaaacggcgtggacaaggtcgccgccatgaaaaagacctataaggatctgaagctggactgtctggtcacgctgggcggcaacggcacccacaagaccgccaacctgctcagtgaagaaggcctgaacgtgatcggtctgcccaagaccatcgacaacgatatttacggcacggatttcaccttcggcttccacacggcggtggatatcgccactgaggtcatcgaccgcatccacaccaccgccaccagccatggccgctgcatggtcatcgagatcatgggcaacaaggcgggctggctgacgctgtactccggcgtggcaggcggcgcggatgtgatcctgctgcccgaaattccctacgacatcaaccgcgtggcggagaccgtggaggcccgggccaacagcaagaagcctttctccattctggccgtggccgagggcgcgatgagcgtggaggagtccaaaatgaagaagaaggagcgggaagcctaccgtgcttcgctgccctacgactgcatctccaagcgcattgcggcgcagctgcaggaactggtgggcgtggaggcccgcagcgtggttcccggccacatccagcgcggcggcagccccagcgcctatgaccgggtgctgtccacccagttcggcgtacacgcggctcagttgatccgggatgagcattacggcgtgaccgtggccctgaagggcaacaagatcgtccacaacgacctgaaggatatcgccggggtgcccaagcccgttcccatggacgacccggtggtcgtcactgcccggaatatgggcatcaatatgggcgactgatcgtttgaataaaacaagcttcgcggggcagctgctccgcgaatttttttattcagacaaaataaaagggccggttctgctggaaaatgcgaagcaactgcgggatcgacaactgataaggaaatcttgccttgcagccgggaatatgctatgctgactgacgaaagacggaaagtccgtccgagggaggaaaggccatgctgcggacgctgtttttagtgtttttgaagatcggggcgtttacgtttggcgggggatacgccatgatcgccctgctggaaaatgaatttgtggaaaaacggaattggctggaacagaaggaatttatggatatggttgccattgccgagtccacgcccggcccggtggcggtcaactccgccacctatatcggctataaaatggctggtacagccggggcggcggtggctacgctgggcgtatgcctgccgtccttcgggatcatttatctgatctcgctgtttttcgatcaattcttgagtctgcggttggtgggctgcgccttccggggcattcaggtctgcgtaatctacctgattttgagcgccggactgaagctgtggaaggggctggaaaaaacgccgctgaatctggttctgctgggcggcgttttcgcggccatgctggcgggttctgtgctggccgtgtcgttttcctccgtgttttatattctgctgggcggcgtgatcgggctgacggtttatggcgcgtcctgtctgaaaaagaagggggcggagcggaaatgatctacctgaaactgttcctgacctttttggagatcggcaccgtttccttcggcggagggtatggcatgatcgcgctggtgcgggaggcagttctgggcaacggctggctgacggaggaagaattcctgaacctgatcgccgtgtccgaatccactcctgggcccattgccgtcaataccgctacctttgtgggctccacccaggggggattcttcggcgcactggcggcgacgctgggcgtggtgctgccctcttttgtcattattctggtgatcgcggcgctgatccgcaattttcttcagtatgccggggtgcaggcgttcctgtccggggtgcggccctgcgtggtggcgatgattttggccactgccgttaccatgggcctgaaatcgctggtgcagttccaacgttggggcgaccgctttacgccggactggaaaagtctggcaattttcgtcctgctctgggcggtgcatctcttttggaagaaaacgcggaaaaaagcgccgtcacccatggcaatgatcgggctttcggcgctggtggggattttgtttttcgggctggcgtaaggggattttttaccgtttcagccgatcaatggcttcctgcagggtcgggacgaaaaaaacgtcccggccctgattgctttccaagatgaaatcatgcagggatttactggtgcaacggaaaaagtcgccgcagatggcgattttcccggcatagttgacgtacttttgcagactttcgcccgcaaggccgggactgggaatgaaaaaatcaggcaaattgagcccggtacatggcggcataagcaccgtcccggcggagaagctcctggtgccgcccctgctccacgatctgtccgtcctgcaccaccaggatcaggtcagcgctgcggatggtggacagccggtgggcgatgacgaagcaggtcttgtcccgcatcagcgcccgcatggcctcctgaatgagggcttctgtgcggatgtccacgttggaggtggcttcgtccaggatcagcaggtgggcgggctgcagcatggctcgggcaatggtcatcagctgcttttgccccttggaaatgttcacgccgtcttcggtcagcagggtgtcgtagcccttgggcagccgctggatcatgctgtgaatgtgggcggccttggccgcttcaatcaccttttcccgggtcgcaccggggtttccgtaggcgatgttgtcgtgaacggtgccgttgaacagccacgtgtcctgcagcaccatcgagaacgcgccccgcaggctggaacgggtcacatggtggatggactggccgtcgatggcgatcgtcccggactgggggtcatagaagcgcatgagcaggttcaccagcgtagtcttgcccgcgccggtggggccgacgatagcgatcatgctgcccggagcggcggtcaggttcacgtcccgcagaatgagccggtgagggtcgtagccgaagttcaggtgctcgatgtccacttggccatcccgcacgtccagcggcttcgcccccggcaggtcggcgggctcctccggctcgtccatcagctcgaagacccgctccgccgcggccagcgccgactgcagctcgctgaaaatattggccgcttcattgatggggccggaaaattttcgggaatacagcacgaaggaggaaatattgcccagcgtgatcccgccggtcaggtacatcagcgcaccgaaaaggctgatgagcgtcagggaaaggttgttgatgaaattcaccgacggaccggtaatgctggcgtagtactccgcccggtagtagctttccacggcggcttcgttcttttcatcgaaacgattcagcacgtccgcctcccggtgataggcccggatggtcttctggccggagacgtattcctccacaaagccgttcatttcgcccaggcacttggaacggttgtgatacaaaggccgtacccgccgggtcatgaaccgggtgaacagcacggaaagcggcaccgtgaccgcaaacaccagcaccaatagcggcgaaatgcggatcatcatgctcagcgcgcccgccacggtgatgacgctggtcaaaatctgcacaaggtcattggaaagggacgtgttgacggtgtcgatgtcgtagctgatgtggctcaaaatatcgccggtctgccgggtgtcgaagtactgcaccggcagacgcatcagcttggcgaacaggtcggcccgcatcatgcgcacggtcttctggctgagacgcagcacgatctggggcaccagataccccagccccgccgacgcggcgtagaacagcaccatcagccgggcgtaggaaaacaccgtgtcaaaatccacctttcccggcccgcccgccaccgcgtcgatggccttgccgcacagggtggggccgatgagctggaacaggtttcccgctacgctcaggccaagcgccaagatcagcagcggcgcgctttgccacaggtagcgcccgaggcggcgcagcgttcctttggcgttgcgcggtttttgaatcactccgttacgcggcggcatcgtcgtcccctcccatctggattttcgcgatttgggcgtacagcgggcaatcccgcagcagggcttcgtgcgttccaagccccgccatgcggccttcttccagcaccagaatctggtcggcatttttgacggagctgacccgctgggccaccaataacagcgtggtgtccgggtattcctgacggacggcggaacgcatcatggcgtcggtgcggtagtccagcgcgctggatgaatcgtccagaatgagaatttccgggttcccggccagcgcccgggcgatgagcagccgctgcttctgcccgccggacaggttgaccgccttggcccgaacgggatgctcgtagccctccggcgtggccagaataaattcttccgcctgcgcgcaacgtgccgccttttcaatggcttcccggggcagcccacggccaagatcgatattttcataaatggtgccggcaaagaacgcgtccgactggaacgccacgccgaacagcccgtgaagccgggcttcctccatcccggcgatgttctcgccgtccacgtagatagcgcctttgcccagcggatagaatcgctgcaacagctggatcagcgtggttttgccgctgccggtggccccgatcccgcccagcgtttcgccctgccctacggaaagggtcacggggcctaaatcgtacccgcgggcaggctgggcataggaaaagcacacgtccttgaaaacgatgcgggagcgactttccagccgtgccagtccgccctgcggcacctcgtccggcaggttcagcacttcggcgatacgatccgccgaagccgccgcctgggagagcatgacgaacattttgtttaccgacatcatggcgttgagaatgatggtgaaataggtcagaaacgcaatgatgctgccgggcttggtcagccccagattgacccagtaagcgccgcagaccaccaccgccgtcagccctagattgagcaatagctgcatcatcggattcgtggccgccatgaccgagtcggcatgaatctggctgcgggaaagggcttcactgtcccgctggaaatgggtgcattcatagtcgcccttggacagggcgcggatgacccgaatgccggtaatgtcgtcccggacggtgcgcaccatgcggtctacgttctgctgcacggttccgtacagcttcaggccccggcgggagatcagcgcaatgcccaacgccagcaggggcagcgtggccagcagcaccagactgagccggaagtccatcagcatggtgacgatgatgccgccggtgagcagaatgggcgcgcgcacgcccagccgctgcatccgccccaacgtctggttgacgttgtaggtgtcgctggtcagccgggagatcaggctgggtacggtcaattcgtccatctgccgggcggacaggtgctcgactttttcaaacagatcgtggcggatgcaccgggtcgcgtcccgggaaacggcggaggcccggcggttggcgataacgttgcccgccagcgcgatgaccgcgcacagggccatgcccgcgccccagaggaaaatagcccgcctgtcgccggtaggaacgacctcgtcaatgatgtgggccaagatccacggaatggccagatccatcaccgtgcccgccagcttgatgccaaagcccgtcagcatccgtcccagcagcggcttcagatatccgaggatccgtttcatgcgtcccaccccacttcccggtcgatgtagtcccgcgcccgctgggagacccgctccatcagggcctgcagctggtcacgctcatcttccgacagctcggccagcagatgatcgttccagccgcagaccagcttccgaaccttcgggacgatctctaatgcccgctccgtggggtagaccagctggcagcggcgatcctccgggcagggctcccgccgcacaaggccctgccgctccagcgcggcgatctgccgggtgacggtggatttgttgaaatacagcgccttggccaattcttcctgcgtcaggccggggcagcggcacaggcgcagcaggtagggcacctgaccgccgcaaacgcccaggtctttcaggacggcgccgcgctgcatctgagtgcagcggccgatgatgttcagactatgggtaaaggaaggcatctttttttctcctgtatcaaaatggttgcataggcaactaattcggaaaaaagcgtaccatgaatggaaaaagctgtcaagcgccgctcatgagattctcagaaatgtttcagcatttcttcaagtttttttttcgggaatgtggtatgctgaatgcgtcaaaaaggacggaaggagacgagcgtgtggcaaggtacaccattgaagatatagagatcctccgcaaaaaaagcggcatcacctacgaggaggccgtgaacctgctggaatatcacgacggcagtctggcccgggcgttggtcgatctggaacggaacggccgcctgaagggggaggggaagaacgcgcccgccgacaacggctttcacggcgtggtggatttccttttgcggctgcatttgaagatcactaagggagacacctgcatcgtctatctgaacacactggtgatgatcgtggcggcgctggccgcgccctatgtggtgctggccggggtgatcctctcgtgggtgcttgggtataaggttcgcctgacccgcagcgcctccgccgattccgtggaagaaatgctgaaaaccgttcgaaagaacgtccgtcagacggtcagccgctttacgcaggagacggagaagcagaccgaatccgccgaaacgggaaaaaaagacgctgcgccgaaagcggaaacgcctcggaatcgtccgcccgccagcggcaccacgccggtgaacgtgcagtttcccgacggcgccaccgtggacgtgcgggaggatcaggacggctaccacgaggcggaaatacggtaataaaggacaggccataggggaaaggggcgctttgattgagcaagatattgatcgtggaggacgaagccaagatcgcacgcttcgtcacactggaactggaacacgagggctacgaggtgcagtgcgcctatgacggccgctccggcctgcagcgctgcctggactggaagcccgatcttttgattctggacctgatgctgccggaactgagcggcatcgaagtctgccgccgtctgcgccagcagagcgacgtgcccatcatcatgctcaccgccaaggacgacgtgagcgacaaggtcatggggctggacatgggcgcggacgactacatgaccaagcccttcgccatcgaggaactgctggcccgcatccgcgtggcgctgaaaaagcaccgggcggacacggcccagagcaccggcgcccgcagcgccggaaagctgcacatggagcccgccagctacagcgcgggctacggcgacgagcctatcaacctgaccaagaaggagttcgatctgctcaattacctgtggcagcacgagaacaccgccatcacacgggacgacctgctgaccaacgtatgggggtacgagtttaccggcgataccaacatcgtggacgtgtacattcgctacctgcgccagaagatcgacgaccgtttcggcatcaagaccatccacaccatccgcgccgtggggtatatgttccgttatgagcaggaataagcgcaagaccgccgttgtgctggacggcgaaaccgtggagaccgaaaattccctgctggggaggctccatacgcggatcgaagaactggaagcccagcaggaggcggaaaaacaggcacgtcaggagcggaaggagcagcggcggcggcaaaagccctcggagcgtttcgtggcggcgctgaatcgggcttcccggaaggtacacagcgccgtgatggggcttttgagcaacctgcggctttcactggtgctgcgggtggcgctgtatgccagcggccagctgctgcggacgaccctgcccatgctgctggcggtgagcgtcgcgttttttgccgcccaggggccgatgctgaatcaggccatcgaccgggtattggcagagcagcctgcccaaacgagcgcttacagcgccgagcagttgacagaccagccgttttcggcagtgtatgtgctgaaaacgccgttggaggatgaactgcggggttggccgggccggatcggcctgttcttttcggaaattcggcagggcccgcgagtgctgctgtatgaaaatacgattctgggcggaacggtctttgtctgggaactgggtgagccgctgcgggtgctgtcggtgctgctgtggacgctgctggccttcgagcttctgcgggtaggctacttcgtccgccatcggaaacggctgaatcagaaggtgctcaagcccatcaccgacatggccgagaccgccgccaccctgagcgccaacaatttgagcgaccgtatcagcgtggagggcaccaagaacgagctgaaggatctggcgctggtcatcaacggaatgctggaccgcatcgaattgagctacaacagccagaagcagttcgtcagcgacgcgtcccatgaactgcgcacgcccatcgccgtcattcagggctatgtaaatatgctgcagcgctggggcaagaccgacccggaggtgctggacgaaggcattgccgccatcgctcaggaaaccgccagcatgaaggaactggtggaacggctgctgtttctggcccggcacgacaaaaagacgctgatgctggaaatggaggatttcgacccgctggagatcatgagcgagcttcaccgggaggcgaaaatgctctcctcggagcatacctttgccctgaaccctgccgacaacgccatgatccacggggacaagggcatgatgaagcagctgatgcgcattttgctggacaacgctattaaatatacgcctgcgggcggcagcatcacgctgggcatgaaaaacgacggcgatacctgcgttttgagtgtgaaggacaccggcgcgggcatcgcgccggaggacttgagcaaaattttcgaccgcttctaccgatgcgacgaagcgcgcaaatcccagcagagcggccatggattgggactgtccatcgcccggatcatcgccgcggcccacggcggcaagatcaacgtgcgcagcaaggtgggcgcgggaaccaccttctcggtgatcgtgcccacgatttcgcaaaccaagtcataaaggaaacccgcctgtccggagaaatggacaggcgggtttttcagtcgaaaaaacggagctggtctcccaagggctgttccccctgcagggtgcgcaggtagcggaacacgtcttccgggcggtgcagaatgccgtgactttcacagaacgaatgaaacagcggcgtaagctcaccgtcggaagggctgagcagctcgtaggcattgccgtaggcgcggaggtagcgttccttcaggccgggaaagtgccggtccagctggacgtagaaatactcccggctgccttcccgcagcgtcatgcccgccccgaaataaacgattccctttacgcccgtttctgcgcagccctgcagaatgcccagcaggttttcgacggtatcattcaaaaagggcagaagagggcacagccacaccaccgtgggcacgcctgcctgctggaactgccgcagcgcctccagccgggcactggtggggcagacgttgggttcgaggatgcggcaaagccggtcgtcccacgtggtcagggtgatctgcaccacggccttggcccggcggttgatcttctgcagcagttccagatctcgaaggatgcggtcggacttggtttggatggctacgccgaagccgtagtcgtagatcagctgcagcgcccggcgggtgtagcccagctccatttccagcggaaggtaactgtccgacatggagccggtgccgatcatgcactttttccgtttgcgccgcagcgcgtcctccaaaagaaccatggcattctgctttacttcaatatcctcaaaggcgtggtcgatgtgatagcagacgctgcgggagtcgcagtagatgcagccatgcgtgcagccccggtacaggttcatgccgttttgggcggaaagcagggttttggcatggacgtagtgcatgggaaactcctttttgcattttactttctgctttttaatggaagcagctgatgatccccgcccaggtggccccgccgaacagcagccgcaggatgatcagcagcgccagatgcaggggatacaggccgtagcccagccacttcggcattttcaggccgctgtccgtgcgggcgaggatcaggggcagggccagccatgccagcgtttgcagatggaaaaacgcggaaaggggctcgcccagcccgggccaacggaggaagctcaggttgaagcccaagaaggtggagaccagctgggtgttggagccccagaacagggcgtaccccagaaaggccgcagccagtccgccccgggattcccgggccagatatagcaggagaatgaaggtcagtccccgccagccgtagtcgatctcacagaagcccagtaccagatagcacagggccgggccccagaactgacttccaaaacggcgcagccggatgctctgaatggcggcgatcgccagcgccagcaggaaaagaatgttcaggtgccgccagctgtggctgagcgccatcatgtaaaggggctgagacagaacggccactagcagaagccgcccgaaataccgcaggggatggcgggttttgacattgcccacgatcaggcaccaggcgtacagcggcagcgcaatccgccccagcacgcgcatttccagcagattgccgaacagcgccacgcccagatggtcgatcagcataaagcagagcgccagcgttttcagcagcgaggtatccagattgcccgccagccgttcgtcccggccgggccgcagttcccattccatggcgtttcctcccgatggctgtgttgtcctgaaaagtatatcatccggctgaaaaaaagaaaagggagaacaaaaggcagggagtcgaaaaactctgagttggccgtcgatgcccgcaaacagcgctttgcggcccgccccgcatgtctgcggccaaaccctgcgctacgcttgtgtttggctacgcgcttcatggctttcagccatttctggcgctagtcggccttcgcctcccttggtggcgggcttcggactgcggtagcccttcgggctgtcctcgtcctcggtgctgcgcacccttaagctggtttgcgggaaaagtgccgcggcacaaggcttaggggctccgttccgcaacctcaatcgtcgtctttggcactgccgtgccaaatcctcgtttcggttgacggctgtcagtcgctagctgccttcggcagctgcatccactggatgcgcgctccttttcgccgccctataaccccggcaggcaccggagggaaggtgcaaggcgggttgccctttgggcaacccggtctgcctttggcagactgaacttttcaaatagaatttgaaaa

SEQ ID NO: 3006 - DNA, 4537 bp, Unknown
  16S sequences of unknown bacteria
cctttatcccctctaaaatgggattccaaatttagtaaaccaagcaaatatctttctggaatataaaagcacaacgcagccggataaatcctgaaaaacaggtttatccggctgtgctttttgcgaaatctatgttcctgaggacaatgcctgtttcacgggtctggagggagggcgttccaggctgaaagcggcaggggcgcaaaggcggagactggggcctttggagaaggggtgcgcaggcagaatccttataggatccatctggatgcagccagcggccgtaattttttatggcggccattggcggtgaattgcttatgatcagaccggagaaggagaatgccgacggtggagttccgttttgcaattgataacgcaaagcccccgcttgcggcggaggctttgagctgcttcgggaaaaatgtttcgttttgaaaagagcgccggtgtttaaatttgatcggcaccggtttgttcatcttgcagcatctggcggtaaagcgcttcggcgccgtcaataaattgctgccattcgctcggatcaataaacggattgggaccggacggatcggcaatcatgcgctggtatttttcctgcatattggcctgctgtgtatggttgcccagcacaatatccaccggttcatgacgcactttttccaggctggcaatgtgataattccgcaggtattccgtgtgatatcgtgcaatggattcccggcagagcgtattgacaccgatgccgccgtacagaccggccagatgggtttcctcgccttcctgcaattcaatgaaataggcaaatacgcccatggtgtgtcccggggcagagacacaccggatccgggtctcgccaagctgtacaatgtctccgtcctgcagttctacatcgggtttaaatggttccagataggtatagcgagtatcacagatcaaggccaattccgggcgctcccggaacatgcgggcatcctccgctcccaaaaatgttttggctccggacagggaaacaatcagatcggtagcgccgaaatgatcgaaatgaccgtgggtatggagaatgtagcggatgttgcggggatcaaatccggcttcccagatagactggatcaacagagcacgagtagtgggataggtagtgtcaatgagaatcaaaccttcagatgtgttgagcagatacgcgcccacgtcctggttgccaacaaaatagagatttccaaaaatacgaaaaggcgtcatgtagtatttgtgaggatatttataaaaatcctcatacttttccacgcgaaaggcgtatttggaagccataaaatgcactccttttcaagtcaagtcagaaacaggttgggaatgaaggagatcaccgatgggaaaaacgcacagaagaccaacacgccgacgatagtaaacaggaacggtaaaaccgctgtggcgattttccccacagggatattgccaacaccgcttacaacaaacagcagtccgccaacaggaggggtcagatttcctaccacggagatggtgcacaaaattacgccgaaagcaatgggatcatagccaatggattggatgaccggcaaaagcaggggggtaagaatgggcacaatggtagcgtctgtcaggaaacagcccaggaagaggacgaaggcgatgatgatcatcatcagcagggcagggttttcggtaattcccagcaaaaatttggtcatggtttgggggacctgatttttggtgagaatccagccgagggttgcaccggttcccattaacagcaaaacgtttgcgctggattttgctgcacggaccagcacgccctccagatctttcagcttcagctcccgtgtggcaagacccaaaccaaaggaatacgccacggcaattgcaccggcttctgttgcagtaaagagaccggtcatgattcctgcaatgatgacgattgggagcagcaatgcgggtaaagagtggagaaatgcggaaagaatttcatgcaggggcgccattttcgtgtacttggctttgtagcctctctttacagaaatcacataggccacgaccatcaaaagggcaccaataattacgcccggcaccaggccgcccataaacagtttggctacggagtcgccgctgatcgatgcataaatgaccatgatgatgctgggcggaataaccggtccgagcacagcggcgctggcaataacggcaccgctgaaatcgtcttcatagccgtcatcgtgcagggcgggcagcatcatggatcccacggatgctgccgctgccgtacaggaaccgcacattccggcaaagatcatacaggccagaatgctgatatgagcaagtccgccgcggatatggcctaccagctttgtgcagaaattgagaatgctgcgggtgattccgccgctgttcatcaactcaccggccatcataaaaagcggaatggccaacagagagaaagagtctgctgtgacaaaaattttctgcgggatgagcgtcagcggtacatcaccggaggccagaatgtaggatacagaagaaagcccgatggcggcaaaaatcggcaaaccactgagcagcaggccgatgaacaggataaacatgataagcagtgcggtcattctgctccctccttccccagtttgcgcagaatatcgtggtaaatgttgcgcagagaatagagaatgatcaagaaaccagatgcaggcataatcatgtacaaaatggacttgggaatatgcagagaggaagagcgctgatatgcgttctgcatggcatactgtgcaccataaatcaaaagtacggcagcatacgcgatcagcagcagccgcagaaccaaatcatagtagaaacgggcccgctgcggaatgtgactttgaatcaaatccatgcagataaaggaattatctcttgtcaaggccacggctgccaggaataccacatatacaaacaggtagcggcttgcttcgccagaccacatgatggagctgttgaaaatggaccgtgccacaatctgggcaaagcagacaaccgctacgccgagaattcccaaggccaataaaaaattcaccagcccatccagcactttccaaaattgtttcatgccgaatgactcctttcttttaagcggcgggagagcagcgtgtgctctcccgcctgggtggtgtgtgaagcgcgtattattccatggaacggatgctgtccagcaggctgctgtccagaacatctccatagagatcggataccacagaattcatggcatccaccatttcggcacgggcctcatctgtcagttcaatgaactccacgccgctttcggcaatgtctgccacgtagccgtcattgagttcttccagattctgacgatcctgtgcagaagcaatctccacattttccaaaatagcggtgcgctgttcatcggtcagggactgccacacagattcattcaccagcagcatcatggcaccgccgatgtggttggtcatggtgcagtaatcgacctgctcataggtggaggcaccgtagacggagccaatgggaagctccattccctctaccaggcccgtctgcaggccggtgtacagatcacccaccgggagaacctgcgcactgcagcccagggcagtaaacatattaatatagagagtcacttcgggaacacgcagtttcaaaccggaaaagtccgccaaggaacggacggctttgcctttggtccacacctgccggaagccctcgttgaaaagaccgatcacacgcatgccagtgcggttgaggaactcgtcattgatggcttggctggcctcactctggaagaattcataggtgtgttcggcatcccggaacaggaaggggatgctgtaaagcgcatactgatcataaaagtcttccaaagcgcctgcggagatgatacacatatccactgttcccatggaaacaccttccaggaagtccacttgaccgcccaaggtactgtcggggaaaacctgaatatcaatggctccgccggtggcttccttaacggctgcactcatctcattggaaacctgaataatggaagtggtggatcccaaggtgctggcaagcgtcaatgtgcgggagtcagcggtggattcttcagcggcagaggcatcgctgccgccatcggaggcaccggaatctgcagattcgccggaagatccgcagccggacagcaggctcaccatcaggcatccgctaagcagcatggcaaggaacttctttttcttcataacgagaactcctctcttccccataggtggttgttgttaaaaacaacatgtttttcggggtgggtccatcatatatcgtgcatattgtacatttcaacgcaaagtttttgagactgtgaacaacggtctgacatttcgagaaaatcaaaaaaaatatgaccatgctaaaaaaatgttaaatttggcgaaataatgcgcctcaaagcaaaatgtgctgcgaaaatccaaaattcaaaacagaaaaagtgcacgggaatcaagaccgcctgcacgcgcgtctggaggggaaattt

SEQ ID NO: 3007 - DNA, 6239 bp, Unknown
  16S sequences of unknown bacteria
ccgcactgaaggaatacagcgaattgaaggaacaggcttcagaatttgacgccggtgagctgatggaggcgcggctttccatccgtgaggaaaaagaacgctctgcggttactcgtgtgcaggacgcctacggcgagagatacgattcgctgatgatgtttgacagcaagcgggatgtcgcaaatttgctccatgaggaagcggaaacacgctccgtccgggagcgtctgcggaagaaacagcaggcacagacgcaacggcaaagaaagcccaaacaccatgaacaggaacggtaaatgccgttcctgttctgctaagcatcgtatcaaaatttgtgtttgttcggaaaggaagggtaaaggtaatcgttgatgctctgctcaatctctgtataaatggatttgaatttgatagtcacaataaagtgggaataagagcgcaggtgacaaaggcgttgcagaacactcaattgagtgttctgcaacgccttgttaatatttccttatgccgattttcatacacaaaaaattttccgacagtcggcgcggttttgttccgccgctgattatacaaaccgctttatgtgtgtgctgccaaaggctatctctgcttcttccgcatctgatttatggacagcattcccagcaccccgccggacacgaacaacagcgcaatccacagcatcagattgctgctatcgccggtttccggggaaccggaatcgctatctgccatagcggggatctttaccgaagctttttcgtagccgcagatctggcattcttcatgcttttcgcctgcaacgcctaccccggcctctttggtgacaacccagacaaatgtatgctccgcctcgtccgttctgtcgccgcaggaagtgcaagcatgccagtggcctgattcatcagttgtccatgtatcgccgtaaacatgctcgaccgtcaccgtataggtcgtggagttgcccgccttatccgtgacaacaactatgcactgcccatcatcaccggcagcaaaggtgtacttgccgtccacagcagcctgggcctcgccgttgattgtaacggacgctatgttggcttccgaaatgataaaggtctggtccgggcaataggtttcaccgtctttgatgccttcgatgaccggcgcagtctcgtctaccgccatgctgacgtcactgcctttatccactaaaaccgccgcgttttcgccgacaacttccagcgcctgcagggatattgacgtcgctttttccggcgcatcctctttcaccttgaatttcagagtgacaaaattgcctttggcggaggtgacgccgatctcgtccagcgtggcaagcagcttatacggcgcggccgacaggtcgttctgcgctgtaaactgcgcttcggtgaagatgtcgccgtaggtatagcccaaaagttccacaacatcggtgtcgtaaccgactgctgtcagaattccccagacatctgccaccttgtcaaggctgagagccacctcaaattccttgccgcggttgaggaccacttcttccggcgacagggtcatggacgggctatctgaggtgctgccgtctgtcagtgcagctgccccggtgtcgagttccgccgatgcagaaagagtcataacatccttcgtcactttttcggtgaggaaggcgggggagacgctgtaaaacaccggatttgccatcatgcttgccgcagcgttgcggggaggtctcgcggtactgtttccggtattatcgttaacctccatatattgttctgaggacctgcctgccaggtaatttgtaccttctgtaatgctgtatacaaggtaaaatccgccgggttggcctctgtgttcctttggtatggtaaaactatcggacacaccgaaggaaccaacaaatgtcctgcccgggtcaaggtattttccccgataaagagtgaatgtaatctccccgtcgcttggagtactccactgcggagaaactacccagtttgtaacgtagaacaggctattccgaagctgtggatcagccttattgatcaccattccggcaggcagataaacctcattctgctggtagtcattatgaggatttgtcagcttcagcttgaccccataggctccggcatttacaggtgtatcagtcgtccactctgcatcggctgtttccgcaagataagtaactgtaaaatcctcagaggttaaagcgccatccggtgcttcgaccgtaaactcaaacgcctgtccatttccgttgtatgtataagaggtattcgtcctgatccaatcggcgctcacttcttttttcaattcccaatgggcataaagggttacatcttctcctgcttcaaatatggtatccgccgtgacctgttcaccgcccgtcggctgcgtgaaccagccaataaatttcctatcaagatgggataataccggaagttcgccgtatttctgatcatattcaacggttttcgcttgcggtgaggaaatactgttttcctgggtgtcaaagcttaccgtatagctatttgcaatccaatttgctttaaaggtacaatttttctcggctcgcacgctaaagttccaattaggtttagaccaaccgccgtcttcataataacatctccaataatcaaaagtgtagcctttctttaccggatcagtcggcttatatatacgcgccccctccggataatattgttccttgatcgcattgccgccatcggtatcaaaagttattttatatattggtttcgggttttccgttatccggcaattgaccctgtagacaacagatgtctcggaaggcgccagctccggtgaaatttcaatttcaacacctgtatcttccccaacaacagcttcaatatagtcccaaattccctcaaagtaaggggttgtgcctttttggaattttatttccttaacaacgggctcacccaacccgatgaactcaaatgtggctataagcgtatcgtctgtataattggcatagagcacggcattgtcgccgtatttttccacaaaagccatatccaccgtcatggaggtgaccggctcaccgtcgatctctttgtccgtcagtccgcggaaggtgctgaacttcatgattgtcgggaaatttgcgccggtggttttaagactactgaaatcaaagctttccccgtattctgcggtaaacgtgcggtcgctttctattccgccggtattttgcacattctttaccgtgacggtatatttcttcggcgcaatatcaaaataccaggttttatcattttgcaggctctgaccggtagattcacttgtgtagccgctgatttcaccgtacttaagattggtcccgtccgctatgttgtagtcgtcgtaatcgatgagctccagaatttcctcctgagtcggcagatcgaatacgtccattctgccatagcgttcactccaaaccttggtatagccagcttcttcgtttcctaccgcaacgctggcggtaaacttttcattcatctcagactggctcatattggtccataccacagggatagtgatgtcggtgtcgtatttactgaaggtcagcttgtcgtttttccagacaatacgggcctcagccgccatgtaccggacaccctccggcacctccacgatcacattgccgccgatgcaggaaaatctttcgtcgttgaaaacaatgatgaaattatccttatcgtaggctgcctgggacttttcgccggtcaccagatcgatccgcttcattgtacggtagatttccggcagggacatggagatgccgttggtgctgttggcgtcgtcatcccagacgtacataatatcttcatcgtccggctccagcgcaaagtcgtatacactctgccttacgcccgccgtcagcagcgggaattcccggtcatagagcgtcggctcgtacttgatgagatttaagaacacctgcgccttgaacttcaccgtcacatacagcccgaagtcaacgtaaagcgcgcccaacatctcttctatctcctgagaaaggctggtgttggccggtctcaggtcttcaaaataatagatgaaatacccatacagttttacatatgcgccgaattccacatttgcgccgacgctggcaagatcggtgctgagtatgccgaaggcaatctccgccttgaccccggctttaacgccgagagttcccatcacataaaactggaaggcaaaccgctcgtcaattaaatccatttcgctggagcctgaggttttcccaagaatatgaatccagaagctgtaccgcttgccaacctgatactccatatccgcgcccagctggatattgacgttggccttgacaataaaattcaggtttaccttgacagcggcaatggcgatccaataggtctgcttgatcagaggctggtttataagctctacccagtcggtctcctgttccagcattcccttgtatttgtccatgagctgttccatgccggttttggcttccgccttgtcctgagcgttccatacgtcgtcgaaggcggcgctgatgtcctccgcctgaagagcttcctcaatctgcgcaacggagtattcctcaccgtccacgcggatagcaggcagctgctcctgatagtacttgatctcattgaggacctcgtcgacagactcgccgcgggatacaagcttgttcctctttgcgcccagcttgttaatctgccggatcgcattcaggaccttcgggtttgtgtgcgtggtatctgaaagagccttccattttttgaggttgtcctcgctgaccgtgtataccttggctcccacggacatataggtataattctgaatatcgatggctcccgtcacagttacttcgtccaaaaccgggatgaaagcataccaggtccatctgtcgtcgatatccagatcaaagtcaagggcgacctcctgctcaaagccggcagtcagctcgatctttagagaatttgtttttcccgcaagcttttggtcaaaggacaatactatgctgacgtccagtgcaacgccaacaccgtcctcaaaatgagtatctttgaggatcgaagcatgtacaaccggtttctccgccgtaaacttgacgcgcccgcccacgccgacagcacgtgcagccattggggacaccgcggcactcagctggctaatctcctcccgggtgatcccagcatcaagcagcttttcctgtagctcgcctgtctgcagggcattttgcaccatgcggtcggcagcctcttcggcaaagccgctgttcaccgcctgctgttccacctgctctaaaaacgcctcctcgtccaggttttccagaatctcgctgctgtccacccgctgggagacaaacaggcccatataatcctcaatatcctttttcgtgacaatctcataggatatagtgtcgccttccactttggtgatctgtccgtatacagcctgtgtatcctcagtccattcggtaaaatcaacggtgtagaaggtaaggaagtcgtccacttcaaaatccggagtattagttattcccatcatggccagggcataggcatcgtagctgtctgcattgatcgtgccgtccccggtgggcagtgcttctaccttgaacggaaaggaatccggcatggccagaacgtcttttgtatcttcctcatccaggctttcaaattgataggtcttaccctcaatgccggtgattttgataaacgccatggcgtcgttttcatagtcgtcttgcgtgtagtcacggtctctgggatctgtattttggtaaatgcagacgatgtccccctgttccaaagcctgctgggacatggaaaagcttccttcaatggcgtccatgccctcttcattgctcagaagagcagactgaagcacgtcaaccgtctctccgtcgatggtgtacctcatctcttctgtatcttttataaagatcatgtcagggttgtattgcaggttgtccctctcagccttttcgatgataaaatacgccgtgcggaacatggcgtccttatccgcgaaggtcaggctggcatcattcaatgtcagttcataggaagcgccctcgtgaaagccctccggtgcaaagaccgtaaagataccgtctccgttttctttcacatcgactgccacaggctcagaaccgtccttcggcaggacggtgatgcctgccctgacatcctctatactcgaaagaccggttacggcaaaggaaacatccggtttctggttgtccagactaa

SEQ ID NO: 3008 - DNA, 5654 bp, Unknown
  16S sequences of unknown bacteria
ttatgatttatcttatttccttgggaatggatgccaaaatgtcattcaaaatcatggaggctgtgcgcaagggaaaagtgaaaaagggcggtttccaggaaggctgggtggaagctatgcaggagcataatgtacctgcttggtatatcgagtccctggccaagattggctatctgttcccgaaagcccatgctgtggcttatgtgatgatggcattccgcattgcttggttcaaggtacataaacctctggcattttatgcggcctttttctcgattcgtgccaaagccttcgatgccgaatactgctgtgccggccaggaagcggtcaagcagaaaatgctggagatcatgaacaacaaagaagccaccgcggtggaacagagccttgccactacgctggaggtgtgctatgaattctatctgcgcggctatcatttcgatccgattaatatttatgagtcggatgccacgcattttgtcatcagtgaaaacggtttgattccgccctttgtagcggtcagcggtttgggcgaatccgcggcactggccacggtggagcagcgcgcaggcaagcatttcatttcggtggaggaattctctttgtgctgcaacaagctctcaaaaacccacattgataccctgcgcgctttaggcagttttgccggaatgccggataccagccagatttccctgtttggctgatgtgtaatcgaatgccgagaaggggaactgagcgcttgacaggagaggatttattatgctaatatattagcgaattaaagcacaggggcttccgctgtgaaaaggagacgttttccatggctatgatgaatacgcccgaaggcacccgggatttgctttacggtgagtgccagctgtaccgaactgtacggcaggagttgaccgccgtgtttcagcgctgcggctatagtgaaattgctacgcctgtggtggagtactataatgtgttttccaaggctggccgctctgtgccggaggagggaacgctgaaaatgatcgatcgcagcggtcgtattctggtgctgcggccagactgcacactgcccattgcccgggtgacggcaacgcatttgcagcatgagccgctgccccagcgtctgtattacgatgaaaccattttccgcgccgctacggtcaacgccggacatatgagcgaagtggaccagtgcggcgttgagctgattggcgctgacgggacgcgggcagatgccgaggcggttgccgtggcgctggaagcgctgcaaagctgtcagttgcagaactaccgtattgaattggggcatgccgcctttttccgggcgctggctggagagttgggggcggatgaaatacaggtggaagagatccgtgcgctgattgagcaaaagagttttgctgcgttggacgatctcctgcgggagcaatattccgataaaccgtcttatcaggcgctgcgccgcctgtcccgcttgtttggcggggcggaggtacttgccgaagcccgcagcctgacggacaaccccgcggccctgcaggcgctggatgagctttctgctatctatgatgccctgtgcgccgctggatggggagcctatgtggggttcgacctggggctggtgcatcagcttgattattatactgggatggtcttctgcggttatgtggagggaagcggccatgtggtggtcaccggcgggcggtacgatgcgctgatgggcaagtttggccgcagcgcaccggctacggggtttgctgtggatgtggctggtgtggccggcgcgctgcccgtgcaggaagtgaaaacagcgcacaaactggtgcattatgaggccggatgtcttggggcggccatgaagctgcaatgcgctgccggggcgggagagattgagctttcctgctgcgaaaacgaggaagagagccgccgtttggcgcatcaaaaagggattcccacactggttgtgcttaccgcttccggcgtgcgggaagaatccgtctgaaaggggaaggattatgcatcgtttgcagattgccctgacaaaagggcggctccaggacaaatcggtagagctgtttgaaaagagcggtattgactgcacgccgatccgtgagccgggtcgccggctgattcacccgctgcccgactatcccatggatgcgttcctcgctaaagcacctgatgtgatcacttatgtggaacatggcgtatgtgatttgggcattgtgggcaaggataccatcctggaaaaggggcactccttctatgaagtgttggatctgggattcggacggtgtaaatttgctttggctgccccgaaagggacagacctttacagtggctaccatacaagaatgattgccagtaaataccccaatgtgacccgggcatttttcgataagaaaggcatggatgtcaatattatcaaaatcgagggatctgtggaactggctcccatcgtgggccttgccgacgctattgtggatattgtggaaaccggtgcgacgctgaaagccaacgggctggaagtgatcgaggatgtggcgcccatcagtgctcgcttgatcgtcaacactgccagcatgaagctatatcaaaaagagatcaacgaatttctggaacgattggaaaaggagctggaacgccatgcttaaaattattcaggccgacggcgaagccgagcgcagacaaattgccgacatgcgggcacgggcagccgagaccggcgagggcatcaacgccaccgctgcagcggtgctcaaagatgtgcgggagagcggttataaagctgtggagcgttactccatgcaattcgacaaagctgcgccgagggagattacaaaagaggaagtggaagcggcctatgctgcctgccctcaagagctgatcgaagctatggaaacagcggcggaaaatattcgggactacaatgaaaagctgcttccgagaaccatggaatggcacaatcccgccggtggcacggtggggcgtatcgtgcggggcctgacgcgggtgggcatctatgtgcccggcggcacggcggcctatccatcctcggtactgatgaacgcagtgcctgctaaagtggccggcgtacaggagattgtgatggttacgccgcccacggaaaacctgaatcaggcggtgttggcagcagcaaaaattgccggggtggatcgggtgatcggcgtgggcggtatccaggctgttgctgcgctgacttatggtgcgggttttattccaaaggtagataaaatctgcggaccgggcaatgcttatgtggctgccgcaaaacggctggtgtatggtacgattgatatcgacatggtggctggtccctctgaagtgttggtgattgcggatgaatcggccaatccaaaatacattgccgccgacctgcttagccaggcggaacacgatgtgctggcttctgcagtgctgctgaccaccagtgaaacgctggcacggaaggtcgatgaagagatccttcgccagagcgcgtatcttagccgccgggcgatcatcgagcagtcgctgacggatttcggcgcagctattgtctgtcccgatttgagcgcctgtgccgcgttggccaacgaaattgcgccggaacatctggaaatctgtaccaaagagccgagggcgctgctgccgctgattttgaacgcaggagcggtatttctgggagaaaacgcgccggagcctttgggggattacctggcagggccgaaccacgttctgcctacatccggtacggctcggtttttttctcctttgtcggtggacagtttcctcaaaaccatgagtgtgctggaatattccagagaaaatctgcagcagcagtggaaacagatcgcagcatttgccaatgcggaatcgctgactgcccacgcaaattccattgaagtgcgttttgaagatgaaacggactgagggaaaagggggagaatattatggatcgggctgcaaaagttgagcgaaaaacaaaagaaacggatatattggtggagctgcaactggatggcggcgaaatcgcgctggataccggaatcggctttttcgatcatatgctccatgcctttgccttttatggcggccttggcctgacggtacaggccaagggcgatttgcaggtggacggtcaccacacggtggaggatgtgggcattgtgctcggtgaggcgctgcgaggcgcgtttggtgaaaaaacagggatccgccgctttgccagcgcttatgttcccatggatgaagcgctgctctttgcggcgctggatgtgtccggccgcccctatctggtctttgatgcgccgatgccccaggagcgctgcggagaatacgatacctgcctgacggtggagtttatgcgtgcgtttgccatgcatgcagcgctgacgctgcatatgaaagccttttatggcgccaatgctcaccacatcactgaggggttgttcaaggcgttggggctggcgctcaaggacgcaaagcgtgtggaaggcggagctgtcacctccacaaagggagtgctgtgatgggatacactgcgattgtggattacaatgtgggcaatctatccagcatctgccacgcgctggaatacatcggcgcgccaacgcggattacggcggaggaagcggtgctcgagggggctgacggcattgtcctgcccggtgtgggcgcgtttcccgatgcctggtcagagctgcagcagcgcgggctgcccgcggttttgcgccgtcaggcggaacataagcccatcctcggtatttgtctcggtatgcagctgctgatgaccagcagtaccgaggtgcgcccctgtcgggggcttcatctcgtgcctggtacggtagataagatcaaaacgaacttgaagctgccccatatcggttggaacactctgcacttcaaaacgcccacgccgctttttgccggagtggatgagggggcgtatgtctattttgtccatacctattgcgctatggtggaactggaacgcgatgtgtatgcggtgacggactacggcggccctgttagcgcagcggtaggccgcggcaatgtatacggcacccagttccatcccgaaaaaagcggcgatgtgggattggaaatcctaaagaattttgtgaggctccagggatgattattgaaccggccatcgacttgaaaaaccggcagtgcgtccgtttacagaaaggtaattttgacaccgtgcaccaggtggccgctgatccggtgaccacagcgctggcgttccgtgctgccggagcgcagtggattcatatggtggatctggatggcgcccgcagcggcgtgcgcgtcaatgcgcccatcgtggctgcagtggcccgggagagtggcttgaagattgaattgggcggcgggctgcgcactatggaagatctgcgtgccgctgccgacagcggcgtacagcgcttgtgcattggctctgcggcggtgtctgacccgtcttttgtggctgcagctgtgcgggagtatgggacacgcattgccgtgggtatcgacgcgctggaaggtactgtccgcgtgtccggctgggagcaggactcacggtgcgactgcctggattttgcgcggcaaatggaggatctgggtgtggaaacgcctgtctcttatacacatctccgagcccacgagac

SEQ ID NO: 3009 - DNA, 32759 bp, Unknown
  16S sequences of unknown bacteria
cgtttttttcataaattatccagaatgtattccatctgcctctcttttgttttcattcccattttttcatagaatttttctgcggaagtatttcctgaccatacatttaatgtcacttcatagcagttcatttttctggcttcttcttttacatgctcaaacaaactttcgccgatatgctgacctcgtgcctgctggtcaacgcaaagatcatctataaaaagcgttttaaactgcaccatattatttgaaaaaggctgtttctgcaattgacaaaaggcatatcccacacaaacgtcagcctcgttcacagcaacatatattggtttttctttattttttaaaagctctgttaattcttctactgtatattttgttgtattgggaataaaaatatctggtcttatctccgcatggatttgcagcacctgccccagtaactcaataattcttgtaatatctttttcttcagcttttctgatagtcatgtttcgcacctccggttaataaatctgttcttttcattagatcattgaaactgcatttgtaaataaaatgcaccttcaagctattttattatagcctgaaggtgtgtttttttaatcaaattctctggtaatgtttgtgagccatttacctctgatatagtggatgaagaccacgggcattttttcgaactcatccagagtcattacaaagtatacccagataggtggcagttttaagacatatgctgcaaggaaagtgagtggaactgcaacaagccacataaatatggaatctatgatcattccaaatctggaatcaccaccacctctgaagcagccgcatataagacaggtattgatgccttctcccacaaggcgccaggttgtcataattataaaaatgccaagataataaatggccgtctctgtcagtttatcccgatagaaatccagtatcagaggacgaagtgccagaataatgacgcatccgaccagacttacaaccattgttattctgagcatgcgctttccatattctcttgctgcatcaatgttgtctttacccagttcctgactgacaatgatagtagtcgcattggcaaaaccacgacaggcgattgcaccaatatttaccaccataacagcaaccgcatttgcggcaaccatatcatcaccaatatggccgaggattgctgcgaatgctgagctggcaaaactccagacaacatcatttattacagccggggtagcaattttcataaagtcctggaacagaatacctgatttcgcaaagaagtattttatacggaatctgacatcggaacttcttaatgagtagatgaggcagatcagtacttctgtgattctggcaatgacagtaccaagagccacaccgataacgccaagccttggaagtccaaacagaccaaagataaaggcggcattacaaattacattgacacaaagcgaaacaatgtacgtgacagaaggcagcattatttttccgatacttcgaagggcactcataaaaacctgagagaatcccataaacgtaaatgaaaatgaaattacccttaagtattcactgccggcagcaatcgtatccggactgcttgtgaagatcttcatgatcgtagttggcatagaaaaggaaatcgcgaaaaacacgagggaaacgatcagggagattcgttccgccaggccaagaattctttctactgtctttttatcaccttttccccagtactgggcacataaaactgaagtacccgtggccataccataatataaacagaaaagaataaaagtatactggttcgcaagggatgaagccgacatggcagtctggcttacatatccaagcattaccgtatcggcaatgtttaccagagttccgatcagattttggatcatgatcggaaaggctagttttgaagcatattttaagaaatcttttttatttagcatagatggtttttccttagttcttagtgttcacaaccaattgtatcatactcatgcaatataaagatatactttttagaatttttttgattccacttgatgtcacaccactttacaactttttcataaaaaatatcgtacagggctttctgatgtataatgagtttgcatacaacattacaaaggaaagtgaccctgtacaacaaaggcattatacaacgaaaagacactaatcggtagactttatcaatattttttgatttattttgaaactttttctgttccaacagcagataccttatttctgctgatattatccatgcttaccttagaatctgcacattctatccggtttctgtatcagcatttttatccggaataacggagaaatcactgaatgtattttattatgcatgttcccatgcaaaggttgattattccagatgaataccactgtcaggattgctttgaagctgataccggattcattgcagacgcggccggaataaaaggatacaataaatagaaaggacttaaacaaaggggataaagccatggctgagagaaaaccatataccacaaaaacaagacagattattctggaatatctgaaaagacaacaggctgttactgtcagtgtatctgacatcgaaaaatatttaaaagatgagggaagattccgtctgcagtgcagcggagatatgcttcatggaatctgccaggactgtgaagagaaagaaacttcttcgcaatcctgacagtctcgtgtatctccctgtcagtcatacgctccgacaaatactccggtgtcagaatttttgtaaatatcactcccaacttgcctgtataatcgtgcatcttgttgtaataactgctagtttacagctggttcattacattctggaaattttcctgctccagatttctgaatagcagaaatgctttttcaatctaagattttggagtaatcaggtacaacaaaagcgtcctgcgatgtagagagtaaaatagccattttcggaattcacttccaaaccaaaaagcacagcttttcgtccggttttgtgaatcgctgcgctcttttatcggtgatttatcctgtttttcacgaattcgtctgttttctcacgaattcgtctgttttcaatcttgcgttttcatcacacattgcatatactatatgtacaaacaagccggatatactcaggaagcttctgggtagaaaatcccggcatacatacagaacaaaaggagtattttcaaatgatttgcattaagaacggaactcttcacacagcgataacaaaggatgtctttgtcgctgatcttctgattgatcatgggaagattgtaaaaatcggtcaaaacatctctgctgaaaatgcggaggtgattgatgcgtccggcctccacgtgtatcctggctttatagacgcacactgccacatcggccttgatggctatggaatcggctatgagggacaggactacaatgagctgaacgatcctgtcactccacaggtacaggccatcgatggcatcaaccccttcgatccgtgtatgaagatggcggcaaaggccggtgttacctgctttgcaactggtcctggcagctccaatgcgattggtggaacctttgcggccatcaaaccgatcggcaaccgtgtcgataacatgatcgtaaaattcccgattgccatgaaatgcgcgttcggcgaaaacccgaagcgctgctaccagaatcagggcatctccagccgtatgacaaatgcttctatgatccgcggcgcgttaagccatgcaaagctctataaggcaaaaaaagaagcagccggtgatgatatctccaaactcccgtcttacgatcagaaggcagaggctctgatcccggtattaaaccatgagatccctttaaaagcgcatgcgcaccaggcaaacgatatctgcactgcaatccgcattgcaaaggaatttgggattgatctgacactggagcatgtaacagagggacatctgattgtggacgagcttgcaaaagaaaaccttccgcttgctgtcggtccgaccctcggacatgcaacaaaatttgagcttcaaaataagacctgggaaactcccggaatccttgccaacgccggatgtcatgtctccatcatcaccgacgcaccggtaattccactccactacctccctctctgcgcaggctttgcaatcaaagccggaatggatgaatacgatgcgctccgtgccatcaccatccacccagctgaacacatcggcatcgcagaccgtgtcggttccctggaagaaggaaaagacgccgatatcgtcattgcagacggcagtccttttgaactgaccggtgtaatccgacatgtactgatcgatggaaaagaagtcaagtaaaaagacgcccctgtaatggggcgtctcatctgaaaatttattcttcggaaaactgatctttacccactgcacacagcggacattcaaaatcttccggaacatcctcccattttgtaccaggtgcaattccaccttccggatatcccttttcctcatcatattcccatccacagacgtcacatacgtatttcatcgtttatcctccttctcttgtgccctgcattccgggcaaattcccttgaaaaaaatatcgtacgtcaaaaactccattccatgtgtatcatgtattttcttttgcagatccggtatttcgtccatatcaacatcaaatacctctccacatttcacacatctgacatgataatgatttttcaatgtaaaatcaaaacgatcggatccgtccggaacttctaccttccttattgccccctcttctgtcagaatagcaagattgcggtataccgtccctttccctatagacggatgatctttttttacaaattcatacacctcatcagctgtcagatggcgttttaattcacatactgccctcagaataagagctttctgaatcgtatttcttctttccatttgttcaccttattagtaatgtttcttaacaaggattatattctattattatatgtttgtcaatcagaatctgaaattttagccattccgaatattttcactttctctttcacagcagccggaacacctgctccaccgctgcttccatatttttctctgccttctctgtctccattgcctcatccagcgtcgtcactccacgtacaattgggaaaaacgcatcaattccagctctgttgcattctccggcgtcatctccgatgcttccggcaaaagcaacggtctttacgccgtatttttttgcaagtcgtgctactccgatcggcgcttttcccatcacagactgcgcatccagctttccctcgccggtcactgcaatatctgcatcctgaagctccttttctaatccgttcacactcaaaacaagagaaactcccggtatcaactcgcctccaagaaaagtcagaaatgcaaaaccaagtcctcccgcagcccctgcacctgcctggttcatcgcatcacaatgaaaatgctgttccacaacctccgcataatgatgcatcgcctcatcaagcggctgtttttgctcctccacgacacctttttgcggtccaaagatatacgtggctccatttacaccgcaaagtggatttgtcacatcgcaggcaatctgaaaatgagcctgctccagtaatgggttccgtttatctccaccgattttcattacttttccaagtgcctgtgcaccttcaccgacatcctgccctttttcatccaaaaacgaatagccaagtgccttcagcattccaattccgccatcgttcgtggcacttcctccgattccaattataaaattccggcatcctcttttaagcgcgtctgcgatcatttctcccaccccgcgcgtagatgcacgaagcggatttctttcctttgccagcgtaatcccggctgcggatgccatttccatgacagccgttttctgcttcgaaagccatccataataacacgctacaaagtccccataaggtcctgttgctgtcagactgatcttttctcctcccagtccttcgattagcgcatccgtcgttccctcaccgccatcagcgaccgggcagaccacgacctccgcatttggacatgcggaaagaattcctcgttttactgcatttccggcctgcatggaggtcatacttcctttaaatgaatctactgcaactactgctttcattttttcacgtctccccactaacagcgtctctttttctttacaaagtaattcagaattcctccccctacaatgatcaccattgcaactgccacgactcgtttggctgcttcttgtggaagctggctcttggatccgatggaatctgagtaaaaaatcagcgtataattgatttcatgaggagttcccattgccagcgtatctgcgatcaccggcattccctcatccatgatctgtaccggaatttcgaaaacggaattcatgccctcttcatttgtcggaaagtactgttcgtcatccacaatcatataatcataattggaactgctccactgaatctgtgcataagcctgtccgtctttcacagtcagaatcgtaggagacgttaccatggctttcccgcttccgccttccagatccacttgaatcgaatattccccatctgctttgtcgatctgcatccctgctgcctggctaacacagttccatgtacttatactgatcactgcagctgcgatcagacctggccattttcttttcatatcgttactttatttctcccgtattcatatattatttggtaacagtccgatgcggatcgtttttccgaagccgttctgaactattgccgtaaatttcactataacacagcaaatcctccattgtaaatataaaacatttttagtataattgataagatgtggctgtaactactattttacagtttcataaattcaatcatttttgtaacggttcagcatcaggtattttactgcttattctgaacagttaccatttttttaatcaggaggttttatcgatgaaaggaactttatatggagtgggcgtcggacctggagatccggaattaatgacagtgaaggcaattcgaatgattcgcgaaaatagcatcattgccgtaccgggtgccgaggtcaaagaaacagttgcgtataaaatcgcagttcaggcggttccggagcttgcggacaaagaactgcttccgatctacatgcctatgacccacgatccaaaagaactggaagaaaatcatgccaaaggagcaaaagcacttgaagcctgtcttgatgccggcaaaaatgtagtattcctgacgctcggtgatccttgcgtgtattctacgttctcttatctgcagcatcgcgtagaggcagacggttatcacactgagctggtcagcggaatcacttccttctgtgctgcggctgcccggctgaatatttctctttctgagtggaatgagcagcttcatattgttccggccgtccatcgtcttgacagcgagcttacggaatccggaaactatattctgatgaaatccgggaagaaaatgaatcaggtaaaagagatcctctccagaagcggacgcgatgtcctgatggtggaaaattgcggaatgccggacgaacatatttaccacggggtcgatgaaatcccggatgatgccggctattattctctgatcattgcgaaggagcacaaatgatcgaaacaaagaacctgaccaaaacctttgacaattttacagccgtcgattctctggatctcaaaattgagaccggagaatttttcggtcttcttggaccgaacggggccggaaaaacaactaccatcagccttctttcgacccttctgctccccacaaagggcgaaattctgattgacgggcagaaactgacccgcaaccgtccggatctgaaacgtaaaatcagtgtcatcacgcaggaatattccatgcgtcaggatatgacaatggacgagatcatggaataccagggacgactgtatttcatgccgcgcagggaaatcaaggagcgcacggaagagctgctggaattctgtgatctgatcaagttccgcaaaagaacggtgcgcaagctttccggcggcatgaagcgtaaattaatggtgtgccgtgcgcttctaaccgagccggaaattctgctgctggatgaaccgactgccggcatggacgcactgtcccgccgtcagatgtggaatctgctccgcaagttaaacggtaaaaatctaacaattcttctgacgacgcactatatggaagaagcacagaatctttgcagccgcgtcgctttgatggatcatggaaagcttgaagaaatcaacacaccatccggtctgatcgacagcctgggacgttatgccgttgatgtattttcaggagaagaaacgagaagcagttattttaacagtcgcgaagaagccattgcatatctctccggcttatccggacaggcttctcttcgtgaaacaacactggaggatgtgtttgtggaacgagccgggcgacatctgatgccgtcataaggaggaggcattatgggaattattactattttatgggaaaaatgggtggaatttcgaagagacttctataaaatcactcttgcagccatgatcgcgcctctgatgtatctggttgtatttggcatgggaatccagacaagctcgcacggacagccgtatctgaattttctgatcccgggtgtcgtggctctgacaactatgaatggaagcttcaatgccattgctcagaatctgaatgtacagcggctttatgaaaaagcatttgatcaggttatgatctcccctactccgctgtggcagttcatcgccggtcagatcatcggcggaagtctccgcgggttctatgccggcggaatcattctgatcctgacgatgccgatcgacacgggactgattttcaatggctggtcctttttgatcatgttcttaaatggtgcggtcttctctgcgatcggagtcgtagtatccttccttgccaagaaccatgctgatgtaccgcgcttttctaattatatcattatgccgatggcttatctttgcaatacatttttctcaaccgaaaaactgcctggatttctcggaaaatttatttccgcgcttcctctgtcccagacaagtcacctgatccgaagcatctctgccggagaaggctttgccgcatcgggaattgtgatcctctttgtgtacctcatcgtatttacagccatcgcggcctggtttatttacaaaaagaagaatctctgataacgcgccacttataaaagcttccggatgaaagcaaaaaggtgccactttcgggtgacaccctttcgatatccggttaacttctcggcgttaactctacatacatatctttatactgttttgcactcttttcccacgaaacatcttttctcatatcacggactaccatattatcccagcattccctgtgttcaaaatagagagtctttgccctgttaatggcatcataaagaagtccgctctcatagcggtcaaacgtaaaaccgttgcctgtattgtcaaacatattatagggccagacggtatccttgagcccacctgtttccctgacgatcggaacagagccatatctcatggcgatcagctgcgtgagcccgcatggctcaaatcttgaaggaaccagaagtgcatcacatcccgcataaatattatgagccacattttcattataagcaatataggcacagaagctgcccttatatttgttttcataatagcggaaagtatcctcataccaggcatccccagttccaagaaccaccacctgcgtgtgctcatccatgattcccgggattacggcatttacaagatcaagtcctttctgattggtgagacgtgaaataagcccgatcaccatcttatggtcatccacatccagacccaaagattcctgaagcgccttcttattcgcctttttcttctctatcactgacttgtcatcatagtcagatgccagcagtttgtcggttgccggattccagatatccgtatcaatcccattcacaattcctaaaatcttattgctgtgataccttaaatgagcggcaagtccctccccatactcctcggtctggatctcccaggcataggtattgcttacggtcgtcactttattgctgtaagcgataccgccctttaacatattcgcatccagccagttctggatcatgcagtccttattaaatacataatctggaagtccggaccagtactggatcatttttctgtcgtagatgccctggaatttcagattatgtattgtgagtactgcaatcgcccgccctacgttcgtatcctgaaaacaggttctcaggtaaagtggtactaatgccgcctgccaatcatggcaatggactacgtcaggcgtccagtccaggtaattgagtgcggcaagggaagccttggcgaaataacagaatttcggaatatcgtctatcaggttagtataaggatttccccaggaaaagaactcatcattatctataaaatcatagacaacgccatcctcctgatactccatgattcctacataatactgttttccatctgagcagagattcatatagaaagaacccctgtactccatcttttcctgaaatttctgcggaatgcatttatatcttggcaggatcaccttaacatccagatttaattttgccagtgcttttgggagtgcatacattacatcccccagtcctcccgttttcacaaacggataacattctgatccaatgaaagcgacacttcttctcggtcccagatcaggctgcacaacaggtgcctccgtgacaactgcagcctgtttaaccggtacagctttttctgccgggacggctgcctctttgactggttcagccttctctgccgggacggctgcctctttgactggttcagccttctctgctgggacggctgcctctttgactggttcagccttctctgccgggacggttgcctttttaaccggtgcagctttttttgcagtgcttttcacgcttctcttcgtagtgctcttttgttctgtctttttcctcatttttatcccccatctctaaaatagtattgcacaccctgatatgttcctgtcagccagctctctcttttgttttatttataagtaattttagcaaaaaatacatctgtagtcaaacaaaataccgcaggtgcagctttcctggtgctcctgcggtattttttcagcctttcccctgcatttttacaaatcgaatcctctgctttacatcttaatccacccaaatgcattggccactgagctgatcagaatgatcgctgcaaaaatcgggcacaagtaacggatcatgaaattgaaaatcttctttctgcggaatttcgcctcccccacaagtacttcctgctcgatcttcttgacaccgatcacacgtgatacaagaaggcacgtggcaatcgcagcgatcggcatcattacagagtttgtcaggaaatcaaagaaatcaaggaactgcattcctatgatctttacaaatccaagcggtccatagccaagtgaggaaagggtaccgagcaccaccatgataacgcccactacaacggtcgattttttccgtccccatttcagctcatcctggaaggtagaaacagcactctcggtcagcgcgattgagcttgtcactgccgcacacagtacgagcaggaaaaacaaaacaccaaccaacgtgccaaatcccatactctcaaataccttcggaattgtaatgaacatcaacgatggtcctgcctgcagcatatccggatccccgccggagaatgaaaagactgccggaatgatcataagccccgccataattgcgattgcagtgtcaaaaacctctacatttcgcgttgaatcctcgattgaaatgtcttttttcatgtaagaaccgaaggtaacaagaattcccattgcaattgacagcgaatagaacatctgtcccattgctgccacaacagtcatccaggaaaagtttgacagattcggcacgagaaaatattttacaccctccaatgcccccggtcttgtaacagaatagaccgcaataataacagaaagtatcacgagcaccggcatcatcatgctggaaacacgctccacgccattacggacacctgcatagatgatcgccagtgtgaaaaaagtaaataccaggaaacacagctccgtcgatgttccatttgaaataaaagaagtgaaatatccatctccggccagagcttttccgtttcctttgatatactccacaagatatttaataacccagccgccaattaccgaatagtacggcacgatcagaaccggaataattgcattgatccagccgccaaaggacagccagccggattttgtaaatttccgaaaggcgccgaccggacttttttgggtcattcggccaagcgcagtctccgctacgatcatcgtgtaaccgaatgtcagcgccagcacgatatagacgagcaggaaaattcctccgccgtatttcgctgcaagatacggaaatctccagatatttccaaggccgaccgaagcaccggccgctgagagtacgaagccgagtcttcccgaaaacgtactgcgtttttcattatgatgttcttccacttgatggttcctccccatatttttcattcgccatatcttttaaccgagtcaagcaagtcccctgcttcaattgcgtggagcaataagcagtgggtagggacttgcttgtatcaggagtggtacaagccactcctgataagctgcgaagcagctactcggttatgaaatatcataaggaaggacccgcttgcgggaggatcccttatgatcctacaagtagcgaagcggattgcgaatatccgcttgacctgagtcaatcaccgctttgatccttccaacgtttcttcgtttcagccattatcacaaagaaacggctgcaaaaaacaacgatacgcttttcacagccttgtttttttcttatacctgaatatcaaattccctctttttataaaaatattttctgtcttcttctgtaatttttcgaatcacacgacacgggttgccggctgcgatcacactacatctatttgattcgcttcagctcatactctcttgtgccaagcccaaccttctctgcctgatccagtgttgcttcccactcaatattcggattggaatccttaaaatgatcatggtggaaatgccatcccggctttgccagatgctcaccaagctggctgtttgcgatcggcgttgcttccagacatgcatctgcacaggcctggtcaagagctactgggtcaaagcttgcaaacattccgatatccggaaggatcggcgcgtcattttcgccatggcagtcgcagttcgggctgatatcctgtaccagagaaacatggaagcacggacgtccgtgacagactgcctgcgcatactctgccattttgcggtcaagcagctcgtttgcactgctgttcggattgtaaacggcatcaaagctgcaggctccgatgcagcgaccgcatcccttacatttatcataatcaatgactgcttttttattcgggtaagaaattgcatcactgccgcattccttcgcacagcggcgacatcctcggcaaagctcctcattaatcgccggcttgccgcttgcatgctgctgcatctttccggcacggcttccgcagcccattccgatattcttcagtgcaccgccaaagccggttgcttcatgacccttaaaatggctcagactgataaaaatatctgcatccatgattgcgtgtccgatgtatgcagtcttgcagtactcgccatttacaacaggaacttctacctcatctgttccgcgaattccatccgcaataataacctgacaaccggtcgtaattgtattaaatccattcaggttcgcacagtcgagatgctccaacgcatttttccggcttcccggatacagtgtattgcagtcggtaagaaatggcttgccaccctgctccttacacagatctgcgactaccttcgcgtagttcggccgcaggaacgccatgttgccaagctctccgaaatgcatcttgatcgcaacaaattttccgtccatatcgatgtctttgatgcctgccgcaatacagagttttctgagcttatcaagctggctcgtgccgaccgggcagcgaaaatcggtaaaataaacggttgattttgccattttatattcctcctctttgtgtgcaaaagtagaagaagctgtatcattaccgtgcagtaacaatacttctttacaactgctttgaaatactgttctatactttacaaaaccatatcacttcaagtatacttgaagtcaagataattttccagtactttcggctttacagcctattattttttaaccgaatcaaacaagtctccttcttgattgcaagaagcaataagcagtaagtggggtggcttgcgaatatctgctttcactctggaggtgtcctttatgcagacttatacaatccgtgaaatatcccgtcttttttcgcttcccctctccaccctccgctattatgaagaggaagggcttcttacaaatgttcagaaatccgcttccggacagcgaatctacacccaggaacacatcgaccggctgcactgcatcaactgcttcaagcgaaccggcatgacactcgcgcagctcaaaaagctgttcgaatacgaaacggatgaggtcgcgcacatcgatgatattatcgcgctgttggaagaacaggagatgcaggtcaatgaaaagctcacacagctccaaaaagattcccggcacgtgcatcataagatcgcacattaccgggcgatccgccagtcactgcagaccggcatgccaatgcctgtgtgggaagaatgtgaggaggacgggactgactgcgcacctcatggacagcagatatgcccgggcagctgtcagcaggattttccggggcattcgtaaatatataaattgcagctctcacctttgaaaaaagaacccaccatgaaaaaaatcgtaactctcacctgtcttcactccaacaatgtctgtgccagagtcagctgcctctccgctttccctttctgcccgactctgaattgctaatctttcaccgctttacaacgccaaatttcattgacagccgaattgtatttgtgctagaataagcgaaggcaaaggtgtcagcatcggtatgctacacctttttttcatgaaggacccgaaaaggcctcctgaaaccatttcaaaaaaagaaaaggagtgttgcattatgaaaaaattatccttatttctcactgccggactgatcgcaggctgcatggcatttcctgctgctgcagaggaagacaagacatgggtcattgctactgacacggtattcaaaccgttcgagtacacggatgagagcggcaacttcgtcggcatcgatgtcgatatcgtagctgcaatcgcagaagaccagggcttcaaatatgaaatgaagagcctcggctgggatgcttccatcgctgcatgccaggccggtcaggcagatggtatgatcgcaggtgcatccatcactgatgaaagaaaagaaagtggctggatgttctccgatggatattataatgcaacacagtccatgactgtttctacagactctgatatcaccggttttgatgacctcaagggtcagaccgtaggagtaaagaccggcacacaaggcgcagcttacgcagaaagcctcaaggatgaatacggctttgatatcacctactttgaggattcaccgactatgtatcaggcagtccttggcggacaggttgtcgcatgcttcgaggacaccccgatcatggcttcctccatcaaagacggcgacctcgcactgcagatcgtagatggcactgaaaacgaaggtgctccgtacggttttgctgttttctctgaagacagccaggagctgcttgacatgttcaatgcaggtcttgccgacatcaaggaaaacggcacctacgatgagatcatcgcaaaatacctcggcgaagacgctgttccgactgaagataccaccgaagcttccactgaggctgcaacagaagcagctactgaggccgctaccgaagcagtaactgagtaatttcagaaaatctacgtaaatttcacgggactgctgcagactttgcggcagtcccgttttgaaaggaaccattatgatccagatattatctaaatatgggcagatgctgctgttcgcgatggggcagactttacttctcgcactgtgggggcttttctttgcctgcatccttggtatgatcttcggactgctgagtgttgtgagaaataaggtgtgcaatgtcatcgcatcgatctttgtcgatgttatccgcggtgtgccaatgatcgttctcgcttattttattttctttggtctgccttacgcattcaaaaattttctcggcagtaaaatgacactgaccgcgctgcaggccggtaccgctgcacttgcgcttaactgcggcgcctacatggctgagatcatccgtgccggtatccagtcagtcgatccggggcagatggaggccgcaagaagtcttgggcttccatactggcgtgccatggtacgcgtcgtacttccgcaggcgatccgtaccatgatcccgagcattatcaaccagttcatcatcaccttaaaggatacttctattctctccgtcatcgggttcccggaactggtcaacaccgcaaaaaatgttatcgcgatttcctttaaatcatttgaagtctggggaatcgttgcagtgatgtatctgatcgtcatcacgatcctctctaagatcgcaaagagactggaaaggaggctgaaccgtggacgcaaataaaaatgtcaaaatccacgtatctcatctgcagaaaagcttcggaaagctagaggtactgaaggatatttcctacgacgtgcatgaaggcgaagtagtcgttatcattggtccttccgggagcggaaaatctacatttcttcgctgcatgaacaagcttgaggaaatttccggcggcgagatcgttgttgacggtcacaacctgaccgaccgtcacgtagatatcaataaggtccgtgaaaatgtcggcatggtattccagcatttcaatctttttccgcatatgaatgtcttgcagaacctgatgcttgctccggtagacctcaaaaaggccacaaaggaaaaagccagagaacgcgcccttcagatgctgcgtaaggtcggcatggaggataaggctgaggcttatccggatcagctctccggcggtcagaagcagcgtgtcgcaatcgcgcgtgcactgtgcatgataccggatatcatgctctttgacgaaccgacaagtgcgcttgacccagaaatggttggtgaggtactgcaggtcatgaaacagctggccgcagacggaatgaccatggtgatcgtcacacacgagatgggctttgcccgcgaagttgctgaccgtgtacttttcatggacggcggatatatcgtcgagcagggtacgccgcaggaggtactcttaaatccgaaggaaccgcgtacgatcgatttcttaaataaagttttataaataaatttgccctgtcacaaaaaacaggtcccacgtttctgctgtcaggtgcagctgaaacgtgaggcctgtttctttttttattctattttacctgtttctactgcttctccgcaatcttccgtgccacatacacgccgctcgccgatgcatgcgacagggaatgggtcacaccgcttccgtcaccgatgatatacagacccttgtaacgactctcgagattttcatcgatctccacttccatgttgtagaacttgacttccacgccgtagagaagcgtatcgtcgtttgccgtacccggtgcaatcttatcgagtgcatagatcatctcgatgatgccatcaaggatccgcttcggcaggacaaggctcagatcgcccggtgtcgctgcaagtgtcggtgtcacaagaccttcttcgattcgttttgtattgcttcggcgtcctcttaccagatcaccgaaccgctgcacgatcacgccgccgccaagcatattggaaagacgcgcgatgctctcgccgtagccgttgctgtctttaaacggctcggagaaatgttttgcaacgagcagcgcaaagtttgtgttttccgtctgcttttccgcgccctcatagctgtggccgtttaccgtcacgatgccgttcgtattttcatttacaacgatgccgttcggattcatacagaaggtacgtacgttgtcctcaaatttctcagtgcggtacacaatcttgctctcgtacagctcgtcggtcaggtcggaaaaaataaccgccggaagctcaacgcgcacgccgatgtccacgcggtttgatttcgtcggaatgtccagctcctggcagaccttctccatccacttgctgccgctgcggccaacggaaatgatacactcctcgcagtcctcatatttatcttcgccgtaatgaatgcggtaaccttcctcaagcttctccacatgctctaccggcgtatggaaatagaaatcaatgtgggatttcatttcattgtacatgttttccagcacgatatagttgatatcagtaccaagatgacgcaccgatgcatcaagcagctttaacttgttctgcatacaaagctttttaaactttgtgcctgcagttgagaacattcttgtggattctcctccgtgattgacattgatctcatcaacataatacatcagatcaattgcctctttacggccgatatgctcgtacagcgtaccgccgaaatcattcgtaatgttgtattttccatcggagaaagcgcctgctccgccaaatccactcatgatcgcacaggtcggacatttgatacaggatttcaccttcttgccgtcaatcggacaacggcgcttctccagagaatagcccgcctcaaaaaccgctaccttaagccccggactctttttcatcagctcatacgccgaaaaaatgccacccggacctgcgccgatgataatgacatcatatttcatacttacattctccatttctcttcatgcggataaaaatccgtcaatatttaaatctgcttatggcttctcgtaacccggcagggtgcctgcctgccctggctaaatctcccggataaaattcgtgccgacttttgtttccttctccggcagtccgtatttttctttgccaagcgcaatgctctttatcagaaagctcatgttgcgtgccagtgtccgcatggtctgcagtccttccaggtcctgcgcggcctcatctgcgttattgccatggatgctgttccagtactgactggatgccaccggcatgcccgcgatcgtaaagtatttatttaattcgtcaaacgtcgcagaaagtccgcctcgtctggctgatacaaccgatgcgccgaccttcatcgtcttatcaaagcccgtgctgtaaaacatccggtccagaaatgcgatcagtgttgcatttgcggaagcgtaataaaccgggcttcccacaacaaggccgtctgcctcttcaaattttgcagccgtctcgtttactgcatcctcaaatacgcagcttccctttttgcggcagccattacaggcaatacagccgcggatatcctgatttccgatctgaatgatctccgcttcaatgccttcctctgtaaataccttttccatctcatgcagcgccgtatacgtgcttccgtttgcgtgcgggcttccatttacaagtaatactttcatgaatccgttccctccacttcttattttttctctgatttttatccattgtctctgcgtggtgctttttcctgtattctggtgaatcacacaaatagattcttttcacaatttcatttttctgtttcctcataaacatcccatccaccgcttaatgctccgcgcacttgaagcgggggaatgcttatctgtgttcagactccgcgcatcttttatgataacagattctcatctctccatcaaatgtttttcataaaatccagcactttttccatcacgtacatgcctgttttttctgtaaaaccgtgtccttctcccggaagaacttccaatttcacctctgctccggtctgtgcggccttttccgcatacgaaatcggtacaatctcatcctggtctccatgaaagagcaaaattttctgctttatttcccgcagcggcttatatgcatccagctgtactgctgtctcaaaataacaccggccaagctccataccccaatgctcccttgactcaggaattaaattgaactcaggatattcctttcgccagtcatccggaatacaaagtgccggaaaatacagaacaagagcacggatttcttccttaagctctgctgctgtaagcagactcacaaatcctccctggctcgcgcccagcagaaacagacacttttcattgatctccgatcttgctttcaaaaattcaatcacagccttcaaatcttccttttctgtaagcacagacatctttttcgtacttccgctactgtttgatccgacacttccaccacagaaatcaaatgtacaggccgcaattccgtgtgatgcaaagtacaccgcttctttctcgaaatcagctcccttaccattataaccatggcttaaggccaccgcaggaaccgtctgcgcacattccggcagatacagggatgcaaaaatccgattgtccccggccgcaatgctgtgtatttctacacgatacgggcaaagcttctctttttccattctcctgattcggatcattacctggtcttcgccgcaggattccaccgttccgcaaagtgctgccccttccatccatgaaaggctctcgctatccgtgtaaatccgtggcttagtcactatttgcccgcctgcttcttccccgttattttctataaaaagacagcactgcttcccggtacagtctatgccttccagcatatatcttgccgaaagctgcaatggctttcccgcttcgcttttctgcgtatcaactccgtgcggcaaaatctttccactgaaatacggtccatctgcttctcctgaaaatgcaatcatccgtgcacttccatttttcccttctacctcaaatatgtcatccaactgaaccttgatttttaatatttcttccatcttacagcttatccctttctgccatttttagcgtatctgcaacaggtcttcgatcgttatctgccttttctcatatttcgtcaactatagtatatcaaacgcttcttcaaatgacaaaacaaaaaacgcctgaatatgtctgccttatccaagcgttataaaatacttatgtctttcttttacaaattccgttccttctgatttacctgtcttctgagataatttccgacctccgtcatacacagcagtgttaccacaagaaagacgcccgggatcagaatgatccaccacgaaccggtaagaagcgctttttctgagagagaaagcatacttccccaggaaatgatctcaagtggaagaccgattcccatgaagcttaatgtagattcggacacgatcgcactgcggatgttcattacgaccataaacatgatcgaggaaacgaagtttggcgccagatgatgccacagcagatggaaaaatccgccgcccatacacctcgatgcaatcacatattcactgcttcgaatctggcgcacctcggtgcgcacaaccttcgcaatgctcgtccagctggtcacaccgattacaacagagatcgttaccacgtttggtgttccaagaatcgcctgcagtaaaattacgagcaacagattcggaatgctcagaagaatttctgtcagccgcataagcagcgtatccagccactgcggcgcgatgccgctgattccaccgaataccactgcgatcattgttgatattaatgtggaaaacagtccgataaacagcgaaattcgccctccgtaccagatcatcgagaaaatatcccttcccatcgtatctgtgccaaacaaaaattcccgatccggcgcacggttgtagttcatcagatccatatacgtcggatcttttgtcataatcagcttgcagcacaggcagcctccgatgacgatggcgagaaacagcagagaaaagactggcttgtctttgtaccatttcttttttggggcaggcagagtggaggatgacggctggattccgacaatctgaaacggatcggcgggatctgctctgtctggtttttctactgtgccttcactgagattttttaacgtaccgatttcagaactcttatcagctccgtcactgtacgctccatgcccaattgttgattttccttccggcacttctccgccgccgtcatacaggtgatgtcgtaaaattctcatcgtttcaccacctccgattcttctgtcatctcgtttgcccggattctcggatcaatgtgctcattaatagcctgcgcaaccatattgcagaggatcacgatcgcacctgagaggatgcagagcaccatgagcagattataatctttataacgtgcgctttcataggaaagcgtaccgatgcccggataggaaaatactgtctcgatgatatacgtgccgccgagcacgtgcggtacggagatcgccatgatgctcagatacgatggcaaaatattccgcaggcaatggcaaaacagaatttttcttttatcaagcccctttgattttgcgagcagcacgtaatccgaccgtacttcctcaagaagcttgtttcgaaccatataagcataataccatagatgcccaagcacgacgatcgtgatcggcaaaatcagatgctgtatccggttcagaatatcatcactttttccaatggtatacgcaccgctgcttggaagcaggcgaagctgcacggaaaaaatcaggataaacagtagcgacatccagaactccggaatgcagctgctcaccgtgccgatgcggcagatgatctgatccggcaggcggtcttcgtaccatgcgcaccacacgccaagcaaaagtgccagtacaaaaataagcacaaaaccaaccccaccaaggatcagcgtattaccgattctgcccgtaattacttccagcacatctgttttatatttatacgaaattccaaaatctccatgcagtgcatttccaagccagcggatatactgcaccgtgatgggatcgtgcagaccaagcttttcttctgcccatgcccgctcctgtgtactcatcttttccacccggtcaccataataggataccagcggatcacccggcgcaagtcttgaaatgtaaaaggtaataacggataaaagcagcaggctgaccaggaagatcagaagctttttcgtcacataccatactttattctttttcatatttttattgttaccacctgtcttaattcttacctcagtacaaaatgccccggcgatacttccaccagcacgcccgccgtctcatacctctgctcaaactctgtcattttccgctctcgctcacgccctggatccggaaccggaatcgccgaaagcagtgcctgcgtatacggatgcagtggattctgatacaattcatggcagggagctacctcaaccagtcggccgtggtacatcacccccacccgatcacagagaaattcgaccattgccaggtcatgcgcaataaagagaatcgaaaatccgtgttctctttgcagatggcggaacagatttacgatctgcgcctggatcgatacatccagcgatgcgatcggttcatctgccaccagaagctccggctccatgctcacggcacgcgcgatcgctatccgctgccgctgtcctccggaaagctctgacggatatttatcgagacaggattcatccagtccaacgtatttcagctgatatgcagcctctgcccgataagaaccacgtggcggacggcgatgcgccagccgcatcggctccatcacaatatcctccaccttcattctctgattgaggcttgatgcagaatcctggaagatcatctggcgcccctgctgcagaaggacacggttttttcgcactgccattcgatttccggtatctattccacgatacaaaatctgtcctcctgccggacgataaatattcatcacacaccgcgcaaccgttgattttccggatccggattctccgaccagaccaaaaatctctccgcctctgatctggaacgaaacatcatccaccgcacgcaccgccagctttttcgtcagggggaagacctgtgtaagatggcgaacgtcgaggaggaggccggtctgagcatgctcaattatcttctgtctgttttcgatttctgtatatctttcagatgcgttctgcacactttcttctctgtttttttgaatttttttattttgaagctcctgtccgctcgtatctggcaatacattctcttgaagcttttccttcacttcacctgacaacgtacggcttttgtgttcaggttctgcaaagctttgctttttagaaccattttttcttgagctatcagaacttatgctttctcttttccacgtcagttcatctatttttcctgcatcttgaagcaattctgcccgttcacgccgctccagttcctcccgtaccttcgccgccctctcgtcgagcagccacgtcgctgcataatgcgtatctgatacgcggaacatcggcggctgctgctcataatcaattgcgagcgcagattcattacggcaggcaaatgcgtcgcctttcggcggatgcacaagcgacggcggcatgccgggaagtgtgtgcaatgtctcttttccgtgggaaagtgccgggagtgaccgcagaagtcccttcgtgtacggatgcttcggatcataatagatttcctccgccgtgccgatctcgcagatcttacccgcatacatcacagccaccctgtccgccacacgcgccaccacaccaagatcgtgtgatacaagaatcgttgctgtgccaagtctgtgctgaatctcctttaaaagatcgaggatctgcgcctggattgtcacatcgagcgccgttgtcggttcatccgcgatcagaatcgccggatcagaggcaagtgcgatcgccagtacgctgcgctgccgcattccacctgaaaaattccacggatacagcttcgcccgtgcctccgggcggtcgattccaaccagctccatcagctccagcacccgcttttgcaccgcttcctttttcattttcggctgatgcaccaggattgcttccgcaatctgcgcaccgatcgtcatcgtcggatttaaagaagtcatcggatcctgaaataccattgcaaacagccgcccccgcagcttttgcatttctttttctttacacgcagaaatatccgtatcattgatacggatactcccgcttttcattttcgcttttcccggcagaagcttcataattgacttacacagcacactttttccgcagcccgattcaccgacgatcgccagcacctcgccaggacgcaaggaaaaacttacgtcccgcactgcctccaattctcctgcatctgtctgaaagcttattgccagatgctctacctttaataattcgtccatttttgcttcttactccgcaatcgtccagtccgtaatattccagaagattccaacaccgtgatgtcccataacggtatctgcatcaattccctcgattgatgattttgccacataattggcatcaatatagcagataaatgcaaacgcaggatccttcgccagctcttcctggaatttatcatacgcctcagcacgaacagctttgtcatccgactgacgtgcctctgtcagatactggtcaaccagctcgtttgagtatccagaataattggcgcccttatctgtaccgaacactttataggtatggtcatctgcatcaaatggacttccccagccgatcagatacgccatctgtccgccccagtcaacctgcgctggtacttccacgctgacatcaagtccgatctctctgagctgctgtgctgctgcctgtgcgatgtccacacgcacctgatcgcctgcaccgacactgattacaaagccgagcttttcatcatttcgataataaaatccatcctcgcccattgtacagccaactgactccagtatctcttttgccttttccggattataatcataatgttcaacgtcttcattattataaatgttacgctgcagcggcccatacgccgtcataccctctccgagcagaactgactggacgatcgcctcgcggtcaatgccgtagcagatggcaggaatgatatccttattttctgtccagtagtcattctggaaattaaagagaattccacggtaatcggaggtcttcatatcatagcaggtatagccgtcctgacctgcaaacagctgtgcatcctttggcgtaagcagcgcaagatccagctcacctgactgcatctgcatcgcctttgcattgtcatctgtaacgattttgaaaattacctcgtcaatatttggctcacctttaaaataatcctcattcttctccagcgtgatcgcctgaccctcatcccactctgccagcttatacggaccggtaccgatcggatggcggaagaaatctgattcctgcatattttcgccttccaacagatgctccggaagaactgccatcgtcatataatcaagaaatgccacattcggcgcatccagctgaaatgcgatcgtgtagtcatcaatcacgtcgattttttccacatcctcataattcggtgcattctccgagccattgtccggatccatgatcgactcgatcgtaaattttacgtcattcgcagtaaaatcctcaccatcgtgccacttcacgccctcttcaagatggaaggtataggtgcatgtttcctcatcaaactcccagctttttgccaaacccggaacgacctgattctctccgtcatgtgctgtcaggccattgaacagcagaatattgatttctccgtgctcatccattgccggattgattctcgtgtaatcaccgcttccgtataccagcgtggaagcagatgctgcacagacattaagtccaaacgcagccgcaaatgctgcaaaaaataaaacatgctttttcattgtttcaagatctccttttctttttatgaggcaggcattccatctccgtttttactacatactcacgaacacaaataaatatccagtaaagcggatattcgcaatccgcttcgctacttgcagaatcataaggaatccaggctcgtaaggaatccaggctcgtaaggaatctttccgtaaacggatccctccttacgagattccgtaaatggatccctccttacgagattccgcaagcgggtccctccttgtgatatttcataaccggacagctacccggttaaactataacaaaaaaacatcacccgcggaagccccgtcgggggatgtttttttcggaaattttgtattcttattcaagcatgcagccacttcgtaaccggcaactgcccttcctgcatttatttttccaagaacttactgccttatccgcgaatttcctgctgccagtaaatccgctcctcctgcagcatcgggtaactgaccaccttagcgccgtccagatcttcccggtgcatatcaaccgccgtgatctggcgtccagtgtacgttgtatagtaataaattcctctctgcgcattccagcaggacgtgtagatcgtgatctcgtattttccttccgctacctcacagcatcccctctgctgatcgactgagccaaggatatggaaaaactgaccgacactattttcctctgagtcatcggaaacagaatgaagcttcgtaaatgccactctcgcaaatctggatgccgaagacagatctcccggaagtcccaatgcgcccatgccacggctgtatgtctgcagcggaatctgctttgcaaaatgattttccggctgttttgccgacagattcatataattattcagcaaaaacatctgtgtctcaaacggtggattattggtaagcactccgaccggattttcgtataccttcagtccgtccgccaccgactctactgtgatcgcaccggtcgcatccgcaatgatccagtgcagctgtgcagacggaagctgttcgctgtacggtgtcccggtgaggttcatttcttccagaagtgatttcgcttccgcaagagtagcacactgtgaaagaatccacgggataaattcaaactgtgccacattccggcatccctccttcggctcccggtaaaccgcgtttcccacaaaattcagcccggccatgccaagccccttttcatttaccgcatcgtaatacaggggaaaacccgccatatgtgccattccgatgatcgcatagtgatgctccagtttcccgtcaaaccgaaaggcaagcgggtaattacgcggcattaccgcaatctcctctccgtaggaaaattcatagtccagagttcttcccatataaaaatcttttgactgatacgttgctgctgtacacatagcatgtcctcgctttctttttgctgatatttacaaatgtccttattataatgtcttatttttccgcccggatatacggatttctccagaatgagatcaccagctccacggccataaagcaccagattaccggctcacaaaaaatgaccgcctgatactgaaatttcggcaccagcaaaagcacaaacagaacttttccgatcagctcgatgatgctcgacagtaccggcagaaccttgcttcctatcgcctggagcgccgtccgcgtattgttgatgactccgaggacgaaaaacgccggagcgaccacgcgcaggtacatcgtcccgttttcaataatcaccgccttctccgatccggaaataaaccgaatcagatgcggcgcaaaaatatttaccatcagaacaagcacggctgtcacaatcgcattgtacagataggccgccttcatcgcctttcgaatccgtttcattttccctgcgccgaaattctgcgacacaaacgtgttaactgatgccaccatcgccgtcagcggcatcaggaaaaatgaaaacagcttccgtgccgacgtatgacccgcaatcaccagatagccaaggtcgttgattccagtctgaaggatcgccgtgcccgcgcacacgaggcagttcatcaagcccatcgagccgccctgctccagcatttccagatacagctttttatccggttgaaaatgatgctttgacggaatcaaaatccggactgactttaaaatatacagtacgcacagaatcaccgaaacgccctgcgccagcaccgtcgcgaccgccgcaccgcgcacgcccattccaagccccgtgataaaccagagatcaaggccaatgttcaacacggacgaaacaatcagaaacacaagcggcatcaggctgtttccgaccgcccgcagaatacctgccccaaggttgtaagcaaatgtcacgcccatgaacagtgtaatgcatgaactgtaccggtatgattcctccagaatctcctccggtgttttcagaagcttcagaaacggaagcagtcccactcttgtaatcaaagtcagcacaattgtcaataccagcccgatcacaagtgaacctgccaccgatttttttaatgtgttttcatcttttgaaccatagctgcgtgctgtcacgatcgacagtccattgcccattccaagcgcaaatcccatcaacaaatcatacactggtgccgctgatccgattgcagcaagcgctgtctcaccgagcgtatgccccacgatcacggtatccatcgtattataaagctgctgaaaaatactggaaaacagcaccggaatcgcgaatcgcaccattgcagaaaaaatgggtccgtcaagcatattgatctgtacctgttttgtcctgcatgccataatctctttcctcccataactcactatgaaaactatagcatcaaagagggaaaatttccataattaattccggttattccgaacagggaagggatttcacccgaaccgcaaaaagaacggcaaaaccgccgttctttttcatcttgtgttacttctgacgatactgttcgtatcagatatgatttgtcacctcaaacgcatcccagatcgcatacataatatttgctaccttctttgcatcgccaagcagataaatttccggaacctcaaattccagctcctgatacagactgttttcttcccgatatccaaccgacaaaaccacactgtcacacggtatttcacgaatcttaccggcgacatctgctgtcagtattccatcccggtaaccggttactttggctcctgtcacaacttctactccgttatacggaacaagaagctccaacatttctttatttgcactgcaaagcgggccatttaacgccagaattttatccattgcttccacgatggttactttttttccgttttgagccagccacaatgcagtttcacatccgaccagtcctccgccaaccactacggtctgcgcaccacagtctttttcttttaaaagtacctgtgctgctgtatatactttgtcatcatcacccagcgggaacacttttggctttgatccggtcgcaatgattacggtatcgtaatctcctgaaagcacctgctcttttgtcactttactgtttaaagtcacaggtactccaagttttttaagctgaacctcataccattttgcaagtgcaatgtcatcctctttaaactccggtgcgccacccggaagcagatttccgccgagctgtccgtttttctcaaataattccggcctgtgcccgcgcagtgcaagcactcttgccgcttcacagccggccacaccgcctcctacaatcaacacttttttcggctgcaaaatgggattataagcagtcacacgctctcttgcacactgtggattcaccgcacagttgatcatggaataatgctgcacacgccccatacagccctcctggcaggaaatacaaggacgaatctctgccattcttcctgctcgcagcttatttacataatctggatctgcaagcagcggacgtccgaggcttacaatatcgcaatctccatcttcaatcgattttgacgccatctccggatcgtccattcttcccgcacacaataccggtacatcaacaacatcttttaccagatggcaccaggtgcggaacagtcctttctcctgatacattggcggatgattccagaaccatgcatcgtatgttccaacatccgtatcaagtgcatcgtatccataggataccagcaattttgctgcttcaagcccttcctcagtatctcttcctttttcttcaaaatcctcgcctggaagcgcacccactctccagtccttgatcatgctctttacgctgaaacgaagtgcaaccggaaaatccgctccgcatcgcgctttgatctcttctactacctctcttgcaaaacgcaggcgattctccaggctaccgccatattcgtcctccctttgattaaacatggaaatcgcaaactgatccagcagatatccctcatgtaccgcatggatctctactccgtcaaagcctgctctctttgcattatatgctccgtctccaaaagaacggacaatactgtggatctcctccaccgtcagcgggcggcatattttatcgagccagcgatgcggaattgcagatggtgcaaccggtggaaattcgccaagattagttggaatcgttactctgccgaaaccgcctgacatcatcagaaaaattttacttccatatgcatgtacccgctctgtcagctcttttccggttcgaatgaaatgtaccggattataggtagaattcggacagttcggcatgctctgcgtctccactttacagtccgaaaacgttacacctgtaatgatcaggccggtaccgcccttcgcccgctctgtataataatcaattcctctctgattaaatccaccttccgaatcagaaagtccaagtggccccatcggtgccattgcaaaccggtttttaatcgtcagccttccgatttgtaccggtgtaaataaatttttatatttcattgtaccctcccttttgcattaatgtacgcccggaatctttcggcgtgtatcgttatgatgcatagctctttcttccacgcgtgctcgggattccaagttcttcccgatatttggcgattgccctgcgtgatatcaggatctttctttccttcagtagttcctcaagcttctgatcactgtacggttttcttttatcctcgctttcgatcagcatcctaattgcttcttttatcgcatccacgctaatctggcgttctccatcctgcataactccttttgaaaaaaaggcagaaaagggaaacgtcccccaacagcactgcagatacttttcgtttgcagcccgacttacagttgatatactcacattcatccgtgcggcagcttctgaaattgtgaatggaacaagtggcttttttccgtttttgaaaaactgctcctgtacctccaaaatacattttgtcagcttcagcattgtttcatttcttcttccaatattttcctgcaactcctcagcctgatgaattttttcctttaaatatatccttgtttcctcatccggttga

SEQ ID NO: 3010 - DNA, 5616 bp, Unknown
  16S sequences of unknown bacteria
gatcaccatgttcaacactgtcctcaacaccccggacaacaagcgcatttccctccccaatgactcagtgtacaaggccaaggttgtcaactactccgccgagcccaaccgccggctggatctggtgttcaccatcggctacaacgatgactacgacaaggccaaggctctcatcgaaaaggtgatccgggattgtccgctggctctggatgatccggcgccggtggtacggatgtccggtcatggcgccagcgccatcgagatcaccacccgggtctgggtcaagaattccgattactttgagctgcagttccggatgtatgaggatgtgaagaagatcttcgatcagaatggcatctccattccctttaaccagctggatgtacatatcacccagaactgatccgctcccccaaagataaaaaacaccggagtccccagggaccccggtattttttgcgctattctgccaggaagccggtccactttcccatgcagatccggcagggcagggtaggatggggctctccggagagttttccgtcccgcagagcgagggcgtcctccagcacccggctgagatagaccggctcaatgggacactccccatggctgggcaggatctgccggatctccccctccagaggctgcagctcccgcaggctctccagataccgctccaggttccgtctggggccgaacatatagatcgtgccctccttctgaatggaatccccgggcagcagcaggccgtgttcccggtccagcagggcgatgcttcccggcgtatggcccggaatgtgcagcacctcgaaccggtagccgccgcattccagggtatccccctcccggagcgactgccaacggatctccggcgggagcatatcggcgtcctccggatggaccagacaggaaccgaatgcccccaggccgccggcgtggtcatggtcgccatgggtgagcaccacccgcaccggcaggctggtgatctgccgcactgtctccgccacatggctctcctccacaccggtatcgatgagcagggcttcctcctccccgacaatcagaaactgacgcacccaatcgtccagaatataaaactgcttcataaactcccggatctccggcatttgcaaacacctccgcataatcggtctttttctttattgtagcacagcggcaaagggttcttcaaacaaaaaaacacaggcccgccccattggggagcagagcctgtgtttttcattggggagaatccccggggttcaagagagcgcagggattgcagttatgcctcgagagcatactctgcggcactgccgccagccagacgaccccataccagacagccggtattgccgacgccgccgatggtggtgcgaccgaaggcatttgccatgccgacaatttcaccggcctgatacagaccaggaattgcctcgccatttgcattgactacctggcccttatcgttcatatccgggccgccggcagtgatcatgatgtaaggagtggtctcgaagatgtagtaggtaccgccggtgaactccttcatcagacgggtacgaccgaattcctcatcataaccattcttggcgtactcattgtacttttcgatggtcttttccaggttttcgccgttgatgccagccttctcagcaacctcagcaatggtgctgccgctccacagaacggtgccgtttgccagctgctcatcgaagttcttccactcggtatcgcccgagatgataggcttgttctgagccttcagatcatcaaccattgcctggtccagcatgatccaaacgcggttgtcgcccttcttccaccaggaggtgatctcatcgtagctggaaccgtcctcgttgcccagctcgtctacaaagcgttcgccgttctcattgacaaagatgatgtacgggaagtccttgacacggatggacagcttcttggtgagcgaatcgtccaccttcagaccgcctgcataagcggtgaggaagtccatgttcttgagcacaccgccggcctgctctgccatgaagaagccatcaccggttgcaaaggaaggagcagtggtggtgaagttctggaagttgtacttcttcaccagttcctcagaatagccgtaaccaccggtgcagagaatggtggccttggccttgtaatccatctgaacgccatcggtgttggtggtcttgacgcctaccacagcctcgccgtccataatgagctcatctgccttggtgttgagcagcacttctaccatgccgctgtcgatgtacttctgcagttctgccttgagcaccttgtcataggaagagcggtcgcccgaccatacacggggagtgttcagaggctcgtacagggtgggctggctgggggtacggtcctttacagtagcgcccagatcctcaacgatccagtccacacattcgcccgagtgctgggcatagtacatacccaggctctggttccagtagtaatcatcggcggaaacgccttcccgctcctgatagccggcattcagccgtacaaagtcatcaaagaacttttcgggggtatcatcggtgatgcccgattcgatctgcatcttggtgccggtacccgacagagtaccgccgcccatggtgccgcccagggtaccggtcttttccaccagcagaaccttggcgccgtcctcagccgcggtgatggcagaggtcataccagccataccgccgccgactacgatcacatccggatcggtcatggttgcggtgggaaccttggcagcttcgccgcccttggcgagaaccagtgctgcctcagctgctgccagcagaccttcgctggaacgggtacagcccgctacggtttcaattccctcagtgccctgcttttccacaatggctgcggggatctgttcaaaggccggatcgctgacgccctcggtttcactgtgctccaggacttcagccttggtgatcttgccgccttctacggtcagagccagcttgatgttgccgccgtaacctgcgccggtaccctcataggtgccgtcgatcaggccagtgtcgctggtgcccgatgtggttccggaacaaccggaaaacagcatggacaccgccagcagaccagccagaagagcggtcagccgcttgttgtgtttcataattatctccctttcctttccttgcaacgcccatgaaccagacatgggcataacagattgattctatcttaacacattctctgacagagtcaatcttttcgacaaatctttgtcaataattccaaatccctgagaattcttttagggaaagttccagtaccgtttgaaattccagctttttgaaatgataaaaaccgacggctgaactgctcagccgtcggtttgttcttggaaagggagatcactcagtgggtatgggtggaaggggtgacaaagccgtcatacagctcgtccagcttggagaagctcagggcggtgccgatggcaacacactccaccggatgctctgccaggcgcaccttgatcttggcatgctggctgatgaggtcgcccaggccatggagcatcgcgccgccgccggtcataatgaggccgtcctcccagatatccgccgagagttccggcggggtgatctccaggatctgctgcacggcggtgacaatctgcatcacctgctccatcagcgcgtcatagatatcgctggtgcggatcacaaacttttccggcaggccggtgtgcaggttgcgtcccttggcctccatctccttatcctcggtatagaagacactgcccacctcgatcttgatgcgctctgccatcttctcgccgatgaggacattccggtcggtgcggacacagcgcacaatggcctcgtccagcttgcgccctgccagcttgatggacttcttgcagacgatgccgttgagggacagcacagcaatatcggtggtaccgccgcccatatccaggataaaccgtccccggggcaccgagagatccagtccagcgcccagtgccgctgccaccggctcctcgatgaggtagaccttccgggcaccggcagaaacggcggcattcacacaggcacggctctccacgccggtgatgcccgacggtacacagatgcacacccggggcttggagagggtgctctcactggccttcttgaggaagtgccggagcatctgttccgtctggtcgaagtcagagatgacgccatccttgagaggatagagcgcccggatgcggtccggggtgcggccgatcatcttgaaggcctcctcgcccaccttgagtacttcgccggtggaagcatccactgccaccactgaaggctccttgatgagcagtcccttgacgctgtcatataccagtaccgttgcggtaccaagatcaatgccgatgtctgccatagtatttcattcctccgcctgtctatcacaaaaaggccggacctttgtccagccggactatttctgcttactctgtccagtatacccgcttttgagccgggggtcaagctgtgaagcgtttccactcagtcctccggggtaatggcagctgccgctgtgatcacccgcagtgcgccctgttcccgcagcaccgataccgccgccgcaaaactgttgccggtggtgcagatgtcgtccaccagcagcacagtcttcccctttggatcgccccggcccggacgcagcgatgcacgggcatgttcttcccgtttctcccgggaaagggtatgctgatcggtgagcccgccatggtgctccagcagcttcccgtcaaagccgcagcccagccggactgccaccgcctttgccaacagctcggcatggttgtatccccggcggcggagtttttcctttgacatgggcatgcaggtgaccgtcacctccggaatccccgaatcggcaaggctctgtgccagctcgtccgccagaaagtccaccgcccggtgatcgggtgtggttttcagccggagcagcagactgcgcatcgtcccggtatagagaaagggcgtcaccagcagttccagcccggggttgagccggcagatctccgcctcctgactgccatcactgcggaggctgtccaggcttgcggcgcaccggggacagagatgctccccggcagaatattccccgcacagcacacagaccggcggatagatcagatccagcacccggctgccgatctttttcagcagcatcacagcaccgcctcccgcaggaacttgccaaggttggtgtaccgcagggttttgcggtcgttgtggaccatctctgccacagccgaagcctgtcccactaaaatgagcagctttttcgcacgggtcaccgctgtatagagaaggttccggtagaacagcttgctgcggctgccgcttaccggcatcaccaccgcgtcaaactcgctgccctggctcttgtggacggtgaccgcataggccagctccagctggtcgagcatatcgaaggtatactctgccacccggtcatcataccgcacatgcaggctccggctggggcggtcgatcatctcgatggtgccgatgtccccgttgtatacgccgactccctgctccccatcgtccctggtatagacgatgtcgtagttattgcgga

SEQ ID NO: 3011 - DNA, 21775 bp, Unknown
  16S sequences of unknown bacteria
ggctgcagcaccacccgtaccggcaggggttcggcctgtccggcggcgtggagcagtccgtccactgccaggctgtccagagcccgggtgatgagccgtttgatttcagacgccatggcttctcaccctttcgaagcagaatgctccggtgtccaccagttcccgcaccgctgccagatactcctgctggagtgcggcggcagcgccgattcctcccgagctgcccccggaggtgagggtgatctcccccaccttgaggctgtcgggggtctggccggcgcccagcagacggtagcggtaggctgccatggcggcagcggcagccgaaaggcgttcccggttggcatccgaagcggggtccacaccgggacggagccgtccggtgagttcggcgatggtgctgcggcagagcaccgcccagccggcggcctcctcctcggaaagcccggtaaacagcccgaacagccgcaaaacctcctgttcttccacaggcagtcctcctttctcactttctgaaacgggggattattccttgatcttcagcaccttcaccgcgtcgggatagagcttggcaaagccggtgatgcaggtgatgcccacccgttcggtctggcagtcgatgaccttgtcatactccacgcctacgccgccggcggtgaccatctccagggcacagttcttgtccagggcgatgacggtgtccgcaggcacagccgagctcttgagcagcagggcgccgaagggagtggcataggtgccgggggcggtgaagcggttgccgtctcccagctggcgcagttcctccagcgagaggatcttgttgcccacctcagggttgcagagcagcacattcatctcatagtcctcgaacttgccccacagggtgcagaggtcggcataggtcagggtgccgctgccggcggtttcgatgacctcggcggggttctcattgccgtcgccctcgatgagcaccttcacagcgtcctccacagcggtgcgggcgatctgggcgccgatctggcgcagggccaccgcaaagaggtccagacgctggaagcggatggcctcataggaggccttgaggatacggccccgcttgcgcagatgcaccagattctccttcaggcggatctcggtctcaggcaggaagccgccctcggcaacatcggccagggtgcggtcggcggcatcgggcatgggcaggatggagcggtagtccatcgagtcgatctcggtctttgccgccacaatggaggagagaatatcccggctctgcatgccctgttccacggcggcgccgatgtaggcagggaacagcacagcgctttcgctggtgcggaagaacttctccaccgggtcgctggcgctgccgctcacatggatgtcaaagcgcttgagctgacgctcgaaggcggtgagtttttccaggtcggtgccgcggtagtcggcggaggggtccatctcctccagggcacggaagaaaccgcccctgcgctggtagagggatttgtcgatcttcatttcacggtaagcagacataaatcagttctcctttcgtcttgggtgcagcaatcagagcaggatctcagcggtcatggcagtggaatccaccgcggtgaccaggacagtgcgtccgccggcttcggtggtcttgatgccgccggaagcgtccgcggcgagcatatcatagcccagggtgggggcgccgccggtgtaggccacggtgcagatgcccgagagctgtaccagggccaggccgtcccggaccgacagcaccgggccgatgaaggcttcgccgtccccggcggcagcggcggtatggtttgcggaaatcttggcgagaacgccttcggtgaggccttcggcggcctcgagggtgacatagccggtgccataaccattcagactgatgttcatggaaaaattcctccttttaattctgggtggaccgttccagacggaacggacggtttacagagtcggggtcagaagcgggagccggatcagacggcagatcccccagcagctgggagagaaccggcatccggcgggacgccgccttctgcagggcccgggtgtgggtgatgagcccctgggcggagagttccatcgcctgggcacgggcagcctcctcgggcagttcgggcagggcgatgagggaacagcgcacatattcctcccgcagccgctggaggtatgcttttcccagttccagcagatcgctgtccccgggggccgcagcctcccgatgggtctggcggacactcttggtcacaccggcaaggggctgggcaggcactgccacaaagctccattcataggcgtcggtggcggcgcagtggatcacatggcaggggatctccccatagcgtttgccccgctggtgggagcaggtgccggcgggttcgccgcacaccgagcagacactccgggaaaccgcgcagctcacgctcacctctttcttgatgccggcgtcgatctccgcgatgagcccggcagtcttttcattgcggggcatgtagatctcggcacgcagcgccgtatagggttcaccgcagttggtgggacggctggggtcctccaccacccgggcggcaaagatgcgggcatgctgtccctctgccgaagcccggtggtcaaagacgccggtcactcccacaaagagctctgccagctcccggagacagtcccgggaaaagcgttccccgtcccggtcgatctggttgtcgcacagcaccgccgggaatacatacagttcctccggggcaaagtcccggcgggtgtaccggcggatctgttccagttcggcctgggtgggggtgccgggcagagccgcagtggtctcactcatacaatctctcctttctcagtcagctgttcttccagtacagcggcacgggcgttgtcatagcgggcctgagccagttccgctgtatcctgcaggctgatgtcctgccactccacggcaaagggagccgtatggccccacagccgcagatgggtatccaggatacgccgcagcaccggggtgagcagactgcggtaccgttccagctcgctggtgagcaggtcggcctgctgtttgctcatgcgttcggtggtggaccagtgcagtcccagcaggaagggcggtacgcccagtttggcgatgatctgttccagcagctggcgcaccggcacttcggtgtcgaggatggggctgtcggcgccgatgacccggatctccacattgcccaccgccacaaagtcgctgacactgccgctgctgccgtccatggcagcccgccattcccgagccatggtttccgccacctcccggggattgatgcgttccccttcgccggggcggtaggtgacagcatagcgcaggcttccggcccgttcaaagttctgggcggtggagcgcaggatctgttcccagacccggctcaccgcttccagcccctccagtaccgagtgtccccatacctcaccggcatcggggtccagcggggtgtagaggatcagttcgggccagcgcacctcctccccgggcagaccgtcccgggcggcatagaaccgcagtcccacgccgttttcggcccggcgcaccgccagggattcggcgggacagagcagcactgcccccaatcccgagccatcggcggcggggatcatctcggctacggctgtgccgtcggtgagcaggctgttcaggtactgttccagaaagccccgcagtccctgccgcccggcgccgatggcgatttcccggcagaaccggcgcagttcctcttccaccagcgcgtcatcgctctgcacgataaattccccggtgagccggacgatcttgtccagggcggcgtcggctaccggcaccttccggcggatctcccggcagagccgccggcgggcctggggcagggcagaaccggcccagtcgctgtcccggctccgggcaagctgcagcacagccggctggggagctctccgccagagccgggtgagtgtttccatcatgcgtaagttacctccttgtgcgttctacccgggcagcgcagaagcccccgggcttttcctcctgttcgcagtacatgacaaagtaccgcagatcgtccatggcatggtcctgttccttcaccgggcgttcgctgccgccgtcctcccagcggtagagggagaactcccggatgcactggtcgcaccccgggtcaaaggagagtttcccctcggcaagccagcggctcacagcggcgatgccctcccgcacccggttgtccgcccgcaccacccggaatacccggtggctctccacgcattcgatgaagctggcagccgatgggtcgatgaccaccgcttcaatgcgttcaggcgggaactcccctgccagacggcagagggcttcatagtgctgttcatcggtgcggcggctgccctcggcccgggcgtcataccagctctcccgcaggcggtgccatgccccgtcccagagcccccacagtcccatggacatggggttgacggtgccgtagtcgcagctgatcaccagccgctgccagtcccggtttccggcgggagccacatgccgctcggcggagaacatatcatagatccgtccttcgggggcggtccactctcccagcacgaaccgttcatagaagcgtccggtgtacatccgctcataccggcggatcacctggggcgagagggcgggattgtcctgcatggtgaagtgcaggtagagagcccggcgctcctcggctttctgaatccattccttgtagaaccagtgttccgggtgttcggggttgcaggagaaccagaaggttgccccttccaccgagcagcgggcgagagcctgttccacaaaggagcggggcatcagggccacctcgtcaaagagcaccccggcgagggtcatgccctggatcagcgaagcggaggattcgtcccgtccgccgaagaggtagacccgcaccgaccggcttccccaggtgaggtcggcatagttttcggagaagcgttcccggcagtcgatgcccatgcggcgcatgcgttcgaagagggggcctgccaggttgcgccggagggagcggatggtcttgccgcagagggcgatgtcctgtcccggctgacagcagagcgcccaggccaggaaggagagcccggtgcaggtggtcttgcccgagcgcaccgctccatcgcagatgatggcgtcatacctacggcgcagttcgggggtacgccaccagcccagtacctgccgctgtttttcggaccagcgcaccggggcagcggaacggctactcatctttcccgccattccaccccgaaagccccagttcttccagcaggttgtcgccgccggggccagccagttccagcagccggtcgatggcctccagacggctgtaaaaggagagctccaccccattctttcccagcttcacccccgagagctggtaggggtcgatgcccgccagttccagttcggggctgccgtcctcccgctgggtgatgcgcagctcctccaccggagcgcccgaagctatgcggcgcagctggcgcaccgcttcccggcgcagtttttcccgatccatggcgtcacctcctttcccatgaccggagcccctctgtccggaggagggacagaaggcgctctcatccacccccggaaaaacaccaaaactgcgcagaaaaacgccccgaaaccagccctttcggaaagttttccggggttttctcccttttgccgaaaacgaacatttgttcgcattcaaaaactgtgcagcctgccgatggaaaaaacgccccgccttgagcctgacccggtcccgtgttatactggggagagaaacactgggaggtaactgccatgtccgccggactctatctgcatattcccttctgccagaagcgctgtgattactgcgacttctataccatggcgggacggggggatctctttgccccctataccgccgccctgctccatgccctggacaccgctccgcttcccaggggcagccgggtggataccgtctatttcgggggcggcacccccaccatgctgggtgcggaccggctctgtaccgtgctggagggcatccggcagcggtatgacctcgccccggacgccgagatcaccctggaggccaaccccatcgccatcacccccaaaatggcagccgccctccggcaggggggcttcaatcgcatctccatggggctgcagtcggcaagcccggcccagctgcgggatctggggcgtacccatacagcggaaaaggccgcggaggcggtgcagatcgtccgggcggcggggttccggaacctctcgctggatctcatgctcggcctgccccaccagacggtggaggaggtgctcggctccatccggttcgcggcggagctgggggcggtgcatctttcggcctatatgctccagctggaggagggcactccctatgccgcccgctataccgagtcggacatcgacgaggagacccagcggcagatctacctcaccgccattgccgagctggaacagctgggctttcatcagtatgagatctccaactttgcccgcccgggcttcgagagccgccacaatctcagatactggcggtgtgaggagtatctcggcgttggcccggcggcggcgtcctgtctggggggacggcggtttgtctttccccgggacatcgatgcctttctccgggcggaaaacccctggtcgctctgtgaggacgagggggaggctggttccccggaggaacgggtcgccatggcgctgcggctccgggaggggctggactgcaccgccctggaagcggcctgtccggggtatgacgccggagcgatgctccagcgggccagccgtccggaactgcgggagctctgcaccgtcaccggacacaccatcaccctcacccccgaaggctttttggtggaggggtcgcttattcccttcctgctctggggataatgatctgttgtttggctgtccacacggacagctgagcgatatagctgcgggataaaaacactgcccggttggtagtccgggcgctgccggggatttctccgggcagtcagtaacctgcctcctttggttgtccgttcccgcttcacacaccggcactgccggaacaaaaaggaggaagcggatatgctctgttcgcgtttgactgtggaattttccccgccctggtgggtcgggacgctggagcgctgggaggacggccggtatgaggtcgggcgagtggtctttggggccgagcccaccgaaccggaggtacttctctgggtgctgcaccggctgtcccggctgcgcaccactccggcgatggaagcgcctgcccgccggcctgaggcacagaaccccaagcggcggcagcgtcagattgcccgggagcagcagcgtccggccggaaagaaggcctgggcagctgcggcagcgggacgggaagccgaaaagcagacacgccgtcagcagacggcagaggagcgccgggaggcagcccgggaacagtaccggctgcaccggcagaagcggcagcagaagcaccggggacactgatccccgtctgaccagctgtgcaaaacaccccggcggggacgatccctgccggggtgttttttatctcctgcgcaaaaatttacaatcccctgcttgtacccctgccccaaaacccgtatgataatagaggtactttttttaaaaggaagggattaccatggcaatctataatcccgatgcccccaggcgcctgcccctgtcccggcgggagaagtttctccgggcggtgggtgccatcgtgctgctgggcacaaccgcctggctcctggcaaactggggcagcctgccggtgcgtctgccgtcccattatggctttggcggcgagatcgacggctggtcggggcgcggctccctgggactattgctgggcatcggctggggaatctggctgctccttctggtcacccggcacttcccccgggggtggagcttcaccggccttccggtcaccgaccgcacccgtcccatgctctatgccctgctgggcgagatgctcactgtgctgcagctggtcattgccctgatttttgcctttctcagtgtctggcctctcaccttccagccccttcccggctggtggtggccggccttcctcatggggcttccaggcacgcagggctggtatctctggcgggcagtccggctgggacgcaccccgcccagggagtgaagcccttgcacgggaacgcagttctgtgatatactgatttattagcatgtaagccattttggaaggcgaattttatgcaggagagaagagcttatggcaacacgacgcgatgatattcgcaatttttcgataatcgcacacattgaccacggcaaatccactctggcggaccggattctggagaacaccgaaacggttgcccgccgggatatggaagatcagctgctggacaatatggatattgagcgggagcggggcattaccatcaaggcccgggcggtaaatctgcgctatcatgccaaggacggcaaggattacaccttcaatctcattgatactcccggtcatgtggacttcaactatgaggtatcccggtcgctggcagcctgtgaaggagcggtgctggtggtggatgcctcccagggcatcgaagcccagacccttgccaatacctacctggcactggaacacgacctggagatcgtgccggtcatcaacaagatcgaccttcccgccgccgatccggagcgggtcgcccatgagatcgaagatgtcatcggtatcccggcgctggatgctccccggatctctgccaagaccggcctcaatgtggaggaagtgctggagcggatcgtcaccgatattcccggcccgctggataccagcagtgaaccgctgcgggcgctgatcttcgacagctactatgacagctaccggggagtcattgtctatatccgtctggtggacggcaaggtaaagcccggcgaccgtatccgcatgatggctaccggggcagagttctcggtggtggaggtgggccacatgggcgccacttcgctgatcccctgcggcgagctcacctcgggcgaagtcggttatctcactgccagcatcaagagcgtggcggatacccgggtgggtgatacagtcacgctagcagccacaccggcatcggaaccgctgcccggttaccgcaaggtcaatcccatggtcttttcgggtatctatccggtggacggcgccaagtatcccgatctccgggacgctctggaaaagctgcagctcaacgatgcggctctgtcctttgagccggagacatccattgctctgggctttggtttccggtgcggcttcctgggactgctgcacatggagattatccaggagcgtctggagcgggagtacaatctcgatctgatcaccaccgcacccagtgtaatctataagatccatctcaccgacggcaccgatctggagatcgataaccccaccaattatcctgacccgtccaccatcgcgtcggcagaggaacccatggtgaaggcgagcatcttcaccccggcccagtatatcggcaatattatggagctgtgtcaggagcgccggggcgagtatattgataccaagtatctggataccgaccgggtggaactgcattaccggctgccgctcaatgagatcatctatgatttcttcgacagtctcaaatcccgaacccggggttatgcgtcctttgactatgagctgtcgggctatcagccttccaagctggtgaagctggatattcttctcaatggcgagagtgtggatgccctgtcctttattatccatgcggacaaggcctatccccgtgccagagccatggtggaaaagctcaaggaacacattccgcgtcagatgtttgaagtgccgatccaggcagccattggcggcaaggttattgcccgtgaaacggtcaaggcactgcgaaaggatgtacttgccaagtgttacggcggcgatattacccgaaagaagaagctgctggagaagcagaaggaaggcaagaagcggatgcgtcagtttggcagcgtagaagtgccgcaggaggcattcatggctgtactcaagctggacagctgaggaggaacccgtcatggataaggaaaccatcgaaaaattcgacctccggcagtttgtaaagagctggctgctgccgctggctgcggagattgccattctgctggtgatcttcaattttgtaatcaacatcacctatgtgcccaccggcagtatgatccccaccatttcggagcacagcgtgctgatctcgctgcgggagtacaataccgatgagctccagcgaggggagatctattccttccacagtgacgagctgggcaagacgctgatcaagcgcctgatcggattgcccggggaaacggtgcggatcgaaggcaacggcaatatctatatcaacgatgtccgcctggacgaaccctatgtgaagaaccaggaatacggctataccgggacttttgaggtaccggaggactgttacttcttcctgggggacaaccgttccggttccagtgatgcccgctattgggataacccctatatcgaaacggaggatgtcatcagccgggcggtattcaccatcttccccttctccgacttcggcttcttggaatagcagaaaaaaagcacccttggatcagggtgctttttcattgtccggatcggggcggcctttgccgccctgggagaaacgggcccggcgcctccccttttaccggcattcgcccgagtgatgcccgccgcaggtgtgctcaccgcagtcatgctcgccgcaggtatggccttcctcatggtgatgattgcaggtggtgtccgggtcaaaggccaggtttccggcagccagctgctgtactgctgccagggcgtcgccggatacaccgggatagagctcgattccagcctgagccagagcggtgcgggcgccggcgccgatgccgccgcagatgagcttttcagcgcccagactgtgcaggaagccagccagtgcgctgtgaccgctgcccagtaccggaaccacttccgagcggatcacctgtccgttttccacttccgccacgaggaactgccggcagtgtccgaaatgtccgaagacctgtccattttcatatgttaccgcaattttcattgtatctgatcgctccttgttcggtttgtccggctgtgcgggccgggcttgttagcttcatcttactcctttgtcagggtcctgtcaagcgagccttgtgagaagtgacagatttcccgctgtattttctccataatgccaaaattccccgggcaggggtcaattttatgaaagaagggcatctttcttcttgcaaccatggatcataggattgtataatagaggaaagatgcaggagagccgggtgttctcctgcaaaatcacagaaaatgaggtgcaatgatccatggaaaaactccgcgtgctgtttgtaggcaacagccatactttcttcaatgatatgcccacgatttttcagatgttctgccgggaaaacggtattgacgctgaagtagtcatgcaggcacatccgggtgtacatctgagctggcatctgtcccagcagtgggaactgcggtacggactggtacagggacattttgattatatggtattccagcaggcagcgcatccctgtccgcccatggaggagaccctgcaggacggcagcaagattgtagagctggcccgggcacagggtgtcaagcccattgccaccatcacctggtgcgagcgccgcttcccggaaaaccagcagaagatgtatgagatctttgatgctctgcgggaaaagaccggtatctgctgttcgccggtgggccaggtataccagcgggtcgagcgggaggaaaaggacattgacctctattgggtggacggcgaacatgcctccatgtatggcagctatgtaattgccgcctgtgcctttgcccggatcaccggcaagagccccatcggcctgccctatcgttccatctgcagcgtgcccatggaccgggagaagttcgcccaggtcagcgagctgcgccgtcaggccgaagccgaagccgatcccgccaaaaaggaagctctcaccgcccaggccaaccagctctcggcggaggctttcactcccatctatgaccgggagaagctgtgggtggatctggaagcggacaaggctgcccgtctgcagaagatcatcgcagaggaaatcgccaagtatgacgcagcccatcagggttaagaaagcgatccggacaatccgttcccatctcggggggcggattgtttttttgccggagggatttgccccggcgcgcaaatcgtgctacaatagacccacacaccccacaggaggacagaaccatgattttatcgggaaaggaaatcctccggcatctgggcaaggagatcatcattgagccattcgaccccagccggatcaatcccaacagttataatctttcgcttgccaatgaactgctggtctatgaaaacgacctgctggacatgaagaccccgaatcccacccggcacatcaccattccgccggagggactggtgctggaaccggggcggctgtatctgggccggaccaacgagttcacccgcaccgacaaatatatccccatgctggaggggcgttcctccaccggacggctgggactgtttatccatgtcacagcgggatttggtgatgtcggttttgcgggctactggacgctggagatcttctgtgtccagcccatccgcatctatccggatgtccagatctgccagatctattaccatgacattgacggcgaatatgagccctaccagagcggcaaataccagaacaataccggtatccagcccagcctgatgtaccgggattttgagaagtaagcgccggaaacagcacacgggagattttccacaccccgccgtggagcaggtggaaaacctcccgtgtttttattctgattcggggctgtattctccgcaccagcgctggctgccaaatacactgcccggcttgccctgggggtacttgccgcagatgccggatttctcactccggtgccggcagtcccggcagatcagctcctcattccgtgtgagcctcgggacagtccgttcgtcccattcaaaccgggacacctcccgttttgcttcgcccatatccttccctcctgtttctgtttcgtccgccggggaaccccctccggcccacagcaccgcagtccttcgcaaggcccgcctgccccgcaaagcccaccgctcaaaccgctgcccgccgccagcttccccgcacacgggaaccttcgccagcccacagtgccgcagctcttcgctcagcccgcctgttccgcacagcccgcctttttccacaccagactgccgccgctgtggaaaatcacacgccggtgtcctcgatccagtggatggggtggctctcccagtagcctttccacacatagtccgccggttcggtcaggttcagctgatagaaccggaacgccacccattcctttttgggctccacccgctcccggtaggtgtagcggtaggtcatgccgatattttgcatcacgccgccgctgcggggattgaggacatcatgggtcgccgtgagaaagggcagtcccccgtccctgcacacctgttccaccaccgcccgggccgcctcagtgatcagcccccggtgccagcaggccttttccagtccgtagcccagatcgtgcgcctctccgggggcgatgttcacatagcccaccgggcgttccggctcctcccgcagacagaccgcataccgccagcccgtctcggtgcggtaggtgtccaggaaccgctcccacaggaacttctctgcctccgccagcgtttccaccgggaaccagggcaggaagcggtttacctcccggtcccggagcagctcccacagagccggggcatcttccggcacaaaccgccgcaggatcagccggggtgtttccagccggggcgtgttgcgtggattttccatctcagatccctcctgttctgtctgcatcctaccatgttttctgtccccatacaaccctcccatacgcaaaaagagcttcccccatcccgagggaagctcttttgttatacaatcagatatatttcgccaggattatacacgatgcatgagatcggtataggtaggcatgggccagcaggcgctgtccacatgggtttcggcgtcatcgcagacagcccggagggcatccattctcggacgcaccagatccaccatggcacgggccttttcggcggcgcagccggtctgttcagcggcctgaacggccgcagccagttcccggttggcccggataatgccgctgacatcttcggacagggccgagatctgttccttgagctcatcgttatagaggttgagctttgccatgttctcataggagcctgccagatcaccggcatactttgccacagcgggaaggatctggcgttctgccatttccatcatcacatgggcttcgatgccgatcaccttttcgatgccttccacgaggatctcataccgggattcgcactcgggacgggagagaacctgctgccgttcaaagagggcaatgttcttttcgtccaggtaagcgggagccacatccagagcggtcttaaagatgggcagaccacggcgggctgcttcttcctcccactccttggagtagttgttgccgttgaagaggatgcggccatgctgttcgagggtttcacggatgatggctaccacagtttcatcccgcttttcagggccggcctcttccagacggtccgcgaactgctggaacacatccgcgaggatggtgttgataaaggcatccggcacagcagcggactgggtggaacccaccatacggaactcgaacttgttgccggtgaaagcaaaaggcgaggtacggttgcggtcggagtcgtccttgaggacgccgggcagcacgggagcgccgatgcgcatatagctgcggtcgccatgaaccatgttttcgccatgggcagtcttatagaggatgctgctcaggtagtcgcccaggaagatggagatgatggccggcggagcctcaaagccacccagacgatggtcgttgctggcggtggcagaggagagacgcagcaggtcggcatattcgtccacacccttgataaaggcgcagaggatcagctggaactgcaggttctgctccggcttcttgccgggcgagagcaggttgatgccgtcatcggtcaccagggagtagttgtgatgcttgcccgagccattggtgccgcggaagggcttttcatgcagcaggcaggccagacccttttccttggcaaccacccgcagtacttccatcaccagctggttgcggtcgcagtccacattggcgatgtcaaataccggagccagctcatgctgagccggggcagcttcgttgtgttcactcttggcggggacgcccagttcccacagccggcggtccacttcatgcatgaagtcggagatccggatgcggatgcgtccgcagtagtggtcatccagttcctgggtcttggcgggcttggcgccgaagagggtacgtccgcacagcttgagatccaggcgctgttcatagcgctgacggtccaccaggaagtactcctgttcattgccgcagtagggggccagccggcgggaagtggtgttgcccagagcccggagcagccggatgccctgcttgttgagggcagccatggaacgcagctgaggggttttggtatccagtgccagaccggtataggaacagaaggcggtgggaataaacagggtctgatcccggataaaagcgggagaagtggggtcccaggaggtataaccacgggcttcgaaggtagcacggaggccaccattggggaaggcggaagcatcgggttcactctggatcagatccttggacgagaactccatgataacattgccattattattattatcaggcataatgaaggcctcatgttttccagcggtgatattggtcataggctggaaccaatgagaatagtgggtggcaccgttttccacagcccaatcgcgcatggcagcagccacagctcctgcgattgtactgtcgagttcggcacccatgcgctgtgtaagtttcagactttcatacacatcgcggggcagtctttgggacattacagcatcactgaatactttgatgccataggttttgctaatatccatactctgtcttcctttctgcttgaaaaataataatggcaaatgatcagacgccggtgaacccggtcatctaatatccatcagtatactacattttattttgtttgttaaggaaaagttttgaaattttgaaagattttttcccatagcgccgggattttcggaaaacagaggcacaagtctgcatcaagggggataaaatgcaggaagtccttcaaatcagcaatcgagcggtgatattgacaagcgaaagccgggtcgttacaatgaaagcagagcaaaatactctcaaatcccaggaaggaggtggacggggcgatgggggaactatactggattgcgttatcctatcatctgccgagtgattcgagcaagagccgggtttatttatggcggaagctgcgggaactgggcgctgagaatctgcggccggggattgcggtactgccccggacaccggagaatctgcggcggatgcggcagcttctgcagaagatccgggagatggacggcgaagggacgctggcagagatgcgttttctggaggaatcagcggaacaggcgatggtggagcagttttcggcccaggcccggagcggctatgaccgtgtgatccggcggggcatggagctgatgcagaagaagcccgactcccgggagctgggccggctgcagcgggatctggaacaggcgcagcggcaggactacttccataccggactgaccggggaactccggggcggcctggaacagctgcttcacgccgccggggagagcgtgcatgagtttgccgatgctttccgggagctgctggacgaaaaggacaactgaatccaaccgcacagcccctgagattctcaggggcttttttgcgccatacccgccagcggacgcatcatgccgcacaagcggtcacacgccgcccaacccgctgaccgccggccttcccgtaacacaggcacagacccacacaatccagccgcccagcccgctatcttccccgtcaccagcttccccattcccgcatggctctcctatccaagcccgctcccaaagcaaaacccgttacaccccacacttccccaccacgcaggcacaaacccacacgacccagccgttcagcctgctatctaccccgtttaccagctctcccattcccgcatggctctcctatccaagccctgcttcccccaaagcgaagcccgacacaccccacacttccctaccacgcaggcacagacccgcacgccccagccacccagcccgctatcttccccgttcaccagctcccccattcccgcacatctctccagctcctctgacccatataaaaatcccggaagcagaccgcctccgggattttttgttatatcaggctcagtgcgatccccatcacagcggaggctccgatgagcgctcccggggcaaggggctttttacgcaggcccaggctcgccagctctcccaggagcagcgcacccaggactgcggcggcaacggggtcagcactgccgccggagaataccgcatcggagcagagccccacacctgccgccaggatcagcccggccagacagggcttgattccctggagcgctgcccgtactgccggatagcccagcagactgcggaacgccgccgacaccagcagaatcagcacaaaggagggcagcaccacacccagggtagccaccagggcgccgggcagaccggcctctgccgcccccacataggttgccagattcaccataatggggccgggagtggattccgccacggctgtgaggttcgcaaacatctgcgcgtccatccagccatggctgagcaccgtatcccggatcaggggaatagcgccatacgccccgccaaaggcaaaggcgccgattttcagaaaggcccagaacagttccatcatgggttctctgccccctttccgacggagggctcccggaagagcagcacaccggcgattccggcgagaagcatcagttcgatggtggagatgggccagcccagtatccgggccagcagcgccagaccaaagcccgcagctgccagtccggtacggagcgaccgtccctggggctttttgcgcagcttcagcagcattttggcgccggcttccagaaccagcacagccactgccgcccggattccccggaacgcccactccagcaccggcagatccagcagttcctcgaagcagaagctcagcccccagaacagcagaaaggccggcaggacgatccccactgtcgccgacactgccccggcaaggcctgcctgccgccagccggtataggtggcgcagttgatggcaatggggccgggggtggactctgccactacggtgatgtccatgagctcatcggcggtgagccactggtgtttttccacgcactcatggtcgagcagggcgatcatggcatagccgccgccgaaggtcagcgccccgatccggaagaaggcccagaacagttctcccaggcgcttcattcttccatctccttgtgggtatggcattcacaggcttcggggccaggacagccctccggcttctccggacggcgacacttctcatggggacggtgctcctccgggccgtgtccatggcacccgcactccccgtggggacgatgctcctccggctcatgcccgtggcacccgcactccccgtgggggcgatgctcctccgggccatgcccgtgacaaccgcactccccgtggggacgatgctcttccgggccgtgcccgtggcatctcttgcggaagccaggttcgcccatctccgctgccagcatgtgccgccgtccgcagccatgcccgggctcctccatgggcgccttccgggcagcctccgccagctgcatgaactgttcgcccagctgttccagagcctcgggcaccagacggtagtggctgtgatagcccagctttttcacggtcaccagtccggcctcccgcatcacccgcaggtgctgggacaccgccggttcgctgatgcccagcatccgtgccagagagcgcacacagtactgccgccgggtgagcagttccagaatccgcagccgcatgggttcaccgatggcccggatcagttcttctcgttccatagttgtttcctccttgggattttgttctgtccccagtatactgccgcaatctatttaagtcaatacttaattaaatatcccacaaaaaaggacagggcccgttttccggaccctgtccctggattcatgcttcggtgagggggaaccactggtactgtgccgggccctcatagccccaggcccgggtcatcacccggagcgtctccccttccccggggaatacacccacaatgccatatcctccagacataaaggagcggaagcccgccgattcaaactggtcgagcaccgtataccggctggaatcctccttgtccgggaaccacagcactgccgcatgggcccagctgtcctcaccggcctcctcctgcgtccgcttgtagccgccgttcagcgccagtaccacgccgaattctccctgtaccgcctcggttacctccatgcagtcagggtcaatgccccgatccgcacagtagtccccggtcacttccagcagagctgccgggtcagccaccggttcattttccggccagtcggttacggttccgggaattgcgatccagttctccccatggatctgatcggtcggctctccctgcccttcagcataaaacgacacaatgttataatcggggttctgtcccatagagagccgggtctgccgaagaccgtcctctgtccggatggtccagtccacctgttccagagccggcaaggggagatcctccgtttcccaactgtatgcgtctgccccgaagagcgcctgaccattcaccaccacgacttcttcttccgcaagatcccagcttgcctggtagagttccgcccggctctcgtcatagggttcgaattccagcagagccatctcctccggcaggaattccgccagattctccccgggcatccgcaggaagaagcggttcttctgaccagcatagtagttggtgtgatacagatattccgcccactcaggcagcaaaggctcaaggttcaggttcatcagctggaaaactccctcagggctatcgtcattccacttctcaaccaccactaccggcccggcgccggtctgtaccactgtgtcgttcacatcgcccagcagcgttccatccagacccacggtgtaccaggtgatctcctcgccctcgtccttccggagctgccccaggccgttatcgtcaaagtcatacccgaaggcatattccgccggcaccagcaccgacccatcggcggcacggatgccatagctgccgttctcctcatagaggtaggggcgttcttccggcatgggaatgagggacggagcattttccagcggtactgccaccgctgccgcctttgtcccggaggactcagccttttccggttctgccatactgttctgggagctgccggagctctccggattctcctccggtgtgcgggctgtacagccggtgaagagcagcgccgctgtgagagccagggctgctgcccggatcaaagtctttcgtttcatgggaaaatccccctcctgttctgatttttacgccccagccgatccgttccggcagaccagctgttctctctcccaggcaagataagcctccagttccggctggcagagcttccagcagcagtccagtacagcggcgtcatcggcatagcctttaccggggacactgtccggatagagatcccagggcgatacaaagtagagcagtgcgctgaccacctgggccatggcagcggcggagatggcagtgtattccccatccagataccggcgcaggagacgctccagcaccggcacagctgccagcggttctccgacggtgcacaccacctcttccttctcctccagacggagcaggaattcctgcatctggctggggctggcaagcaggcgctgggcgtccacatagccgcgctgcagggctttccgaacggttttttcctcaaatcgtcgttccatcgtcctcttcctttctgtccagactgttgcaaagccgcatggaaaaggaaaaactccactgctggcaggaacccctccggggacagccagagaaaccctcacccgggtgttcccttctgattccatcatacccgcttttccagagaaaggcaaggtttccccgggaaaaccgcccgcaaaaaaagagccctccgaggaaggctcttttttagtcggtatagaaagggaaggctttacccccgcacctggccctcgcccagcaccacatacttgtaggtggtaagggcagtcaggcccatggggccgcgggcatggagcttctgggtggagatgccgatctcagcgcccagcccgaactcgaacccatccgagaaccgggtggaggcgttggcatagacgcaggcgctgtccacacccagc

SEQ ID NO: 3012 - DNA, 14196 bp, Unknown
  16S sequences of unknown bacteria
tgcagccttttcctgggccgtaaataatgcatccctccaggcttcaaagcagaacggtctctgctcataccagccatgttctcctgcagtcagcaggtgctgggaaaaatcaaacatcgtagagaaatgcccatgttctccgataaattcctgaagttcttcttccttcatgttaaatacttcacctacggtgaacgtatcatatttctggaaggtatgcacctttagctcctccagcatctcaccgatgccagacgcacgggaaaccacggtatccgcagaacataagccatccggcccatccgccggataatcaggaaatgtggtatccttctgaatattgatgatggcatcaatacgaaatcctgcaactcctttttccaaccaccagttgatcatctcatagatcttattccgcagttccgggcagtaccagttcagatctggctgttccttggcaaatgcatgataatagtacaggtcttctctgccaggtaccggttcccacatactcccgccaaaataggagcgataattggatggcgcatgaccatccttcccttttcggaaataaaaatatttcccataaggaccttccggatcacggatggcttcctgaaaccacttatgttcgctggagcagtgattcaccaccagatccatgaccagatacatgccacgcttcttcatctctgcaagcagcgtgtcaaaatcctccatggttccaaactccggcgcgatctcataataatcagagatgtcatatccctgatctacaaacggtgaacgatagaccggtgacagccagacaatatcgatgcccaatgctttcagataatcaagtttagagataattccctggagatctccaattccatctccattggaatcataataacttttcggatagatctgacaggcaatcttgccatgccaccattttttctccatcgtttcaccttcgctccactttgaatgttacagggagcttactttacaatgttttcaatatcattgaacagactggcggaagcttcagatacagaattccattccgcactccatagaccgcatcgttggtgctgaatccattttccagagtcagcatcagacgttccatggtacaaaacggcggaacagatgctttccacaccggaatgttcacttcccgctcttctctggaattgttgactaccactacgatctgattttcctcatcaaaccggccatagcttaagagctgatgctccagtgacaagaaacaagtggaaccatacgtcagtactggattgtctttatggatacagattgcttccttgtggaaggacagcagctcctgatcctcttttccccagggataggtccgacggttatctgggtctgtgaatccgcacacgccggcctcatctccataataaacagtcggtgctcccacccatgtcatctgcatgacaacagcctctctcatgacacctttatcaatcccctgagatgccgcatcagaacccaatgtattcattcttcccacccggcggttggttctggtcaggaaccgggaatgatcgtggttggacaactcattcatggctgtctgcagggacggtcccggcatatgagccatattgtagatcatggaattcttgaatgcttctgcatttccatagagatcatctctgcgggaatcgctgtgcttctccataccagtcaaaaaccaggtaattggatccatgaacgcatcataattcatgaccgtatcccactcatctccacccagccaacggctggtatctccgtaatgctctgcaaggatcagcgcatctggccgttctgctttcacagctgcccggaattccttccagaatttgtgattgtattcttctgtaaaaccaagatcagctgccacgtcaagacgccatccatctacattgtaaggctctctgacccattttcgtccgatattaagaatgtattccttcagttccggagactgctcataattgagcttcggcagagtgttgtgtccccaccagccttcatagaactcattatagggccattcatgctcattattgaaccggaaaaaactgcgatacggactgtctgcggagacatacgcacctttttcataatcctcagactgttcatagatccgttctttatccagccacttattaaaagagccacaatgattgaacacgccatccagaatgatcttcattcccctgttgtgtacttcctggacaaattttgcaaaaaattcattgctggcttccagatttttcttatttaccacccgctgctgatacttggtcgcatgggtgttatccttgtcaccttctgccagacactccccaccatcttccacgatcacgccaagatgcggatctacataatcgtagtcctggctgtcgtatttatggttggaaggagatacaaagatcggattcagatagagaacttccacgcccagattctgcaggtaatcaagcttattccagattccctgaagatcaccgccatagaagcgccatacatccatagattccggaagagtttcccagtccttcacctgatgaactggctcattcagatacatatattcccgatcctctacgtcattggtcagatcaccgttgcagaaacgatcggtatagatctggtacatgactgcacccttcgcccattccggcgtggaaaatcccggaatcagcttgaaggaatacacattctgaagatctgtagtcactcccaaagtattataaaaacatctttcattgtctttatcaatttcaaaataataacggactgtactcatcaaaggtgcggtccgataggtgtagtaatcaaataatccccgggatgctgtcttcttcatcagattacggctgcttccgctgataaaatagacttcatccacattatcttttgctgtacggagtgttacggtcacccggtctccgcaatgcggttcaaaagggctctgataatatttgctctgatcactgaacagtgcctccctgttcaatgtctgctgtgtcatttccatagttgatggtccctttcccatgttctcttattacttatgatatacccactgcccacttaaaacaaccattttccaaaaaaggacagcaaaaaagacagcggggggtgtgctgtcttttttaggagaaggtatttcttgtttcttatggggtgtagcaaaactatataatgtattggggtttttacaataattatagtatcacaatttcccgccgaagtctgcacaaagttcacaaaattgtcaattcatttttattcactttgcacaaaaagtgcttcaaattcttctcgagtgatcttttccttttccagcaaaagtgccgcacaggaatccagtaccgggcgatattcgccgatgatctttctggcatttgcataacactcatccacgatccgtttcacttcgctgtcgatctcaccggccacggtctcgccgtaggatctggtatgcgccaggtcacgtccgataaatacttcatcctcatcatttccatagttgatcagacccagcctctcggacataccatactgagtcaccatggctcttgcaagcgcagtcgcctgcttgatatcctgagatgcacctgtcgtaatatctccaaagatcagttcctctgccacacgtccaccaagatctaccgtaatatcctgcagcatcttccctttggtgctgaacatgtcatcccgctctggaagcggcatggtatatccggcagctcccatacccgtcggaataatggataccgtatagaccggtcccacatccggcagcacatggaacaggatcgcatgtcctgcctcatggtatgctgtgatcttcttctctttttcagagatcacacggctcttcttctctgcgccgatacctactttaataaatgccttacggatatcctcctgcttgatatacgctctggtgtcctttgctgcaacaatagcagcctcatttaacagattttccagatccgctccggtgaatccggctgtggtctgagcgatctgatgcagatccacatcatctccaagcggcttattctttgcatgaaccttcagaatctcctcgcggcctttcacatccggacgacttaccggaatcttccggtcgaaacgtcccggtcttaagatcgccggatccagaatatccacacggttagttgctgccataacgataatgccttcgttaacaccaaatccatccatctccacaaggagctggttcaacgtctgctcacgttcatcatgtccgccacccataccagtaccgcgacgtctcgctactgcatcgatttcatcaataaatacgatacagggcgcatttttcttggctgtagtaaacagatctcttacacgggatgctcccacgccgacaaacatttctacaaagtcagatccggaaatgctgaagaatggcacacctgcttcaccggcaacagcctttgcgatcagggtcttaccagttcccggagggcctactaacagtacgccttttggaatacgcgcccctaccttcgtatagcgtcccgggttccgaaggaagtccacgatctcctccagttcgcctttctcctcttccagacctgccacatcctggaagcctttcttcacatcatcaccggcagtcatctgtgcacggctctttccaaaatccagcattctggcatttccgccgccactgtttctgctcatggtcatgacaatatagaacagcatgataccgcctaaaagcaatgttgttccataagtctcaaaaaatcccggctgctttacttccgcaatatcataagcaacgccagcgtcatccagaagctcgctggtcttctctgtatccaggatctgagtcaccttctgggtgccgtcctttaactggtaagttaccgtacctgtcggtgtctcctggttgggctgaatactggcactttgaatctggtcttcctccaccgctttggtaaactgcggatagctgtatgatgcactgttctgtctctgctcgtcaaaaaaagccaacagcatgcagaccagtgccaaaaccatcagataagtaccgattcctctccactgtctgttcaagtctccttatcctcctgtcagtcaaattccaccacaccaatgtatggcagattgcggtactgctggtcataatccagtccgtagccgactacaaatttatcttcgatctgaaatcctacatactccacatccacatctacgactctgcgctccggtttgtcaagaagcgtacagatcttaagacttgccggatttctctgactgagaagcttcttcaaatgactcagagtacggccggaatcaatgatatcctcgataatgatcacttcttttccttcaatgctctcatccagatctttgacaatacgaacgatcccactggacttggtgtctccgccatagctggaacactgcatgaaatccatggttaccggtacagtaattctttttgccagttcgcaggtaaaatatacacttccctttaaaatgcagatcagatgtacactctttccagcatattctctgctgatctgctcaccaatctcacggattcttgcgtcaactttctcttccggaagcattacttcaatatgatgtttctccatcctttattcctccatctcttatctgttgtattttcaatactattttggtctgttctgtgatcttatattcttcactgatcctcataccgacgacccacaaaatatgatttccgtctgccagaacggtcagcccgtctctgctctctcttggaactttattgtcgatcagataatccttcagcttcttatgcgccccaggtccggttgacagatagtctccagggcgtcttgtccgcagaacaacttcttgtctgattttatcataatcaaaccacttcgtatagcaatttacaggaatttcctgatttttgtccctgttttccacggtcacttcatatcgtgctccctggaattcataagttcctgtccttccgcagaaaataataccgtcatcccggttgatgccgtatccttgcttcagtacaataccgtcatattccagcactgctgtgttcttcgatggcagcagtatcctgctcccccgctttccatatgccagcaggcagatctgctccacatgaaatgcctccacatcccgaaggcctccgggcagatgttccagtgcgcgccgcaccagcatcttcttcatggccggatgcagctcgtcaaatgcctccagccggattcggatacagtccttctccatctgcagatactgttcttctgctttgtgaagttcctgttccagatacgattccacttccgacaatcttgctgctgttcctgccatgcgggccacacagccgggcatgacccgctccataggcgcaagtaatccatgccggatctgatttctcgtataatccagctcctgattggtgccgtcctccacccagcggatcccctcttccaacaggtactgctcaatctgcggccgatccacacacagaagcggtcggatataatttccattgaccggacgcataccgcacagtccccgaagccctgtaccacgcataagccggaacagcatggtctctgcctgatctcgctgatgatgcgccagcgcgatcaccgatgcctggtatttctcagcaagatgctcaaacacccgccgtcttacatttcgcccggcttcctcaagacttaagccatctctggctgcctgggcaggcacatcctcctgtaccacagtaaacgaaatatttctctcctgacagaactgctcacaaaactgttgatctcgcagtgcctctgccccacggatcccatgatttacatgaactgcttccagctgaagcggaatccgcttcccatagttccacaataattgcagaagtgctgttgagtccgcaccgccggaaaatcccaccagcacggtgtccccgggcttgaccatattccattgtctcagataggcaaatactttctcctgcatgtgactgaactcctgtattttctatgctcattgctttgcgggcatgtgcatggctctgaatattatcacaaattccacgcaaaaaagcaagccgcactaccgcttccagattccgaccaccagaatggtcatatcatccgctgcctttccatatgtctgtacctgttccatgagccgtgccgccatctcagaaggggttcccggcggaagattccagatcagatccttcatgaccgcctcttcctgcccttccggcaatgctcccagcaccccgtccgtcatgagaaacaacagatttccatcatagatccgtacccgataaggatctaagggcagttcactgctgatccctgccggcagacctgtcccacggatacattccacattccgttcccgccggataaagctggcggcagatccaatcttcagaaattcacagattcctgtataaagatcaatggaagccagatctactgtggaaaatatatgtggttccggctgcagcacaatggacgaattgatcatccgcactgctgtctctctggaaaatcccgcctccagaaactgttccatcagatccagcactgtctcactctgcccgcaggcctgaagtcctgaccccatcccatcagagagtcctgccacaaaccgtccttccggcagccaaaatacggagaaattatccccggagactgcctctcccggtttcgtcactttcttgattccgtacaacacctgataagcagtggcctccacaaacaataccgtcactttctcctgactgacaaatgtccggctgtctctggcaggcatcatctcacagtccgtcagttctgacaataccgccgccactttctttactggcacgcagatcttacgcttcgtatgcatggtcacatagacttgtcgccttcgtccgccgggactgtaaaaaaatacctggatcaatgttattcccataaagcgaagccgctttccaatctcctgttccagcggcacatcttcttttgtcccatagattcgttccatggctccttccagtatggaacccatttcccggatctgcccggctgctgcgatccggttttctgccagcctccgctgaaacaataactctcctctgtctgtcaccggcgtcatctggggtgtcatgcaaaagctgcgggaaagctgagcaaaactctcctgatactcttcgatccattgtcggaccggatgcaccggttcctgctcactgtcttctcttttatggctgcggatccattcccacccataacctgccagcacgatcaacgaaaacagtgccagactcttcatcacactggaagccatgacccacagttccttgtggtacatatattccaccgtcagctccatggctgccagacttccacccaccgccagtccaaagatccacttgtctcttccttcgtctctcctgccaaacaggatcagcatacacactcccagcgtacacgccaacacatactttgtccattccatgacaactctcctccatatccttattccgccgcatgcagaacaaacgctgcggtttgtgtagatactataagaatctgtctttgcgagctttgtcatttggaatcggctcgaaaaaataatttttcgacataaaaaagctcctgtctgagcaggagcttcatgtcttatttacctgatgccttgaaaaggatctcatcctcataaaccagtccgagcttttctttggctacatcttccacatatttctttgtctttgtataggtctcaagatcttcgatctctttgcttcgttccgtctcatcggcgatctgcttttccagtgccgcctctctgttctgataagtctgattcttctgtttcagctgaagacttccaattgcagtcacacaaaaaacagccatgacgatcaataaaatacccatggctctcaggtgctttctctgatctcgaatacgtctgcttcttgtcttcgctgtcatccgtctttcctcctatgagaataaaataattataaactctctgagtttatttttcaatttgtttttgtagaaatgtcctgtgattttcccgacttgtactactttacgagccaccgttccagcaggccttaggaaaaattccaacactgtcttcaaaatacctgatatgggttccacgatccatcttcctatcagataataatagacgatcatgcccgccgccaccgcaaataatgcatacccgcggactgctccgtcattttcccgatacaacagtgcaaagattaaaaatgcagtgcagatccagtacagaagatcctgaaccgctatcagccagacaccatggggaatcagccttcgagtgatcctgagcaggtcgtacaatgccaggatcaacgcacctcgcagcatggccagtccaaaaaactgcagctctctgacaattccgtcactccccataggcttaccggaacagacggttcaataatgtctctccgccttttttgaagtctgacacttccgaatactggatgctgtcgatccttccctccagatcgatctctcctttttccagcgtcagccgattcacatgaaggtctgctccctggatcttgagcatgcccatatctgtctccaacagcacttccgatatatcaaaagagatcacgtccgacacaccagtgataccagctgtccgccgattcgaaagcgtcagcttgtgcgctccttttgcctgtgtgtgatcttccacagttcccatctttaccatacaaaaagacctcccatatattctcttaaaatatattaggaggtcctaagatttataccttataaatatctgtaaagctcttttgcttcatcctttttgacggtctcctgcacgtccagcacttccacctttacagctcttgtaccgaactggatctcgatcacatccccttccttcacgttcagggaagctttcgccgtcttatcgtttaccagaacacgtcctgcatcacaggcctcattggcaactgtccgacgcttgatcagtctggaaactttcagaaacttatctaatctcatgctctgtcgtattagttcagggcatctttcagtgctttaccagctttgaacttcggagctttggaagctgcgatcggcatcggctcaccagtatgcgggtttcttccctctcttgctgctctctcagctacctcgaaggtaccgaatccaacaacctgaactttctcacctttctttaattcatcagtaacaacctcgataaatgcttttacagctttctctgcatctttctttgtaagctcagcgttctctgcaactgctgcgatcagttctgctttgttcatgattttattttcctcctggaatattttcatttattgtgtacaacacgtatcatagttataccggttttcctactgtttgtcaagcggtttcccttggagttccgcggtttttcgattccgctttgcctctttttcctgccgcttgatttcctcccagcgagcctgattctgctcgtcggaaccatattcttcgtcgccaaatacatgtggatgacggcggatcatcttctccgccagaccatttatcacgtcatccatcttaaaaagaccttcctctttggcgatctgtgcatgaagcagtacctgcagcaatacgtcccccagctcttcgcagagattctccggatccttctgctcaatagcctccacaacttcttcacattcatttctaagacaggagatcatgctctcatgggtctgggccttgtcccatggacagccatggtcactgcgcagttcagcaatgatccccaccagttcttcgtaactgtacatcttcttacagcatcttctggatcatcgccagtacttcttctcccattgcagcactcttcttgtctgcatcttccagagaagtacctttgacaccatagtagaattttaccttcggctctgtacctgacggtcttacgcacagccatgcgccatcgttcagatcatagtaaagtacattggatgctggaaggccggtcggttttacttcaccagtcttcatatctttgatcgtatccagcttgtagtctcttgcagatactacatgataatcaccaattctgaccggcgtattatttctcagagtctcaaggatctcctgaatctttgcaagtccttcaatccctttgagttcgatagatttcactgcgtctttgtaatagccgtatttctcatagagagcaaccatagcatcccacagagtcatgtttttggtcttgtagtaagccgctgcctcgcagagagcaaccgttgcggagatggcatccttgtctcttgcgtatgtaccgatcagacagccgtaggactcttccattccgaacagatacgttccttttccggtctgctcatctttcaggatctgctgtccgatgtatttgaatcccgtcagaacctctatcagttcacagtcataggatgctgcgatcgcatctaccagattggtggttacgatggatttaacaacctgtccatctgccgggatcttgcctgcagccttcttctggctcagcacatagtcgcagagcagagaacctgacatattaccggtcagcggaatatattctcctgattttgtatcttttacatagactccaagacggtctgcatccgggtcagttgccagcaccagatctgcatccacttcctttgcaagcttcagtcccagcgtaaaagcttctgcagcctccgggttcggatagctgacagtcgggaaatctccgtcaggaagttcctgttcttttacaacatatacattttcaaatccaagctctttaagcgcacgtcttgccgggatatttccggtaccatgaagcggggtgtaaacgatgcggatgtctttctgcattttatcaatggcatcctgatttactacctgtgcttttacatgtgcaatgaatttatcatcgatcgcctgtccgatgatctcatatttgcctgctgcaatggcagcttcacggctcatagtcttcaccgtagacagatcagtgatcgccagtacctctgcggtaacgcctttatcatgaggcggagtaaactgtgctccatcctcccagtatactttgtatccattgtactctggcggattgtggctggcagtaatattaagacctgcgatacagccaagctcacgtactgcaaatgacagctccggtgttggtcttaaagactcgaatttgtatgctttaattccatttgctgccagtgtcagagccgcttcctcagcaaactccggagacatatgacgggaatcataagcgattgctacgccttttccctgtcctccctgcttgataatataatttgcaagtccctgggtcgctctacgtactacatagatgttcatacggttaatacctgcaccgataattccgcgcaagcccgccgttccaaattccagatccttgtagaaacgttcctttatctctttgtcatcatctgcgatcgcacgcagttcagcttttgtggcttcgtcaaaatacggattggaaagccattcctcatagattgctttatagtccattttgcacaactacctccctgatttttcgtattttctgggattattatataataattcatatgaaaaagaaactcttttttccctttgtgcaaggaatttctcaagtttctccatatgcttgcccggaatccatgctttattggtattatagtagtaatttgccagtttccagaatttctccggatacagcagacggattcccaggtattcccgttcttcctctgtgagtggccggacctcgctatatgttttcagcattttccggccaagtctggcatcatagttctgcttttccaatacctttctcatgaacaggtagaggtcgttcatctgcacatccacagaaaatttttcaaaattgatcacggtcatatgcccgcctgccaccagcaggttatgatgaatgtattcaccatggcagatctgcccttcttccaatgcctgcctgcgcagaacctcataagaagtctctttcagcagacgttctgcccgctcagcttcctcacgaatagatgaaaagcactgaatataggctgcctcaaattcatttttccggttcttcctgcggacaaacgtataaatcttccgaagctcctgattatgccgcgccagctcttctctggcatcaattcctgcaagacgctccacatccttccgctcgaatcccggcacctgtttcatatcccgatggagtgccgccagcagtgacaccgccgccaggatctcactctcactgcgagtgtcacattcccgtccctccggcgattctttgacaagataattcagatattcccggtaaaccgtcaccagccttccttcagcatcggcgatgatctgatctgtccgatgaccgcattccttcagatgcgccagaagctgctgctctttctctactttggcggcactgccggagaactcccggatcagcagacgcccctcgctgctatccagcaaaaatgcaccgcgcacccgccagcttgcatttacagaaaacggatattgctccagaacctgcagatctctctcattcatagaagtccccccatatatcggcatttcgtaccttctatcttatgaaggaaaggatggggttatgcaggtttttccaaaaaagcatgcaacacctccgtcacccgcctcagacagcttgttcagagggaccgcttgcgctaagtcctcgatccagcggtactaattttcaatctgcgcctgacggcttgatttcaaaaagtaccgggactgcggacgtccccttcacaagctgatctgtggcgaatgcaggaaggcaatgcaacgtgttctggatcaacatcgaagaaatcaacacacatttttccagaacaaaagctgacacaccttcacagcatgtcagcttcatttttataaatttatattttcttgataaatttccagcgcccggctcataagccactcacgctcatttttctcgggttcttccagcacttcttccagaagtttttcgagaatctcacccaggcgggggcctgccggaatttcttccgcgatcaggtcacggccggtcacagcaagctgcttcaatgtaaagcactgctgcttttccagaatctgctca

SEQ ID NO: 3013 - DNA, 18115 bp, Unknown
  16S sequences of unknown bacteria
cgcggggcgagcggggccttccggcgggcgcggggcgggccggggcgcggcgcggggcgccaaaggccgcgtgaaatgcctcggggtgtgtagggttttcgccgaaggtaaatccaccacaggcggggcggcgcgcaaaaaccccgtttttgcttataaggaagcgcgttttccgcccgcctttctttgtcgaatgagagctgttttgccccgaaaacattgtgcttttcatcgggttgctatttcggccgcgcagagtgatgaatgtgtcgcggccgaaaaacgggccgccgccgcgggcgggagaagccgccgggcaaaagggaggaaaccccgtgaaaacccagactttcggcattgaggtcgagaccaccggtctcggctgcgagcgggcggcacgcgccatcgcggcacacttcggcacaacggcccggtacgtcgggcggcacctgggcgactggaaggtgcccatgcccgacgggcggcactggacggtcgagcgcgatggctcggtcaccgacccctgcgccgaggtggtcagcccggtgtgccgctgggaggacatcgggatggttcaggaggtggtccgcgccctgcgcaaagctggcgcgaaggccgacgcctcctgcggcatccacatccacgtcggccttggggagcacaccccgcagagcctgcgcaggctggtgaacatcgtcaacgccaaggaagaccttctgacacaggcgctgggcatttcgcccagccggcgcgcccgctggtgcaggccggtggagccggcgttcctcgccgagctcaaccgccgcaagcctgcctccatggaggcgctggcacagctttggtaccgcaccaacagcggccgcccgggcacagactggcggagctgcgcctgcagccactacgaccacagccgctaccacctgctcaacctgcacgcggtcttttccaccgagcggcccgcgcacaccatcgaattccgtgccttcaacggcacactccacgcgggcgaggtcaagagctacatccaactgtgcctcgccatcagccaccaggcgctgaccaccaaggcggccagcccgacgcggcctgatacggacaaccccaagtacaccttccggtgctggctcctccggctgggcttcatcggagaggaattcgagaccgcgcgggaacacctgaccaagcgcctgcccggcaacgccgcatggcggcaggcttcctgacacaccccccgcctgacgaggtcccggtggctccgggccgaaaccggcgcgagccggtcgcgggcagccgcacactctttcaaatcaagcaaggaggtacacaccatgtacgagcatgactacgacgaatgcgccaacgaagaacagttcaccgaggaaacgctgcaggacggcctgcggcagctcatcaccgacggctatgacagctcggaaatctgctgggaaaacctgcgggtacagacctacagcgaggctggcctcatgacccgcgactgcgggctggtcatcaccctgcccgacgggagcgagttccaactgaccatcattcaaagcagataaagcacccccgcctgacgatggcctctggcacaggccgaaaccccgcaaggggtcgcgggagccgaacagttcccaaatcaagcaaggaggtacacaccatgaacaatgacatcgaattcgacctgcccgggtttctgcactcggaaatctacccgcacatggaaacaggcgagttggacgagtggtcccttgccgacgccattaaccttgcggaggacatccgcaaatacgatggcatcgactgcgacccccaggaaatctgggacatcttggcggagttcgcccgacaagacgcggaagaacaggaggcctgacacgctttcaaatcagacaggaggcacaccatgaagcgcatgaatcttgaagctcttatggacatactcgactggttcgacgatggcctgtacgactacatcgaccacatccttctgaccaaggtcgatggcgcggagcgtgtgcgccggacaatgcctcagttgcgcaaatacgcaagagagctggtcgcggcacacaggggcacggaaaacgcctaccctgaaggcatctgagcagcactcccaaatttagcgccggaaaggcacacataccgcttgactttccggcgcttcagagggatgtataccatcacgcccggagcttctaaatcaaatacacaaggaggacacagtatgtgcatcatctgcgtatccaaacccggcgttcgccagccggacgaaaacaccatccgcaccatgttctaccgcaacccacacggcgcggggtacatgttcgcccgtgacggacgcgttgaaatccgcaagggcttcatgcggctggacgaatacctgcgcgccatccgcgaagaacgcttcaccgccgccgacagcgtggtgtatcactttcgaatcagcacgcaggcgggtgtgaaccccgagatgacgcatccgtttccgctttcaaatcagcccgcccggctgcgcaggctcgaccagagctgccgcatcggcgtggcgcacaacggcgtcatccgcctgaccagcgacccggacaacgagcgttacagcgacaccgcgattttcatcgccgactacctctcccaaatcctgcgcacacgcgccgacctgcgcgaccagcgcaagctcaacaccatctaccaactggcgcaatccaaattcgccatcatggacggcggcggctacatcgccacggtgggcgagttcatccacgagcgcgggctgcttttcagcaacgcgagctaccgcgcgctcttcctgcgtaaacccacgctttgaaatcaaaggaggcatcatcatgcacacgatcataatcaaagtctggcgaggtctgatatccgaggtctacagtgacgaccccgacacggaggtggtcgtcatagacgaagacgtcgaatcgacggaggctcccgaaatcgagctgcccaagcacagggtctactgaccgggtggcgctcacaaatcagaattaccgcctgcgggcggttttctcgttgcgcggaattcgccgcacgcgggcgcgtgttgggctttgggatcggggcgggcaacgattcgcgcgagacggcatgcacggcgcgtggcggcaacgtggccgcgacacgggcaaacgccgacaagaaaagcaccaggcgtttcgcctgatgctcgcaaatcatattgcgctatttgtccgtcacgtccgccgccatctgaatgccgccgtccgggccgttcctgaatcggatgagcaccgcgccgtccgccgcctgatacttggcctgaaacggctgcggccacagctcaatcaggccggggcagctttcaaatgcctcaagcctgtaccactcggcgttgcccggatcgtcccggcaaagctggtagagccgccgcagttcgtcgctctgtgtgcgcagcaccgtatccatgaccgcgcgcgccgggtgctctttgaaaccggcgggcggccggacgggctgaaacgccgcccagaggtggaggggatagtcctgcttcatgaacgccagcatcgcctccgccgttccgcaggcgtcgcagacatacacgtccgccgtgcggctcagcgcgttggtatgaaccggcgccttcatggcgtccctcccgcagcggggacacatcatgtgctcgcccgcttcctgtcgggctttcaaatccagcagcctgcgctccgcgcgttccgtcatcgcatttcacctctcccttccgagtacatcactgtgcaaaagtcctctccatacgccacgcccagcgaggaaccgcagtcccacgcgacgtgaatcgttccgacgtcgtccacggcgatcacggttcccatcgcgccccctttcaaatcgggccgataggggtcgttcatgtggatcagcttcacccgcatgccggggcggtagtgttcccgcatccatgccagcttttcaggcgtcggttgcgtcatcccacttctctcctttccgctcctgaatctccctgcccggcagttcaccggtgacgaaggcgtgatgcacgcgcccaccgtcccgcgccccggccagatacatctccagcgccagcgcggcggtgtagctcatccacagctcgtcgcgcgctgtcagttcaacattggggtgtgcctcggtttcatccagtgccgcgtgcagatcgcgcaccgccctgtcaaacagggggctgcgctcgggatgcgctctcaaatcccgctccaccgtgtcgatgcggttcagcgcgacatcccgaatccagtccatccacgcgctcatgtctgcgcaccttcttctgccgtccggcgctcacggcgtagctgggcgtacttctcccggtgcgcctgcatgtcagcggcgcttttgaatgcggcgtaaccgttgaggtgggccatgagcacgcgccgcagctctttgtgctccgggccgccgagccccagccgcgtcagcaggctgttggcacggtacttctcgttctcgggattcgcgtccgccttgaggaacacgcgctttgcggctttcgcgtgcttcagcatcgcgttcaggagcgtcgcatgcacctgccagcgggtggggtcgtgctcgtccagcaccgtctcgagggtgaacctgccgtcctgaacgcgacagcctctgagcatgcccgtcgccagaccgtcggccagcatcgcttcgaaatcggcgagggtctctgcgggcgtttcgtccagccgctccaccagcagccgttcgatgtacagggcgtcgccccgcatcatcctgcgcaggatgtactggttgctgtacagggtacgcaggaggttgttcagctgcgcaaccgtccagtcctccaccgggaagctgagctccatatccgtgctttcggagtctttcgcggccgacgcataatctgccgcagttgcttctgatccggcattcacgacggctccttcgccgctctcctgatcggcggctgcttctgaatccgccgcagccgcgtccgtcagccagccccgctcaatcagcatcggcctgagcgtttccagcagcgcctcgtcgtcgctgtcgatgctcccgtcgcgctcaaccgtcaggccgccgattctataggcgtaggtcggggcgcgcaggtaaaccgccgggctgttcagtcgctccgaaatcgcctggaccatttccctgcggtccgcgggggtcgtttgcagtgtcatgtcgattcctccattcgctttgggtagtgacatttacgctctgaaccgatgaaaagtcaagcgatttccggatattctttctcatcagacacagcagatgccgcgcccgccgcggaacgaaaaaccgccccggagcgttggtgggctccgaagggcggtacattgtccttttccgacgagtgtaattatagcacaggccgcaactctcaaaccatatcaaaagctatcatttttcaccggcacacagatttttttcagagcttcaccgtgcagccgataaatcgtcggctcgctgtagccgagttcagtcatgatctcattccacggcttatagcacagataccgcagttccagaatcaactgctggtccgggtcggaaacggcgttgatcacccgtcgggcctcggctttcaagtccaccagccggtcgatgtcctcgttgatctcccgctccagatccacgatcttgcagatggtgtctgccatccgctgcttgttcggcgaatccggccgaggcatgtccgacagcgtcgccgtgcagttcgtcgcggtttcccgcagccgcatcacctgcgacagcttgctgttgattcgctggtcgatgtgaaatgcctgggacagatattctcttgccgtcattcgcattctcctctccacggcatctcgccgctgaagtacttctctgcaatgcgctgctgtgtctccggcggcagccgtctgagtcgctcgtttgcatggcgctggtccgcttcctgccggcgcttcggtttgtagaatgcgcaggctgcgaaaccgggacagtttccgctcaacgcgccgcacacgcccctcgcccgcagcgcaaaacacttatcgctcatttgccgcaccccccgctacgtccagacggcgcacagggattcccagccgcccggcctgttcgatctccatgcgcatcccctcggacggctcgtcgaacgcccacagctcgtcacacagccccagcatctgcgttcccattcgcaggccgcgttcgcgctccttgggtatcgcatcgtccagaaactgcgtgaacagcaggtgcggcgcaaagggaatgccgccctgctccatcacaaggcggcaataccggcgcgcgttttgcgtattcgtttccgtgttcccccgatacggggagcacacatagatcagcttttgcttcatggtttcctccgttcctcgtctgcctgacgaatgatctctttcacatcttccacgctctccacacggcgggcgatgccgcccgcgcggttgatcttttccagcgcccgcttctgcagcgccgtcagccgtccgcccggcagcttggcctccagccccagaaaccgccccctgtagcagcagatgatgtccgggataccagaggtaccaagcgcgccgccgtgctccttccagaagaacacgtcctcgcccagcgtggccagataccgctgaatggcggctacaatgtctttctcgagcaaacgctcacctcttttcgctttctcccaagccctgaatccgcgcctttaccgccgccatgagcgaatcctgtccggtagccttgtccttgagtgcccgcatcacctgttcgtccatcgtgcctttcaccaccagatgatgcacgaccaccgtatccttctgcccctgccgccagagcctcgcgttcgcctgctcatatagttccagcgaccagttcagcccgaaccacacgatggtgctgccgccgtgctggagattgaggccgtggccggtggaggcgggctgggtcgcggcaacgggaatctttccggcgttccagtcttccatgtcctgcgcggttttcagctcacgcacaccgctcggattctccgggctgtactttccgaaccgctgctggatgcgcgccagatcatgctggtagttgtacatcaccagcacgggcttgccgttcgccgcctcaatgagatcctccagcgcgtccagcttgcggtcgtggagcacgcgcacattgtggaactcatcgtagaccgcgccgttggcaagctgaagcagctttcccgccagcgccgctgcgttgagcgccagcacgtctccgtccgcgtagggcaggagcatatcccgctccatctggcggtacagtttttcctctcttgcggacaacctgatctccaccacattgtccacccgttccggcatcttgagatggtccgccgcccgcatggacacacagatgtcgccgatgcgccggtagatggcctcttccgcgccgggcttcagctcgcgcttgtacggcagccagctgttgggcgtgtcgaagtacatgtccaaataactgcgcatcgtcctgcccagccgcgcgccccggtccaacaggtagatctgcggccagaggtcctccagcccgttgggcgcgggcgtgccggtcagccccaccacgcgggtgaactggggcaggactttcttcagcgcaagaaaccgcttcgcccggctgttcttgaacgaggacaattcgtcgatcacgagcatatcgaagggcagctttcgcccggcgtagtgtctgaccagccactccacgttctcgcggttgatgacatacagatcggccttccggctcagtgcggcgatgcgctccctgggcgtgccgagcacgcgctccagccgcaaaccgtgcagctgctcccacttgcccagctcggcgatccatgtgtcccgcgccacgcgcagcggcgcgatgatcaggacgcggcttacctcgaagctgtcgtagagcagatgggacacggcggtcagggcaatggccgtcttgcccagccccatgtcgagaaacacgccgcattgcggatgcgcctcgatgaactccacgcagaagcgttggtagtcgtgcaggtcgcgctccgcaagcggctgcgcgtcgcggggtctatgtgtgttcaatggttatcaactccattcgtagtgcggttaaagccagctcccctatgcggtagcaaggtttggcacacgccacgccttgcagcttcataggggagcgaggacatatcgtgaaattcagggaaacgaaggcaaacgcgcaaaacaggaaggcaagggcatatcgtgacagagaaggacggacataccgtgaaaaccgctcaagaatcaacagccctttttcgagcggagcaggcgtaacgtaatttgcctcgcgcgcgcgtatgcgcatacgggcacatacacgctcgttttttgctttttccttctcttttccaaaacctcttatagaagagattgttacaacgttacagtttgagttttttcctattaatgcacgttgtaaatggtgtgtgacgttctccgtaaccttccaagacagttacaaatcttctgtagccttctgagatggttacggagatggtcgcaatgccagttacgccctgaacggtcgctgctcggcctgggcgcttgcgggccgttcccttgcgattcgctggtagcatcgctgcgggccatatggcggccggcgcaggagactgttcttgttcccgctgtacttctcccagccgccgatcttcatgagcatcccgaagatgtcgtaggtatcgctgcgccggatggccgtgggctccttgccgaagcactccgcccagatctccaccgcgctgaccaccgtgcgccgcgccgtgcctacgcggctgccgcccgtgaacgggtcgccgcgcagaaacccgcgccgctcggacagatccatcctgtcccagtcctccggtagcagcttttccagatactccgcgatcatgccctcgcgcacgtcgctttccagcgcctcggtctgctccgcttccgccagacgctccacctccggcgtgaggtacagcgcctccccgtgctgaaacagcatatacgcctccgcccagagttgctctaccacatccgccacctcccatgggcgatgcttgcccgccgtggtgcaggtcaccggccagaagcggcggttgcccgtgatgtcccgcaaaaagccgtcgccgttgttcgtgctgcccacgatgatacactgccgcggatggtcttccacgctgtagccgtaggagtggcggaacttgtcgtcctggcgggtgatgaacgccttcaccgtctctacgtccacttttttaagcccggccagctcgcccagctccagtatccagtagccttgcagcttttccggcgcggccttgtccttcatgtcgcctatggtcagactgtcgctgaaccacttcccgcccagcttggcaaagaacgagctcttgcccatgccctgcgggccgttgagcaccaccacgctgtcaaatttgattcctggccggtacacccgcgccaccgccgccaccatcatcttcctcgcaaccgcgcgagtataggccgtatccgccgcgcccagatagtccacgaacagcgtgtccacgcgcggcacgccgtcccacgcgggcagggattcgatgtagtcgcggatgggatggtagccccgctccgccgcgatggccagcaggatgcccttgagcttggacggggtgtacaggccgtagacatgctccagatagatctgcagcgcgcctaggtccgattcgttccagcccgccttgatgggcgtccacgggacggagctgtggccctcggcgtcccggcggatgtcgatgccgctgcggtggatgttgtaggcgatgtcccggagccgggggtcgttgcgcaggatcagcgccagattgcccagcgtgtccttgacgcggccctgcttgtccacctccagcttttcctgccagttttcgtcctgcgcaggctgtgcttcctgcgcgtccagatcgccaaactcctgcgcggcctgctccctgcgctcctcgcatagcttgcggcgggtggcctcgtcctgcgcggcgtactcctgcatccggcggacggagtccttcccgtcgcccacatgcgcgccgtccggggccgtgccgcccggcgtgaacaggtgaaggcgcacaaggtcaaacgcattgcacagctgcccgcccgccgggtcggtggcgtggtgcgaataggcgtacttgtcgtcgtagaccaccagcccgcccgtggtgctgccgcccacgaaggtgtagcggtcgtcctgcgccgtgggcgtgtatctgtccgcgagggtgtgttcgaggatgtctgtgatgctgtgcgcccggcagaacgccccgatgatcccacgcttggtcagcgggtcttcctgcctggagaccgtgcggcgcatcttcgcctccaccggctgggtcgtcggccagagcgaggcgtccgtccagtcgggataggtggccagcaccgcgtccggatcgaggaacggctcgtccgcgcagcggaacaggtactcgccgtcctcgggcgcactgggccagtacatcagccgcgcgggctcaaaggtcgtggggtcgaagcgggaaagcgtcaattcgtccgcgatgcggcgggagatggccgcatactcgtccggcgtgacggtacgggataagggaacaatgagccgcagacgcatcttctccggcgtgtggctgtgcgtgctgtagagcgcgtaggcgttgatgaacgtcatgtccagatcgtccacgagggcggcgtcggcgttgtccgcgtccaggcagaccatgcagcggttgaccacgctggcgctgttgcgcttgccgtttttgagatagccgcccacgaacccgccgatgtccttgacgtcgtcgcgctcggccttacccatggcggcatactcggccaccgtctcccgcgtacgggtgggtcgggacagtttgtccagaaattcgctccagagcatctccctgttctgccactgcgtcgccttgcggctgcggcccgtggcgatgagcagctttttgtcgtggttgacttgcatattgatctcctcctgtgtcgggatgaaaaaaggcttcccccaacacaggggaaacctgatcggaaaatgttctgtttgcgccgttacaattccaccggaagggaatagagcttgccgccatgccggaagagcaactccgggaagcggtaccgcttcacaaagcgttcaaccaatgcttccggcagatcggcgaagttttctccgtccaccccgcagatgaagcaggggccaaagataaacacctccggcgcgaccatgcggttgaaggggaggcgcttgagcagcccttcgtcgtcgcacaccagcgcggcgctgacgcctttccatggataaatggcctgaatggttccgcccacagcctgctgcatcgccttcagcgtgtgggggatatccagagcacgggcctctctgcccggctccaacatgacggccttcatgcgatcacacctcccgacctttcccggaagagaacacatcctcgaccgtgtcctgccacaaaaggtgcgcccgctcgctgtaacattggatcaggagtttgcgttccggcaggatcgtcgtcagcgtaaaaccttcccgcaggcggacggccatgcaggtctccgtgttgacgctgaccacatgcgcgccttccctgagcttaaggatctctttgtatgtcaccagaatctctcctttccttggggtatggtattactccctctgaacacgggataagtcaaggggtgctgcgacatttatcatgtctttttgtagtatgtcatttcgtccccgtccgccctgagcggcaaatcccgcgcccaatccggtgggatggccatgacgcggcaggcttcctccacgctgccctgaccgatgggcacttccataaccgcctcatcgtggacgtggaacacgatgggataacccgccgcttcgaggtttagcatggcatgggccagcaggtcgcgggcgatggcttgcgtacagttctcggcgatcttgccaccaaaggtctcctgcagctccatcttcccgccggcggatgctgccagatacccaatgccccggctgccgaaacggttggtcacgaatcgcggcgagaggtagcacaggtcgcgtccgccgggcaggcggatcagcatatgtccttccttccggtacaccattaccttgcccacgcggacgctattatgcttctcaatcacctccgaggcggcattacccagcgcgttccagaaccgcacgatgttcggattcgccgcgcgccaggcgtccaccagcggctgcatttcctcctcgggcattttcgctcccatggctttgagcgcgccgacgccgcctccgtagccgcatgacaaggtcgcctgcttccctttctgccggtactcatagttcggatgccccttgacgatggtttcctgcggaatatggaacatgcggctggctgtggcctcgtagatcttgcccttcccgcgaaactcctccagcacccattcttcgcccgccagccatgccagcacgcgagcctcgatggccgagaagtccgccacgataaaacggcatccatccctggggatgaatgccgtgcggatcagctcggagagggtattgggaaccgaaccgaacagcagctccagctgttcctcgtcaccgctcctcacgatgtctctggcgaggttgaggtcgggcagatggttctgggggaggttctgggcctgcacgagacggcccgcccagcgaaaggtgcgggccgcgcccccgaattgcagcaggccatgcacccgcccgtccttgcagatgcaccgcgccatggattcgtacttcttcacgctggtcttggacagttccaatcgcagctccagcagctctttcacgattccctccgccccggcggccttctcctgcacgatgcgcttggacaggctctccatgggcatatccatatcggcgagccatgccttgagctggctcacacttccggggttctccagccctgtcagttcctgcgcccgctggaacgcctgctccgaaaacgcctgatcgaccgccatcgcgcttttcaccagcagcctgtccacccgcacgccccggtcgttgatgcgctgatccaatgcgtacagcgcccactcgtgttcgggcagagagtggtggagaagagccttgtacacggcgcgctccgtctccacgtcctgagcgttgtaggctttgtaagtcgcccacttctccggcgcgtgccgcggcaaatttcgtgtgcgtccgccatttgtcttggtcgctttgcagggcatggagaaatagcgaatgaggtctttgccttcctccatctttttctccgtgacgttcagagccaccgcaacgtctgccagttttcccggcagcgtctggtaccacgccatgaccatcgtgcagcgccactgcgccggatcgagccaatgcccgagatgcttggagaagcacacccgctcaaacgcggcgttgtgcgcgattttcaggacgttcgcgtcctccagcgcgtgcaggaaagcgtccgggagcgtttctccgcaggccatgtcgacggtaaccaccggcgcgtcgtcaaaggcgtaggacaggagaaggatctcgaaatccggggcatcgcagtagcggtacacgccgcacttgggcagcggggcggaggaataggtctctatgtccagatgcagtacgcgcaagcgcatcatctccaatcaaaaagcgcaccctcgcggatgcgcctgtattgcgttctgcgctctcagagcgcggtcagtctgggcggcagcactctgcgctccagcgtgtcggggtcgatcacgacgagctcacgattcttctgccatgcatatcccacggtgtattgtgtcccgccggaggagccttcccggcatacggccaggacggcgtccgcggcgtctaccatttatgaaaagcaaatagtaatgtaaagaaactgcgtaaagggcagtaattgtagcatattttgcttctgcaactttacattacctttaacctccaataagctaaaactacggcaaagccgaaatagcattggaggtaaataaatggcaaagcgaaaacctatgaaactaccggactcattctacgctctgtttgactatttgcggagcagaggatatgcagaaaactcggtatttgagtatgagagtcatgctcgttggatcaccaaattcatgcaagataatgggtatgaggtatacagttcggaagcatacgctgcggttgtgaagcgtattgaaaatggcagtcgatacgaagatctttcggactaccaaaagcgccgctaccattgtgctacggtcctgtatgaatttcagcagacaggaagctacacttttcggcacaagaaagcggaagaagcgatacacggtggtcttaaagcagatattgagtcattcatggaatacaggaaatcactgctgcaggcagaaatcacactgaagcaatatcgcttggatctgctgcgattcaatatttttctgtatgaaaaaggaatctctgatgtgtctcagatcgcaacagcggtgatcctgcaatatatccaggaacggatggcccgctttacacagccgacgattcgtcatgcgcttacctctatccgccagttccttttttatcttcatgaaacgggacgaaccgaggtcaatctatctttagttgtacccaactgcggcgcgccttttccacagaaagttcccagcatctattccaaagaagaaatcgagcggctgttgggcgtcatggatcgtgcagaccccagagggaaaagagactatgccatgattcttattgcgtcccggcttggtttgagaagctccgatatctgccagctcaaattttcagaactcgactggaagcaaaacaggatattgctgaagcagaagaaaaccggtgcacaaattgaacttccgttactgtcagatgtgggcgaggccattattgactatttgaaatatgggcgtcctcagtccgagctgccgtatgtttttctgaaacacgtgccgccgtacgatggcgtgaccggagcagcatttacaaacgctattaaaacaggaatgcgccgagtcggtattacgcacgaaggaaaccgtaagcacggtccccatgcattacggcacagtttagccaccgtgttgctggagcagaacacaccgttgcctgtcataacagggattcttggacacaaaaacccggaaaccaccaagatgtatcttgccattgatctaacatccttgcgaaaatgcgcgctggatgtaccgaagattgatcctgactactataacagggggtacaggggatgatagagttcgagagcatttatggcagctttattttgcagtatatcgctttcaagcgcagcctgggatacaaatatacccatgccgaatttcgcttccgggtatttgaccgttttgcggttcaagaaggctgtaagcaagtggggctcacaaaggacttgtttgaaaaatggatggagccgactgcaaatgagcttgaaagtaaccgttaccgccgtgtcaacgaactgataaacttttcacggttcatgaatgatttggggattgcttcctattgcccaaggaatattcctcatataaagagcggcttcactccgtacatttttacacatgatgaaataacccgattctttactgcctgcgacgaaaatctaaattggggaagatatccgactgaatttgtttacactacccctgcattattccgcttgctgtatggaacgggcctgcgtatcagtgaggcgctgcatctggaaacaagtgatgtccacttggaggaggggtaccttctactgcggaacaccaaaaataatacggaaagaatggttccgttttccgactccgttggaacagctttgcgacagtacagttcttaccgggagaaaattttcggccccaataccaagtatttttttgccaacgccggagatgcttgctggagtcagggagcagcctatgaacagtttcggaggattttggtgcgggcacaaattccgcatacagaaaaaggtcctcggcttcacgattttcggcatacattttccgttcatacacttgcagagatgtcatcccagggattggatttatatcactctcttcccattttgtccaaatatctgggacatgcttctttagaagcgaccgaccgatatgtacgcctgacagcggaaatgtatccggaattgttgcaacaggcgaaccaactctgtgcttatgttttcccggaggtgattcaggatggagtataatttctcctattatttatctgcgtttctgggaaaatacttacccggtgttgtgggagcaagttccaacacggtatcgtcataccgcgatacctttgtcctgtatctgcggtatatgaaagcagaaagaggtatcccggcagagcgaataaagctgaatgtgttagaaccaaagcgtttttctgagtttctggattggctggagacgcagcggcattgcacggttactacccgtaatgtccggcttgcggcgattcattctttttttcggtatctgcaatatgaggctccagaatatctggatttatgccagaaggtattggcgattccatttaagaaaacagagcagcgggtattgaactatttttcgttggatggaataaagctgcttctaagcatgccggatacatcgaccaagagcggtcgccgcgacttggcgctgttgtctttgatgtatgataccggagccagagtacaggaaattgcagatctgacgccgcagtgtatccgatttgaaaagcctgccaccattcgcttacacggaaaaggcaacaaaaccagaattgtaccgatgatggatgctcaggtatctctgttgaagcgatatatgacagagcagaatctgttgagatccgaagaacagccgcaccctttatttcggaataaatgcggtgaaaagctgactcgtgctggcattgcttatattctggacaaatatgtagcaatggcaaggagagcaaatccggaactggtgccagataacatctcatgccattgcctgcgccactccaaggcgatgcatctgttgcaatccggtgtcaatttggtttatatccgggattttctgggacattattcagtccagaccactgaagtctacgccaaggcagattcccggcaaaagcggcaggcattggaaaaagtatatgtggatgtgacgccaagtgctgaaccagtctggcaggaaaacggtgatcttctggaatggctggtgtcgctgggcaaatgacagtttgggtaatgtaaagtaatttgtgtaaaagtcgttgcaattccatacttttttacggttactttacattactatttgcttttcataaatggtcgatcattcagcgcgggtgattgcagtatacaacggtatgccgggtggtacacgcaaaacacttgcatatgcaaagaaacagcaagttccagtcatagtgctagctataaataataccgttttctaggcttaaacatcgtttttgcccggcctaaggtctagccttttttttgagaatatgctaaaatatatgttggaatattctaaagttatttaaatctttggaggagatcatcatggaaatcgatgcaggcagattcattgtaggtgactgcttacaggcaatgcagcagttaccacaggagagcgttgatttcgtattgacttcgccgccttatgctgaccaacgtaattacggagaaggcagtgggaagattcctccagattcataagacttgcctctgatttagggaaatagctcttgattggcggcttttcatttttataatacttatgtcatacaggaaattgaaaaaacttaacggcaagttgcacaagctacgatatgaccgagaagctttatatagaagtgaaaaaattgcaacggagataaataactttttaaacgaggggaattcagatgaaagaaaacaaatatgatgataatatattctttcaaaaatacagtcaaatgagtcgctcacagcagggactagccggtgcaggag

SEQ ID NO: 3014 - DNA, 3939 bp, Unknown
  16S sequences of unknown bacteria
cccgccgctatctgcaaaaggcaaagaccatgctgtataaaaacggcgtgaagaaaaacagcgagattgtggcggtggtaagcccggactttttggaacgggtggagatcgaggtggaaaacctggagacggacaacaccaagaccgcgaccaacggctttgtgggtaagaccagcggcatttcgctgtatctttccaacaacatccacaccgagagcacgaaagagcacatctatgtgatgacgcggcgcgcggtggcgcatgccagccagatcaacgaggtgaaagcctattcgccggaggatctgtttgcagacgccgtcaagggcctgaacacctacggcaccaaggtggtgcgccccggcgagctggtggtgctggaagtaacggcctacgcataactgggccaagggccaggggggcaagccccccccgaacggcccaaaacgcaaggaaaaggaggggaaacacatgacgctgggacaggccaaatcggcggcgatgatgctgatcgaccaatacacgccggacagcccgccgacagacgacgaggaaacgctttctaagctgaactgcctggtggagctggcgcaggtgcagctttgccagatcaagaaaaaggagcggcgctgcgtgcttttggaaagccagggcacggtggacccggagacggggatgctgacgtttgccctgccaaaggatttttaccagctaaggcgggtgacgatggccgataccgggcaggaggcctgggcagagatctatggcgatacgctggaaacgcaggccgggcacggaacgatgatcttgcaatactatgcctacccgccggagatcaccgacgatacgccggacgacacggcgctggagctggacagggacacggcccaggtgttgccgtatacggtggcggcggacctattgaaggccgacccatcggcggactatgcctcgtttgaggccaagtatatggggcttttggccaatttggacccgaggatgagcgcggggcggctggtgatctctacgccggagcaaagggggctatgatggcgaactttctaagctatgacattccggccaggcgcacgaaaagcgcgcgggtgcgcacctaccagcgcctaaagggcgtggatttttcctcggacgaggcgcaggtggcgctgcagcgcagccccaacagcctcaacatgtacaaaaactacagcgtggagctggggcagtgtgtggaaacgcggccggggttccggcggcaggtggtttttcctgaaaaggaggacaacacggtatacggacagctgttttttgaaaacaggaccaagaccgtgaccaagatacagccgctgtttcatgtgggggatacgctgtatctttgggagagctacccgcaaaaggcggacacgctggacgaaaccggacagaaccccgggctatcggcgctgtataccggcctttgctgccaggacagcgcgatgatggtgtttgacggcaaggtatacattctggacggcgcacattacctttgctttgacggcgaaacggtgcaggaggtaaagagcctggcgctgacgcccacgacgtatatcggccgcgatccgctgggcggcggtacgcagtatcagcagagaaacctattgcaggatgcgtttatcaacacgtttttgtccgacgggaagagccaggactattacctatccatgacggacattgacgaggtggtgcgcgtggaggtggacggccgcacgctgagcgcggacgagtacacagtggacgctgaagagggcaaggtgacgtttacaaacgtgccccccgcaccgcagaccccagggcaggacaccgttttgatcgaggcaaaaaagcacaccgacggctatgcggcgcgcattgaaacctgccgcgtgatggcggtgtttgacaaccgcctgttttgcgccggcaacccggaaacgcccaatgtggtgtatttttcccagcgcaacgaccccacgtactttggcgagatcacctacgagacggacggcaaggagccgacggcggtggtggggttcatgcgcatcggcagccagctggccgccatcaaggaggaaagccagcaggaggccacggtatttttgcaccagccggtggaaacaaacatagagctgagccccaaaagctacccggcggaccaggggctttccggcctgggggccgcaggaaggcggatgtgtttgaattttctggacgacccggtgtttttaacgacgatggggctaaaggccatcggcaagctgagcattgcctcggagcgcagcatagagcaccgctcttcgctggtggatgggcggctggtcaacgaaaaggggctggcaaacgcccagctttgtgcttggcgggggtatttgatctgcctggtagacgggcggatgtacctggcggacagccggcagacctatgtgcaggccgccacggggcataccgagtatgaatggtatttttgggacaacatcggcgtgtatgacggcagcggcgcgttccgcccggcagtcagcatgctggcgtataaggaccagctgtatatcggcacggacaacggagtggtactcacctttaacaccgacagagtcaacaacgacagcggggaattgtccgccgaggcgtacaccgacgacgggcggcccatcttttggtgctggaccacgccgtttgacgccctgggccagcccaaccgcgtaaaacgcgacaacaagcgcggcggcgtgctggaattgaagagcatgagccacgggcaggtgaagggcaaggtgcgcaccaaccgcgcgccgtggaaggaatttgtgcgggtggatggcgggtatttcgattttaccgatctaaactttgccgatttgagctttgccacagaggaaaagtcgctggtgtcgttccagagcaagcaaaagcgctgggtgaaaaagcagctgatgttttacggagacgaagcggggcgccccggcggcctgtacgccatcaccatggaggcgtttttggcaggctattacagataggaggagaccatggcgtttacaaaactgacaacggatgtggaaaacatccaaaagctggcggataggccgcagctttcggcccagcagctaaaggctgcgtttgacggcgcaggggcggacatcaagcagtatctgacggagacgctggtgccggagatggaggctgtgacggcggcggaaagcatcggcgctacgtatcttggcgacggcgacccgcacccggaaaacagccgcaatgtgcaggccaagctgaactatttatatgagcagatcaagcaggcgcagatggggcagatcccggaccgcagcattgagagtataaagatcgccagcggcacgctgacacaaaacgagctggcggatggggctgtgacaacggccaagctggcggacggggccgtgacaacagccaagctggccggcgggctgctggatctgtgcccggtgggcatggggctggtatggtggagcgatacgctgcccagcgacaaatggatgctggccggcggaacgctgacgccggggacgcatgacgcggccatcgcgttttttggcggcacgacgctgccggatgtaaaagggcgcgtgatcgtaggcaaggacacgggcacggcggcgttcaatgcgctgtaccgcacaggcggggcgcagaccgtgcagctgacggtaaacgaactgccgagcatcagcgggaatattgaaatgcacaacatctataccggcacgaacgtagcggatgtaggcggtgtattttccggggtaaaaatatcgggaaaataccgggacggcggcacggccggcagcggggcaagcagctttgggatgatcgactttgcctttgggcaggacagcccgcacaacaacctacagccctacatcgtggccaactatatctttaaggtattgtaaggag

SEQ ID NO: 3015 - DNA, 23217 bp, Unknown
  16S sequences of unknown bacteria
ggcgaaaagcgtggcgaagagcgcggtgaaaagcgcggcaaactggaaacggcgcgggctatgctgaaggaactgcccttagaccaagtcgcgcgcttcacgggcctttcgcgggaagaactacaatcgctggccaacgaaattgttccgcagggctaaagggcgaccggatatgacctgtcaaatccagcaacgggaagcggagttgctctgcatcgcatgggagatgcaaggataattttggtctcataacagccgggcatgccggaattttgcgagagccgccagtaaggtgtatcttctggcggccatttttgcgcatacaaatatttccccgcgcaaacgcacaaccaagctgtcatttgcgcggggaaaatccgcattaaaagtgggcaattggagaaaatgcggccgcgccgccgtcaaagccggccttgcgcgcgcccataatcaggctatcgtggtattccccatcctgccattcccgctgcggcacgacgaacaaatcccggaagccgcatttgcgatagcagcggatggcgcgcgcgttgtgcgttttaggatcgatcatcagcgcgtccgcaccataagtttcaaaaagagcgcgcatcagggccttcaagcacgctgtaccgatcccacgatcgcggcattcgacttcgcccaggaaaatgtcgataccatacacgcaatcctcaggccgcgcgaacttggcgtattcctcctctggcacctcaaagatttccgcgctcagagtgcagaactggcaatagccgatttccgtccccgcgtaagcgatgatgcacggcgtgacgccttccgccaaactctccgcaaattcccgcgccacccgttcataggtatagatttcctgcatgccttcccaatagcgcatggtctgcgggtcggtcatccagcggagcatcaagcggaaatcgtgctccgtattttgcatttcccggatggccacagggccttcgcgggcgatccatcgcgcgttcatggacgatctgttcaatcgaacaactgggtcacatcgtccagcaagccgcggcgggtgtatgggtcttcgaaagcgaagggcttgcgctcgcggtcgtagagcttggcggcgttggccgcatcgatgcgctggaagcggatggcgacatccattggcgcagcgaaggcgaagggcttgagcgccgcgcgcttttcccaggcgcgctttacgccctcgtagatgcgcttttgcgcggtttccggatgcaggctgatggccgcgttccagccgaagctctttttcacggcgacggtttcgatgcccgcaaagctcgctcgcgcctgggccgcgcccgcctcatcggacgaagcgaacagcaccggcacgccatagcgcccggcaaaagccgcgtcgatttccatttcgcccacatcgcgcccgttgatgcggtaatattgataggttttggagctataggtgtgcgaaagggccgcgtccttcgtgctggcgctggcgtgatagccgatgaacaaaattccggcgaaggattcgtcaatgcctgggaagcgggtgtggaagctgcccaaggcgatttcgcagcgagggtcgacctgatggtaatcgaaattgacgccgccgccgtggttgtcccacaaaatcacgcgccgcgcaccgcaatcaaacagagcgcgcgccgccgcgttggcctcctgcagcacttcccgcgcggcaaacgccgcgttggcgctgccataggaaaggccctcacccggcgtgccgaccacgcacgccgctccttccatatcgatgccaatataatatgcttccatgggaattcctcctttgcttcgttcccattatatatcatctatgccgccaatgcaaaggaaaatctcgcggcaaacaaaaaaatttttcgcgctattgacaatgcgacagctatcccgtatgatagggatgcgacggcagatttttccaatggcaaaaaagaatggaggcgaaatttgcatggataaaaacgcaagcttcggggcgctttgcgccacggacgccctggggcgcaagctgcccacacaagcgcaggcgggcgcgctgcggcaggatcgcgtggtgggcatgttttattttctcacccacggcgcctatgggccggacgcacgcggcccagcggacgtgacgaaaatcctcaaagagcacccggaagccatttgggattttgaccatcccgcgtggtgcgatggcgcgccgctctattggggcgagccgctctttggctattattatctggacgacaaatgggtgctgcgccgccacattaaattattgaccatggcaggcgtggactttttggtgttcgacaccacaaatcgaaaaacgtttttcccccaggtgcgcggcattttggaagtgctggaagaataccggcgcgaaggtttccgcgtgccgcagatcgcgtactacaccaacacgaaatccggcgaaaccgtgaacgaaatttacgaggatctctacaaacccggcctgtatcccgagctatggttccgctgggagggcaaacccttcatcatcggcgcgaaggaagaatgcacgcccgagcaacaggaatttttcaccttccgcgcgccgcagtggcccaccgagcacaaaaagccgctcgcctgcccgtggattgatttcgaacgcccgcagcgcgcctggacaggcccggatggcgaaaatgaaatcgtaccggtttccgtggcgcagcatcccaacatcagctttggcgacgcggcgttttacggcgagccctccacgcgcgggcgcaatttccacggctgcgccaacgacaaaacgcccgaagccatcctctatggctacaacatggccgagcagtgggagcgcgccatcgcgctggatcccaagatggtgttcttcaccggctggaacgaatggaccgccggcaaaatccgcggagacgcggaccgcccggttttgatggtggaccaggccaattgcgaatattcgcgcgatgtggaacccatgcgcggcggattcttcgacaattactacatggagctttgcgattacatccgccgttacaagggcgcgccgccgctgcccgcagtgcagggcgcgcgggccatctcgctggaagccggatttgccgcctgggaggacgtgcccgcctattggtccatgccctttggcgccctcccgcgcgacgccatgggcgcgggcaacacgcgctacacggaaaacacggggcgcaacgagttcgattgcgtgaaagtcgcgcacgacgaaaacaacctgtatttctacgcacgcacgcgcgaggacatcgagttcaacatgttcaccaagtggatgaacctgtacatcggcatcgaaggccgcgagtacgcgccctcctggcacggctatcactatctggtgaacaacatcgtgctcgatggatgcgccaccttcctgcagcgctcgctgggcggctatcgctggggcgacaacacccgcgtgcgctaccgccgcgagggccgggaaatggcgattgagctgcccaaagccgcgctgggcctcggcgcgggggaattcggcctgtacttcaagtgggccgaccacactggccggaacgagactatcgaggatttctacgagcacggcgattgcgcgccctatggccgcttcgcgtttttgtaccgggggcaatgaaaacgccgcctttgccattttgctctaacggatcaaggaggaacatccgcatgaaagtgctatccattgaagccgggcgggaacagattaccttccgcctggaaggcgcggcaggcgagcgcctgttcctgcgcgaaagcgcgcccgtggtgggcgcgaagccgggccgcacgctgagcacgcacgaatgcgcggccagcggcgccatttccatcgaccgctttgcgggcgagcatgaccggctctattcgcaatttacgtttttcgcgggcgatgaagcgctcgcgggcgcgcggtatgtgacggatttcgccccggacgtgccggaaaaccgcgccccctatccccagccttccagcatcaaaacgctgcacggcaccaaggaggacctcctggcgctgggcatccgccaatcgccctacaacatcaatctgcccgccatcatgaccaccgtgccgggcgagaacaccatcccctaccagcacgacggccgcacctactatttcctgcgcgaccgagtggccgccatggacgcgcacatgatcgaggccgcgcagtgcggggttttgatcaccatgattttgctcaattctccgcgcctgttcggctccacgggcgaacgcgcgctgctggacgcctgcatccacccggcctttgcctgggacagcgcggacgccttcatcagcgcctttgacatgcgcacggaagagggccagggctattaccgcgcgtttgtggagttcctagtggagcgctacacccggccggatggcaaatatggccacgcggcgggcgcgatcatcagcaacgaggtggatagccagtacgtttggggcaacgcaggcgaaatgcccgtggaagaatacacgcgcgaatacacccaggccctgcggcaagcttggctgtgcgggcaaaagcactgcgcgcatttccgcgtgtacgtttcgctggaccagcactggtttgtgagcacgaacaacgtgcgctaccccctgcgctactattccagccgggatgtgctggaaaacatcgccgcgcattgcgcgcgcgatggggagttgccctggaacgtagccttccatccctatcccgaagacctgcgctggccggatttctggcacgaccgcgcgccggacttcaccttcaccacgcccaaaatcaccttcaaaaacatggaggtgctggaagcctatctttcgcagccgtccatgctgtatcgcggcgcgccgcggcgcatcatcttctccgagcagggcttcaattcccattccggcgcgctgcaggcccttacggaaaaaatggccgaggcgggctatgtgctcgcctatctgaaagcgcggcagatgaaaaccgtggacatgctcatgcaccacgcctatacggataacccgcgcgaattcggcctgaacctaggcatccgccgctacgaccccgccgcgcccggccacgcgggcgaaaagaaacccgtgtatttcgccgtgcgcgatatggataccccgcaggaagccgaacgcgtggcccaggctcgggcgttcatcggcgaggagctgttcgattacctgctccacccgcccatcgaatatggcgaccgggatgcttcgcgcgacaacgaattcggctaaatccttcgagccgcgcaatcccaaaagccggggctgcccctccaaagcgagaggggcagccctttttctgcgtgcaaaagcggcgccgtttccaatccgaacaatccaggcagccaacaggacggaatttaccagcgcgctgcgccggacagttgtcccgcattttccttctgtcttacccagtcaaaatcggggcgtatttgctttgcaaatctccacccttcccttgactctccctttaccgttcaactttaacctatatttgacattactacaagataattcgcgcattcgcgaagataatctcttgatatatgcctcgtttagtgatatactaataaagggaaagtgttttcccttattgtacttaaaggtgatgctcatggatatcagctataaaaaaattatggaagctactcatgtccgcggggatacgctaagcttcagtaactaaactctcaaaaggcgatcctgtgagcatggatgtgctacttaaggtttgcaaagcattgggccgcaacatcggagatattgtcggtcctattcctgaagatcagtaaaaggagaaagcatggccagtagtaataatcacgaaacgatcagccgggcaagtttgcgatattgctggtcagtatcctttcaaacatgtatatctgtattttaatgaccaggatgaagctaagaccgctttgctgagtgaaaaaatccaaaaggaaacgcctaactttcacatcacaatcaccagcaaagatgcgagtgagttgctcagaagcattgactcggagttggatcatccgaatcttcattacagaagtgattcaatattgcgagaagcatcatattgagtatcacatcaaggaaggtacaattacagactgaggaggacatactatggatgcccatttgctcaataccattgccaatttcatctggggcatcgctgacgattgcctgcgggatgtgtatgtgcgcgggaagtaccgcgatgttattctgcccatgacggtcatccgccgcctggacgctgtgctggaggataccaagcagcaggttttggatatgaaaaaagtgctggacggcgcgggtatcaccaaccagtggggcgcgctgggcaacgccgccgggcaggccttctgcaacgcatcgcccttttgcctgcgcgatctgaccggccgctcggctggccagaagctcaagacggactttgaagcgtatctcgacggcttctcccccaacgtccaggaaattctggacaagttcaagttccgcaaccagatcgcaaccatggtcgaggccgatattctcggcgcggtcatccaaaagtttgtcagcagggatatcaacctcagccccaggccgtgcggcggtctgcccggcctagacaaccatgccatgggcaccctctttgaagaactggtgcggcgcttcaacgaggccaacaacgaagaagccggcgagcactggacgccccgcgacgtcgtggagctgatggcagatttggtgtttgcgcctatcgccgaccagatcaaggacgccacgtactcgtgctatgacggagcttgtggaacgggtggcatgctgacggtggcacaggaccgcctgaacgccatcgccgcacagtctggaaagaaggtgtccatccacctgttcggccaggagatcaaccccgagacctacgccatcgccaaggcggacatgatgctcaagggcgacggcgaggaggcggtgcatatcgccttcggctccacgctttccagcgaccagcacgccgcccgcaccttcgatttcatgctggccaatccgccgtacggaaagagctggaagaccgacgccgacaagatggccatgggcaagaaaaaggaaatcctcgatacccgcttcaacgccgccacgcaggaaggcgagccgctgcccatgatcccgcgttcttcagacggccagctgctctttttgctcaacaacatcagcaagatgaagcaggaccccccattaggcagccgcattgtggaggtacacaacggttccagcctgttcaccggcgacgcgggcagcggcgagagcaacgcccgccgctacatgatcgaaaacgacctggtggaggcgatcatcgccctgccggagaagatgttttacaacacgggcatcggaacctatatctgggtgctgagcaaccgcaaggaggcgcgccgccagggcaagattcagctcatcgacgccaccggcatcaagacgcccctgcgcaagaacatgggcgaaaagaactgcgagctatctccggagcagcgccgggagatcgtgcgcatcttcatggattttgaggagagcgaggtcagccgcatcttccccaacagcgaatttggctattggaaggtgtccgtgcagcagccgctgctcgacgcgcagggcaaccccgtgctcgacaagaagggccgcatccagccggacaaggaaaagagcgataccgaaatcgttccctttggctacgagggcggcatcgagggcttcatggaaaatgaggtccgcccctacgcccccggcgcgtacatcgaccccaaggccacgaagatcggctatgagctgagctttaccaaatacttctacaagcccgtgcagttgcgctccatagaggagatcgtggcagacctgcgcgcgctggagcaggagacggacggcatgttggcggagattctcggagggattcaaggatgaagcggtatgaagcgtataagccagtgacaagtcgatgggccaagcaattacccttttattgggaatttcagaaaattgctgaggtctttatcgaacgtaaagaaaataacgaccccatcaaaacgacaaacattctttcattaacaaatacacggggggtaattccttattcagacaaggggaatttagggaataaggcaaagaacgatatcagaggttatcgtcttgcttacccaggagacattgtactcaatagcatgaatgtggtaatagggtccgttggtttatcacaatattatggtgctgtaagtcctgtttattgtatgctttatgtaagaaataacacaaaatataatgttcgatactataattacgtgtttcaggataagatattccaaggtggtctgaatggattaggaaatggcattcttgaaataagaatgcgtatacccatgtccaaacttaagtatgtatgtgttcccgtccctccccgcgccgagcaagaccagattgtgcgctacctcgactggcaggtgtcgaaaatcaaccggttgatcgcggcgaagcggaagcagattgagctactaaaagaacacaaagaagctttcatcaacactgccgtgactagaggagtcgttgatgatattccgctaaaagaaagcggaatgcaatggcttccaaagatacctgcgcattggagacctgtccccgcaaaagcactattcagaaacatttctgaattgcggcgagacaatgatccgatgtttgcagcaacacaaaaatacgggctaattgaacaagtagagtacatgcgcagagaaaaccgcagaatcgtattggctaatgacaatctcgataaatggcttcatgtagagcctgatgatttcattattagcctacgcagttttcaaggaggtctggaaaaatgtgataaaccgggctgtgttacttggcactacgttgttttgcggccgcaaaaatatgtatatccacctttttataagtggctttttaagtctgcttcatacatcggggcattacaaaaaacatctgactttattcgtgatgggcaggatttgcgttattcaaactttgtcaaagttggattgtttgttattcctatgacggaacaggtccaaattgctgaccggttagattcagaaatacccaaatatcaaaaagcaatcgaatccctcgaacaggagattcagcaaatcattgaatatcgtacccgcttgatctccgacgtggtcacggggcagatcgacgtgcggggcattgaagtgccggattacgagcactgtgacgaagcgcctgaaaatgcggcagaagaatcttccgatgcagactacgatacagaggagtgaattacatggatgcaaacggcaggaaagcattttgggatgtgctgtgttcacttgactcatatgatgacgaagccctgtgtaagctgaaaaaagctacgccctggcccgaggaattgtgccgttttcgcgcagtaaatgagagcgcgttattgcagttgcagaacaatgagcagtttttctcctcagctgtttattatgatgatccttttgatagctatttctggatagattttcaggcattgcaggatgggttttgcgcattgcgccgtgagtttgatcagggcgacagagaaaaattcaaagggtatttgaaagcttttggatttggtacgcatcttgaggaagctctccaaatcatggaattcacaaatcccaatatggatttgctgaaattgtcgcttagcgatgttcgaaatctggttcgagagcagatatactccatctgcttttgcgaaaatgcaatgaacgaagcaatatggcttaaatatgcagatcaacataaaggttttgttcaaacatacgattttaacgtcccctccacttggctatgtggtaaagaagataaatgtgcaaagtgtggtattcatatctccccaccttggatttttccggtatattatgcgaatgagatgtacaatggcacgcagtatgcaatgggtttacttatacgtgataagctctcaaaatttctcccgtccattccagaactgggtgaaaaaatgcttttgttaagtgctgtatggcaaaaagagcgtatttctctcatcaaaaaagagtgccattgttacgatcaggaatggcgaatgcttctgcctacgccatacaccaatcgaccatgcattaagctcaagcccaagagtgtaataattggtttacgaacgccagagtatcatagacgtttgattatctcagcagccaagattgccggtattcaggagatataccaggcagtcatcaacgagaaaaacttgttggacaaagagcggattgcggaggaatagaatatgccgtttaccaacatcagcgaatccggcctcgaaagcctgattgtgaagtggctcgtcgagcagaatcattatgagcaggggcacagccatgattacagcatggaatacgcgctggacaccgtgcgcctcctccgctttttgaaggatacccagccggagtccgtggaaaagctacagttggaaacccagccgctcaagcgcgcgcaatttttctcccgtgtgcgcgatgagatcaccaagcgcggcatcatcgacgtgctgcgcaagggcgtcaaggtctacccggccagcctggttctgttctacatgacgcccagcgtgaacaacccctccgccgcgcagctgcatgccaagaacatattcagcgtcacgcgccagctgcacttttccccggatgaaaccaagctggcgctggacctgtgcatcttcatcaacggcctgccggtgatcactttcgaactgaaaaaccagctcaccaaacagaacctggacgacgcggtttatcagtatcagcatgaccgcagccctaaggaactgctgttccaattcacgcgctgcatggttcactttgccgtggacgatgtgcaggtgaagttttgcacccgcctgcagggaaaggaaagctggttcctccccttcaacaagggatacaaggacggcgcgggcaatccgccgaacccggacggcctgatgacggattacctgtggaagcgaatcctcaccaaggagatgctttcccgcatcatcgaaaactatgccgccctgatcgaggaaaaggacgaggaaaccggcaaaacaaagtacaaacagatctttccgcgctatcatcagctgatggcagtggaaagcctgctggcggacgtcaaagcccatggcgtaggcaagcggtatctgatccagcacagcgcgggcagcggcaagtccaactcgattgcctggctggcgcaccagctcaccgggctggaggatgcgcaggggaatctgctggtggattccgtcattgtggtcaccgatcgcgtgattctggacaagcaaatccgcgacacgatccgccagtttgcgcaggttggcaagctggttgcctgggcggagagctccggcgacctgcgcaaggccattgaggatggacgccgcatcatcatcaccaccattgagaagttcccgtatgtgctgccggagatcggcgaagatcacaaggaccggcattttgccatcatcatcgacgaggcgcattccagccagaacggcaagaccgcaggcaaaatgaacatgacgctttccgccatcatggccgacccggatatggacaacgaggacaagatcaacgccatgtgcgagggcaaaaagctgctgaccaatgccagctatttcgccttcaccgccacaccgaagaacaagacgttggaaaccttcggcaccctggttgtcgacgcctatggcaacccgattctcaatgagaagggcgaggtgcagcatcggccgttccacgtctacaccatgaagcaggccattgaggaaggtttcattctggatgtgctgaaatactacacgcccatcgacagctattaccggctcaaaaaaattgtggaagatgacccaatgttcgacaagaagaaggcgcagaagaagctgcgcgcctttgtggaaagccagtcgttcaccatcgctgaaaaggcggatatgatggtcagccactttcacgagcaggtcatcgctaagggaaagatcggcggccaggcccgatccatgatcatcaccagcagcatcgagcggtgcatcgactattaccatgcagtgaaccagtgtctggccaaccgacgcagcccctacaaggcgatcatcgccttctcgggtgagaaacagctggacaaagatcagccgcccgtcacctccgccgggctgaatggctttgcggacgcggccatcccaaagaccttcaagaaggacccgtatcgttttctcatcgtggcggacatgttccagaccggctatgacgaaccgctgctgcacaccatgtatgtggacaagatgctctacgacatcaaggcggtgcagacgctcagccgcctgaaccgtgcgtgcccgaagaaatacgatacctttgtattggatttcttcaacgatcccaacgacatcatccagtccttttcccggtactacaagaccacgctgctctccggcgagacggacccgaacaagctctatgacctgattgccgaaatggagacggatcaggtataccgcaacgaacaggtggaacatctggtaaaccggtatctggacggcgcggaccgcgaccagctggatccggtgctggatgcgtgcgcggccctgtacaagcaactggacacggacaggcagatcaagttcaaaagcgcggcgaagggttttgtgcgcacctacggcttcctgagcgctattttgccctatggcaatcccgagtgggaaaagctgtcgatcttcctgaacatgctgattcccaagctgccctccccgcaggaggacgacttctcccaaggaattctggaagccatcgatttggacagctaccgcatcgaaaagcgggaaaccatttccctgattctcccggacgaagatgccgaggtggaaccggttcccaccagcaccgcgaaaggaaaacaggaacccgaaatggatctgctcagcgcgatactctcctatttcaatgacatgtttggcaacatcaactggaatgacgcggacaatgtccgccgtcaaatcctggagattcccggcatggtcagccgcgacgaacagtaccagaacgccatgcgcaacagcgacaagcaggaggcgcgcacggagagcgaccgcgtgctgcaaaaaatcattttttccatcatggcagacaacatggaactcttcaagcagtttacggacaatcccgaattcaagaaatggttgagcgatctagtgtttaatttgacctataacaaggaagggaagccatatcaaagccagcattgatacccgcacaggtatggtgcaaagcatccagaagggcgtgatcacggtttccttcggcgggctggagaaaaagttccagtttcccggcgcgttccagcagggctttttgcgcaaagcgtaaagaaattctggcgttcccactgagcgttgacaaacccggccatctccgtccaaaatgcgggaatgaatttcgcttcccgcattttgggtttgagaggccaatgcgcaagacacccccagccggctgcgctgccagcatcccacagtgcggtgcgaacgcagaggggcaatcattgcgaattgtgacgcgatttgaaaatgaaaatcccgcaattccgaatccaatattgactttgtcgctacgctaaagggccgccccaaaccgaaggggcggcccagcatattttctttctttcattcgttattcgttggcggtcacagtcgcgccatcttccgcggcgggcgcgggcgctgccagcgccaccacggccagcgcgttggcctgcgcgggaatggaacgggtgagcgcgccatcgtagagcactttcaccaaagcgccctgggcgatctccgcgtccacgcgggtatcttcgcccacgaggatttcatacagcgcgccatcttccgcggccagcacaaagcctgtttccgtctgcgcgtacaccgtgccttccagcgcgaagaaatccaccttcagccccgtcacctggccgggcatggagagcgccatcacgccattggtgtacaccaccgcgttgccgcccaccgccacggtgctggccgggtcttcccaatgcacaatcacatcgcccacggtttcatcggtcatcaggaagccgtcgtcatacagttccaccacagggccggaaaggcgattcacctggatttcctccgccgtgacctgcggcggcagcgaacgggtcatcacgccattgtagcgcacaaaaacgtacatacccacttccagttcctccacgccggtgatgggcgtggattcctccatgtgtaccaccacatagttgccgtcgccctggtcgagcagcaggccttcttccccgatttccacaattacgccacccaagggctctaccacggactcggtttccgcaaatgccgcaaaggagaaaagaaccaggctcacagccagaatcatagaaagaagctttttcataacttacgtcctcccaatttggttttgcatcgtttttatttccgacactacatagacgcggctggcgcaaaatggttccggccaaaactatttgtttacatattgttcatttcatggtacaatggagccagagaaaaaatggcaaaggaggatacgactatggcagatggtttccacgcggggttgtttgacgagttggaggcgctctatcctgacagcagcggcggcgcggcgcaatatggcgtggcggcggccaagggtaccgtggccggtgtgcacatcctgctcacgggattgacgccggggcagccggtgtccatcgaagtttccgggccgcacacggccttcaagctcttcgaactggtgcccgtgcccgtggaagtgaacacgggcgcgcgcctgcgcaccgcctacctgcacgacgatgtgaacgaaaccctcatccgcaaagcgccgttttacatctatgaagcgctcaaacccctgtacaatttgctcctgcccacgggcccagcggctgcgctcgccttcaagacgcccatcgaatgctgcaaggcgcggcaggcggtggaatggcgcttcaccatcgcgcacgcgggcgaagtgcgcgatctgcggtttgtggtggagcaattcccctgccgtgtaccgcccgcttccgagcacacgcaccaatatgtgaactggatttcctatgccaacatcgccaagtggcacaacgcgcccattggcacgcccgcttacgaagccatgctgcgcaaatacctgcgcgccgccgtgttctcccggcagaacatcctgcccattccgctgggttccctgttcgagcgggaggcgggccagcccgttttgcgcacagagcgcctgattcgcctgattcgcctgggcgaggaagtgggcctgcgcctgttcgagggcagcgccttctgttcgcgcagcgcgggccaggccgatgacgacgcgttcttccgctcgctggatatggacgccatgcacagtcccgacgaagtggccgccgccttccgcaaggccgcgtttgccgccttcgattatggcacgggcgcaaaggtttcgctcacgggcgaagccgtgggcacgcccgccgcgcgggaaacgctcgccagcatggcgaagcagctattcgccttcttgcaagagcacgatctcgtcagccgctggacgcaatgcctgatggacgagcccaacgacgcgctcgccgccgcctaccgcgagatcgcccaaaccgtgaagccgctgatgcccggcgtgaaaatcctggaacccgtgctacccacccacgcgctcgatggcgcggtggacatctggtgcccctccatcgatgtgtacgagcgcgaccgcgcgtattacgatggccgcgtggctcagggcgacgggttatacgtctacacctgcctcaccccgggtggcaattatatgaaccgcatgctggatatgcagcgtctgcgccaggtgctgctgttctggatgccggcagtgtatcccaatgtgcagggattcttgcactggggcctgaaccaatatcccgcgggtgtgaatccctttgagcgctcctcaaccatgttctccgagcaagtgctggaattccaccccaagcgcgccatgttcctgcccgcgggcgattgctgcatcttctatcctggatacgacgaaccgctgctctccacgcgcagcgaggcccaccgcctgggcctagaagatttgtgcctgctgcaaacgttgccggcgggcgaggcgcgcgcactggcacagaccgtggcgcgcggctacgcggactacaccaaatccatccccgtataccgcgcggccaagctccgcttgctggaagccgcgcaaaacgcaaaaaacaacggttagggagggattcccatgtatcggaacctggacgcctacctgcgcgatacgctctacatccatcagcccctgcccctgccggaagagggacggctggaagaagcgctggcgcagaaaattcccttggaacgccgcgccatcgcgcccgcgcacgcgctggaaggctggcgcgagctgggcgcgggcaaactgaccatcagccccgcgggcaacatcacgctcacttcgcccacggtgctgccgcagtttccgccggaagcgcgcgatacccatcacacgcactatggggtatccggcattcgctacgatttgcccggcgaagacctgcgcgcctacaaccgcctgtgcgtcaccctgcgcgcgcagtgcgacgggcaccgcgcgccgcacctgcacattcagttttacaacgagggcgaaattctcctgccggacaagttcgaccgcgagggtacccaccaggtgaacctgaaaaacggcgaatggacgcgcatcctgtgggaaatccccgatctgccccgcgataaagtgacgggcatcgtcttcttcaacctgatcgccgggcgcgacaccaccagcggcgaatacacgcgctatgaaatcgcggatgtttccatccagcgcgtgaagcgctgcgaacacacgcgcggctggcagcccaacccgggccagttgtgcgccagcttttccggctacgcgccagaggacgaaaaaatcgccatcggcacgggactgcagggccaattccagctgcgccgcaaaaacgaaaccgtgtattccgcgcccatccgcatagagcacacgcccattggcacattctcggtgttggattttacgcccctgcgcgcggagggagattatgaactgatcgccgaaggcgcgcagccgctgcgcgtgcgcgtgcgcgccaacccctggcgcgatagcgcgtggaaagccctcaacttcctcttctgcgagcgctgcggctatcccgtgcccgggcggcacggcatgtgccacacggacattgtggcctccttcgaaggcaagcacaagctttatctgggcggctggcacgacgctgccgacctttcgcagcaaacgctgcaatcggcggaaatcgcgcaagcgctgctgctgctttccgccaacgccgcggaaagcgcgctgcaaaaacggctgggcgaagaagcgttgtggggtctggaatttacgctgcgttctcgcctgggcaaggggttccgcatgtccagcgcgggcatcacgcgctggacggatgggctcgtgggcaacatggacgacggactcgcgcgcgtacacgaccagccctttgacaattacctgtgcgccgcagtggaagcctgcgcctacgaaacgctgggcgacgagggcctgcgccaggcctgcctgcgcgcggcgcgcgaagattatgcctttgccaaggcgcgctacgaggcgggcctggaaccgcccccgccctgggagcactcttttatgaccagccccgccctcttccacgccgccgccgggtattccgcggccaagctatacagcgcgaccggacgcgaagcctatctgcaggacgccgccgcgcacgcggaatacgtgctgcgctgccagcaaaccgcctggcccgcctgggacattcccatccgcggcttcttctaccgcgacgatacgcaccgggtgatccagcacttcaaccaccagtcgcgcgagcacctgttcatgcaatgcctcacggagctgtacgccctcgcgcccgaacacccgcgcgcggacgcctggtacgaggccatccgcctctatggcgaatacgtgcgcgccattgccgggcacaccatgccctttggcatgctgccctcgggcatttatggcattcacgaggccgaagacgaagaaagcttccgccgccagcacctgatggcgggcgaggaagagcgcgcgcactttaccgcgcaatgccgcgcgggcaagcgcctgagcgaaacgcactatctgcgcgccttccccgtgtggttctccttccggggcaacgccgccgtcatgctctcggcgggcgtgggcgcggccctggcgggccgtgcgctggaagacccggcgctcaaaaccatcgccacgcggcagttgcaattcatggtggggcgcaatcccttcgcgcagtccctcgtgtacggcgagggcgaccgctatgccgcgcaatacgccgtacaccccggcgaaatggtgggcgaaatgcccgtgggcatgcagtccttcggcgatacggacgaaccctattggccccaggccgccaacgccacctacaaagaggtgtggaccagcaccgtgggccgctatctgttgctgctctccgcgctggaagtggatctataaatcattggccgccgggaaccgaaagagttcccggcggccaatgtatgaaaacaaactttacgcggtttcgatcttgctggcgtcgcccaaattgagcttttccacggcttgttcgcgcatcttatatttgaggatcttgccggcggcgttcatggggaattcgctaacgaactcgatgtaccgcgggcacttgtgcttggccatgcgctccagcgcgtactggcgcagttcttcctcggtgacctgcgcgccttcctttaggatgatgcaggccatgatctcttcgccatactgcttatccggcacgccaatcacctgcacgtccttcacggcggggtgcgtataatagaattcctcgatctccttgggatagatgttctcgccgccgcggatgatcatgtccttgatgcggccggtgatcttgtagttgccatccggcaggcggcgggccaaatcgcccgtatgcagccagccctcggaatcgatcacggcagcggtggcctcttccatgttgtaatagcccttcatgatgttgtaaccgcgggcgacgaattcgccatccacgttatcgggcaattcctcgttggtttccggatccacaatgcggcattccacgccgaacatggcgccgcccacggtgttcacgcgggtttccagcgaatccgtggtcttgctcatggtgcaacccggggaagcctcggtttgcccataggtgatgcaaatgtccttcatgtgcatcttctcgaccacttcctgcatcaccttgatggggcaggggctaccggccatgatgcctgtgcgcatataggagaaatccgtcttggggaaatccgcgtggcccagcatggcgatgaacatggtgggcacgccgtggaaggcggtgatcttcttcttattgatgcaatccagcgacacgcgcggcgagaaatacggaatcggcgacatggaggtgccgtgcgtcatggcggcggtcatggcgagcaccatgccgaagcagtggaacatgggcacctggatcatcagccggtcggcggtagagagatccatgcaatcgccgatggccttgccgttgttcaccacgttgtagtgcgtgagcatcacgcccttggggaagcccgtggtgccggaggtatactggatgttgcacacgtcgtttttgtcgatggcgcgcatgcggcggtacacctcgcccagcggcacggtttcggccagcgccacggcctcttcccaggtgaagcagcccggctgcgcgctatccacgctgatcacgttcttgaggcgcggcaggcgcttggaattgagatggccgggttcgcactccttcagttcggggcagatggtgttcatgatctcgacgtagttggaatccttatagccgtcgatcatcaccagcgtgtgcgtatcggactggcgcagcaggtattcggcttcgtgcaccttgtaggcggtgttcaccgtcaccagcacggcgccaatgcgcgtggtggcccagaaagtgatgtaccactgcggcacgttcgtggcccagatggccacgtgatcgcccttgcccacgcccatggcgatcagcgagcgggcgaaggtatccacatcgtcgcggaactggggataggtgcgcgtgtagtccagcatggaatagtcgaaagcgttctgctccgggaactggtcggccacgcggtcgagcacctcggggaaggtgaggtcgatgaggtgttccttcttccaaatgtatttgcccgtgtgggcgatgttgtcctgcagcaggcgcgtttcaaaatagctgtgcatgtagtgcgcgaactgcgggaacacaatgcccggatcggtgaggtcgggcgcccagcgcttgacccactccagggaaacatagccctcgtagccgatggaggccagcgcgtccagcatttcggtgatgggcaggtcgccctcgcccatcatgcggtactgcaccttgccatccaccatcacggaatccttggtatgcacatggcgaatgtagccgcccaggttgtccaccgtggtctgcggagcctcgccaaaatagcggtacggatggtgcatgtcccacagggcggcgatttccggccggttcactttatcgagcagcgcgcgcaggcgcttggtatcggcatacacaccgttggtttcgcaaagcagcgtcacgcccgtgcccttggccatatccgccaattgcagcagcacttccgccacgtaatcgtcgtccacttcccccgtcacaggaccgtccaggtccgcaagcagtcgaatatagggcgcgctcagcttttccgccaggcgaaggtattccccaatttctttcacgacctgctcacgctcgtcccggaatttcaggctcctgcccgtagaaaggcaaggaatgctcagatgaaggctggcgagcttcgcaatggtcttatcaatttggcccgccgtgaatggcggcgcggaaacggcataaatgttttcgcccaggccgcggatctcgatgccatcgaacttaaagtccttggccatcgtataaatatccacccagctaaaatccgggcagcccagggtcgaaaagctgatcctcataaaatgccaacctcccattatacagaatggaaataagtatacgcattctcctccatccctgcaacgggaagcgtgttaaggcatgttaaaccttcgcacacggcggccttggcaaactctgccccatcgccgccgcaaattgcgatgcgcggcacgccatgccacccatttatactatgccggtatgcgccatacgcctgcgcgcgagcagccaggacgccgcaaacaggagaagggaaagcgcggccaccgcggcgcaggccacccgcttatcgggcaacaggagcgcgctccccgcgaaaagggccgccgatagcgggtaggccaaaatcagggatagcatgctcttttcctctgtccacaaaaagttcagcggaatggtcacgctgccggaaaggagcgccagggcgaggctgatgcaggagaagatgcccatcgtttcgccgtcgaaggcgtttttccccagggcggccgcgcaccccaccaggatgcccagcagaaagcccgcgccgctgagcaacaaatacagaaggtacttgctgtccaccactgccgccctgggcagggggagcacggccgccaccttgcgccagccggacgctttatccatctggatggtggtcacggagatcatgccgaggatcacggtcgccacaacggtcaacgcccagggcgtggtgaggaacgccatggcggcgccgacgaccacaaacaccgcgagcacaatccacagcacagaccggatcagataataatccttcagcaaaagccctttcatccttgaacccccttgatatacagcagcatgatgtcgtcgatggacgcggggtcgatgaccgcgccggggtattttctttgtgcggcggctttgtcggccaccagcacgtcccattcgtaatcctgcttccggtaggcgaggatatccgccctgtcgagcgcggcaaactgggtttcgccgcatttgaggatgccgtattgataacgcagctcgtccttgggcttttccagcagcaccctgccctgatgcaggaaaacgatataatccgcgatcttttccagatcgctcgtgatgtgcgaggagagcagcacggaatggctctcatcctgcacaaaatcccacagcacatccagaatgtcgtcccgcgcgatgggatccaggccgctcgtcgcctcgtccaggatcaacagccggggatcgtgcgaaagcgctgcggctatggccagcttcattttcatgcccttggacagcgccttgatcttgcggtcttctggcaaggccatcttttccagcaaggagaaatacgtttcttcccgccaattggcataaagattttgaaatacgcggttcagcctgcgcggcgtgagcgcgtcgggaaaattgtttccatcgaagaccacgccgatctggccgcggagagaatcgcgcatgggcgcgtcccgctcgcccagaatttcgatgtcgcccgcatccctgtcaatcagcccgagaatggcgtggagcgtggtggtctttcccgcgccgttttcgccaatcagccctacgatggccccgctgggcacgcggaacgacacgtcttttaaggcgaaaccatcgtatgttttcgccaggccctgcaccaccaaagcattttggttcatccttcttccccctcataaaagagccgcaatagctccgccagtttttccacgggaatgccgcaggccctgccgatgtccgccgcttcctgcaagtgcgcctcggcgcgccgctgctgctcttcctgataaaaatccttattctgcgcggaaacaaagctcccccggcctacggtggtttcaataggctatgtcacaacaaacagttgataaatagccatttttataggggagtatcaga

SEQ ID NO: 3016 - DNA, 10820 bp, Unknown
  16S sequences of unknown bacteria
tattcttcttagcttgcatttgtctgcttctcctttgatggatttctcagactaaatgctaccacatattctttgccagactaaatgcaatcggtaaatgctattcttgcatttactttgcaaatttacgtttccgtggattttttttatttttttttgaaaaccccttgacaaaccccgccggatatgatataatatataagcactgttaagtgacttgtgcgagtgtagttcaatggtagaattccagccttccaagctggccgcgtgggttcgattcccatcactcgctccagaatcgcctcttatccgatcggatgagaggctttttctttggtttcagggcggatctgtcatgaatccgtcacgctggcatgagaaaagcggcggtcttcctgtgtcattattcttctccgacccagatcctcatatcgcactccccgcggttcgcgaaagcgaaatacgggatcatcttcgcggtgaaccttgtcgatctcgtggtgtccgaatacagcccgtcagtctccccgcgcacagccgggaagtaaacgcacggaagcccgagcgactcatcgaagccgacagttccggtgttcccgacgagcttcacgtcggtcagcgagccgccgttgtcgacgccctcgatacacatgacgaaaggtccgtaagtcacggcgcgcatcccgcggtcggcggcgaccctcgggtcggcgtgcacaaccttcacgtcaaggcgcatatcgagcactatcccgtctccgtcagccatatcgacgaatacataacctttcacctgttccgccgtcacgaccttaccgttcagcctgagcgtccacatccggcaccatgacggtatcctgaacgccattctgcggttcccgccggtgatcgtcagcgcgacccttccgtcatacggatagttcgtcttctgcactatcttcagcccgtcgatgtccgccgtcgagtccatgtattgattcacatacaccgtctcgtcgtcgtaattgtacacgaaatcgcctatcgacgagatgaatctcgtgacgttcggcgggcagcaggagcagccgaagacttccacacgctgtgttatcgggaagtgtgtgttccggttctcatggagcgcgccgcggacgatctttctcttctcaaggtcgatctcctgcgcgttctcgtagaagaacgacttgccgtccagcgacagaccggacagaaaactattgtagatgaccctctcgacagtgtccgcgtacctcgcgtcggcgtcgatcctttcaagcctgcgggcaaacaaggcaagcgcaagcgccgcgcaggtctcacagtacgccgtgtcgttcggaagcctgaaatcctcctcaaacgcctcagccttgttcgtcgagccgatgccgccggttatgtacatcttgcgctcagtgatgttgcggaacagcttgtcgcaggcgtttctcagaccttcgtcgttctccctgagagcgagatccgccatcgcgcagtagagatagcaggcgcggacagcgtgaccctcggcggtaaactgctcgcggacgggcaggtgatcctgaatgttcgtgccgcggtgataatcgtctccctcaggaagcttcgcctgcgagccgcgtgtgttgatgaagaacagagcaagatcaagccagtcgcggttcttcgtgtggtcgtagagcttcacgagcgcgagctcgatctcttcgtgtccgggcgagtcgaacgccgccgtctgctcgtccatgaacaccttctttatataccgcgcgtagtcctccataaggttgaggaacttccgcttccccgtcgcctcgtcatacgcgaccgccgcctcgataaggtgtccggcgcagtaaagctcgtgacgcccgcggtcggtgaatctgctttccggcgcgaaaagctggaaatagatgttgaaatatccgtccttcatgcgcccgcgctcgatgtcgtcgacaacctcgtcaactattctttcgagctcgggctcgcgcttcttcttcgtcaggtacgcgaccgactcgagccacttcgcgacgtctgagtcccagaaatagtgcggcttgttcggcattccctccttccagtcgagcttgaacgcctcgaagcgtccggtgtccgagaagcgcttgtaaacgttccagatcgtcgtctcacggatgagcgactgtttttccttccagaagccgccggtgatgtcgattttgtcataggtgagatttttcgctgccatagtttttcctccatgaatctcttgccgcccgaaagattgattttccggagcgtttttcattttcgtcttgaatgtttttcgctggtatgatataattataaccgataatattccgaaaatcaaccccacaacccagtgaaaaggagcaaaaatccgacatgaacgaaaaaaatcattaccctgaatacgtctacgcgggttatttcacctcccgcggagagtggattcacccggtgagctgcaacgacaccggacagctcatcattgtcacagccggtgagttcgagatagaggaggacggaacgacatacacgctggagccgggctcggtcatgttcctcgaccccggaaaaacccacggcggcgtcagaccgaccggagagcgcgtctccttctactggatacactggcgctcggaagattacccgaggtacaaggtgttcatgctcagggacagatacccggtccttctcgtctgccgacagctgcttcactataccggacgcggtttcgggagcgacgtcgccgacgccctgctgacggttctcctggctgagatcggctcgcagtactcggaatcggcggacgaggacgcctccgcggcgaagatctgtgaatggatacgcataaactccgaccagccgctgaccgccgccgacgtctcggagcgcttcggctacagcgtcgactacacctcgagactgctcagagtgacgacgggcatgggtctgaaggcggtgatcagcgaatacaagatgaacctcataaagcagctgcttctcgagtcagagcgctcgcttcaggagatcgccgcgaaatccggtttttccgactacaagctgtttctcaagtacttcaggtaccacgagggagtcaccccgtccgagttccgctccgcctattacaagatacatacgaacaatcactgagacgacaaaaaacagaaaagccttccgcgcacatttttctcatgcacggagggcttttgctctacattatgtgaaactgtcggattttgtcgggagaatttgctttacaaacagacgtttgtgtggtatcatattatcagtgaaaaagggaacacacgggaaatagtgaagcttcaacagatattcattattttcaggaggaaacttattatgaaaacaactcgcgaagggcaaagaagcatctcggaaaaccttgagaactcagttctttttgaccggagagttaacggcagcggccgggtattattataccgggtcaacatgatcgccgtacgcgaggagcatcgctgcggatacacactgatctcagagtcgagaaacggaaagacaatcgagcacagcgaagtgcgcgacatcacgagcgacattgacaccgccacccgcatcttcgaccttgtgatcacgaactgcgtatatccgtgccacctcagagacgtagtcgaggattatctgtcgtcctgacttttcgccggaagctcccggagggcaaaatacacaccggcggcgcaggcggcgtcgtcaagcgcgcggtgctcacgggactgaacaacgccgagtctctgcgcgagcgggccgagcctcagactgtctgaaaggaattccccacgcagactctcggcatacctgaacgtgtcgaaatagcggttctcgaagcgcactccggctctggcggcggcgcgtctcaggaatgggatatcagagttcgcgataccgtgaccgacgagaatgtcgttcccggcgaactccatgaatctctgcatgacctcgctgaccggcggtttgtccgcgaccatctcgtcgtttattccggtgagctccgcgacgaccgggactatgcttcttccggggttgcagagctcggagaacctgtcggtgatcttccctccgcggaccttcacggcgccgatctcggtgatctcggggcgtccgtcaccaagcgacgttccgagcgacccgctcgtctctatatcgaccgcgacaaaatcgtcaaaatccggaagagcgtgcggagccgggtcccgcggcattccgtcctcgacgagccttgtcccggcgcccatcatcgagagctgatcgagcatcgcgcgcacacgcttcgccgtgccgtttatctttatgaccttgtagccgataggctcctcgagcggctcctcagccgctgacgctccggacatgaaatcgtcggacatcccggatatctcacggagcctttccgagtaatcggcgagaccggacaaagacagcgtctcaagatatctgtcgataagcgctggggagctctcatccgccgactcgagaatatttgtgatatcgtccgcgattccgcggacctttttcgcgatttcaccgcggcagacgttcacgttcgccgacttgttgtcccagcgcttctcgtagaacgcggggctgttccagacgctttccgaaaaggctccgagcggcccggacacttcacggtaaagggcaagcatctcctgccgtctccccttcgccgcgtccgcgcagacagcctcggcgcgcatcctgaacagctgctcgtcaatagcgccggaaaccgacgcaagggcggatatgactttcctgttctcgccgcgaccggcttttctgagcatacagatattgttgtccacggacgccttgagcagtctgagaccagagcgtatttccgccgttccggcgccgttctcgttccgcgccgcgctctcgacatacccgcgcagctcatttatgtttgcgaccgctctctccccggactcggagacagtgatcagcggttccggtaccatttctaaaaatctctcccgaccaataaattcatatcttttattatatcatatcagcccgtataaatcaatgtcaatattataaattccacgccaaaaaggagacgccgcgtatttacggaatctcctctttttgttgtcagtgttatcactcgagctcgaacgcgccggtgtagagctgataatacgtgcccttctcggcgatgagcttatcgtggttgccgcgctcaattatacggccgtggtcgagaaccattatgacatccgaattcatgacggtcgacaaacggtgagctatgacaaagaccgtgcgtccctccatcagcttatccattccgcgctggactatagcctcggtgcgggtgtctatcgacgaggtcgcctcgtcgagaatcatgaccggcggatcggcgaccgcggcacgcgctatagcgataagctgacgctgaccctgagacaagttcgctccgttgttcgtgagctcggaagagtaaccgcccggtagacgcgttatgaagtcgtccgcgcccgcgagcttcgccgccgcgacgcactcctcgtcggtcgcgtcgagacgtccgtagcggatgttgtccatgacggttccggtgaacaggttcgtctcctggaggacgataccgagcgagcggcgcaggtcggatttctttatcttgttgatatttattccgtcgtagcggatctttccgtcctctatatcgtagaaacgattgatcaggttcgttatcgtcgtcttcccggcgccggtcgctccgacgaacgccaccttctgtccgggctcagcccagacggtcacgtcgtgcaggacaggcttgccctcctcgtagccgaagtcgacatcggtcagcctgacgtcgcccttcagttcggtatatgttaccgtaccattttcacggtgcgggtgcttccacgcccatctgtcggtgcgctcgtttgtctcggttatgcttccgtccggagatatcttcgcgttgacgagggtgacgtaaccgtcgtccgcctccggcttttcgtccatgagagcgaagattctctcggcgcccgccatacccatgactatagcgtttatctgctgggagagctggttgacgtttccggtgaactgctttgtcatattgaggaacggaacgagaatgcttatcccgaacgccattcccgaaacgctgacattcggcagtccggaaagcaggaacagtccgccgaccgtcgcgatgacgacatacaacacgtttccgatattcataatgatcggtccgagcatattcgcgtaagcgttcgcgcggtagccgtcctcgtagagcgcctcgtttatctcatcgaagccctcgatgctctccggctcatgagagaagaccttgacgaccttctgaccgttcatcatctcctggatatagccctcggcgcgtccgaccgacttctgctgcctgacgaagtactttgccgacccgccgccgatcttcttcgagacgaggaacataagcgcgacgccgagaagcacgaggagcgtcatccagacgctgtaccagagcattattccgagcacgcagacgactatggctcccgaagagatcagcgagggaagcgcctgcgagacgagctgacggagcgtgtcgatatcgttcgtgtagtagctcatgatatcgccgtgcttgtgcgtatcgaaatactttatcggcagatcctgcatcccgtcgaacatactccggcggagcttgcagagaaagccctgcgtgatatacgccatgagctgggtatagacagcgatcgcgatgacagagagaagatacagcgagataagtatcagcacctcggagatgatctctcctttagccgcttcccagtcgccgctgagataccagttctgtatcgaggttatgaccttctggacaaatatcgaaggtatagccgaaaccgcggacgagaagagtatacagaatatcgtcagcgggacaagtccgggataatacgagaacagaagctttattatccttccgaaagttccgggagccgccttcggtctgcccttcagcgcgccgttctcagttttttcagttttcggcattctctttccctcccatcgtctgctgtgtatagacctcgcggtagatctcgctccttgaaagcagctcgttgtgagtgcccatgtcggcgatcctgccgttgtccatgacaattatcaggtcggcgtcctcgaccgacgccacgcgctgcgcgatgatgatcttcgtcgtctcaggaatgtatttcctgaacccggcacgtatcagagtgtcagtctttgtgtcgaccgcgctcgtcgagtcgtccaggatgagtatcttcggctttttcagcagggcacgcgcaatgcagagacgctgcttctgaccgccggagacgttggttcctccctgctcgatcttcgtgtcgtatccgtccgggaaggaacgtacgaactcatccgcctgagcgagtctgcaagcctcgacgatctcctcgtcggtcgcgtccttgttgccccagcgcaggttttcctttatcgttccggagaacagaagattcttctgaagcaccatcgcgacctgtccgcgcagagtgtttatgtcatagtcgcggacgtcaacaccgccgaccctgacggttccctcggtcgcgtcgtagagacgcgggatgagctgaacgagagtcgacttcgacgaaccggttccgccgagtattccgacggtcattccggaacggatatgcaggttgatatcggacagcgcgaacttctccgccttctcggagtacttgaagctgacgccgtcgaaatcgaccgagccgtccttcacggtcgtcacgggtgtggaagacataacgagcttcggctcctcggaaagaacctcgtaaatacgcttcgcggactcagccgacatcgtcaggatgacataaatcatcgagagcatcatcagcgacatgagtatctgcataccgtaagtcagcattgccgacatctgtccgacgtcgatcgtcgttccgcggttcgtgattatcagcctcgagccgacaagcagaacgaacgccatattgaagtagacgcagaactgcatgagcggtgtgttgcacgcaacgatccgctcagcctttgtgaaatcccggcggatatcctccgccgcggcgccgaacttgttcttctcataatcctcgcgcgcgaatcccttcacgacgcgcatggcgcggacgttttcctcgattgactcattcaaccggtcatatttcctgaagacgctgcggaacgcgggcatggcgttcttcgcgacgagaaacagtccgacgatcaggagcggcaccacaatcacgaatgtaccggcaagcgcgcctcccatgatatacgccatggttatcgaaaagacaaacataagcggacaccgtatcgccgtgcggatcagcatcatgtaagccatctgcacgttagcgacgtcggtcgtcattctggtgacaagagatgacgacgagaacttatcgatattctcgaacgagaacttctgcacacggcggaaaatatctccgcgcagattcttcgcgaagcccgccgaagccttcgagcaggtaaaaccggcaagtccgccgcacgcgagcgatatgcaggcgagcagtatcagcatcagaccggttctgacgatagacgacatctccgcgccgttcttgatatggttgaccatatccgcggttatgaacgggatgaacgtctcgatgaccgcctcgccaattatgaatatcagcgtcagtatcgtcggacgcttatattcgcgtatacaggcggcaagtcttttcagcatttccttgatcattcctttctctgagggcgccggatgaatgggtatccggcgcttgcttgtttctactaacaaacttatgccgtttgcaagcagcgaccccggacgtaccgtcaacaaatcggcgaaaaactactgtggttctttgccgatcacgacagactctatccgggatcgcctctgcattctcataaattataccccattttttattcttttgcaagtgggctttctcatttttttcaattatttaacaactgatacacattacggaattcatatatactccccgctcagcgcgcacagtgtatattatttccgtaaccgatataagaaatcactgattattcagcgcataaatagaaaaacagaatatatgtcaaaaacaccgaaatatatttgtagacaagcataagaatttatgctatcattgatatatacagttttttgatcatacggacggcgtaattaagtattaatcaattaaataaacttgaaaggatattacaaccatgaaaaagttcgttaccctgttcattctctctgcgctcttcctcgagctcaccgcctgcggcaccgcctctgagggcgggaagaccccccccccgggtgatacatcgtccgacactagtactaccgccgaagtgaccacaaattacctctcgcagttctccgatatcgactataaaggcgcgacatacacgataggaacgacgagcgacacccagtacccgaactacgtcggcgacgacctgaacggtgaaagcgtcaacgacgcccagttccagcgcgacgcatggattgaatccaattacaacgtaagcatcgaatacataaaatacgacgacgccgggaaactcacccaggcgatcaaaagccaggtaatggcggatgacgacactctcgactgcgctgagaacggcatggctaccaacctcgccccgctctcaagccagggtatgctcgccaacctcaaagccatcaacggtctcaatctcgaagcctcctggtggagccagagcatgaacaaggaattcacgataaacaacaagctctacaccaccaccggaccgatcgccttctcgtactactactctccgagaataatcgcctacaacctccgcctcgccgacgaatacggccttgacaacctctatgaggtagtcgaaaacggcaaatggacaatagactacatgtatgactcgatgaaatcagtcacccatgacctcaacggcgacggcgaaatgggcgaagacgatatgtggggcgcgtcagtcgacgaatactccgccgccggcttctacatcagcgcgggcggaacccagacctcgataagctcagacggaaccccctcattcctcttcaacgaccccaacaactactcccgcatagaaaaaatcgcgtccataatcggcaacgccgaagtcacccagaaagccgaacagctcgccagccgcagcggctcctacaacatagtcgacaaagtctacaccttcaagaacggccacgccctctacctcggctacggagcccaggcaatagccttctatctccgcgacatggaagacgactacggcatcctccccgtcccgaaatatgacgaaagccagcagaactacataaccttcggcaacgcctacgtccccgcctacatcgccctccccgccaacaacaaccgcggcagcatgaacggcgtaatcctcgactcaatgggcttcatctcccagcgagacgtccaacccttagtcgccagcgtaaccctgaaaggcaaagccgcccgcgacgaaggctcccacaaaatgatcgatatcatctacgaagacatctacctcgacctcaactgctgctacgacctcggcggcagcttcacactcctccgcgatatcaccatgggaaaagcagaaaacttctcctccaaatgggaatcaaaaaaggcaaaagcaacctccgattttgaaaagcttctcgaacaattcctggctattgaggaata

SEQ ID NO: 3017 - DNA, 32759 bp, Unknown
  16S sequences of unknown bacteria
aaatgagcggatttgaggtgttttaggattgcgagagcatgaaatgcgaagcaatccgtgtatcataggagtcaaaaggttgcttcatattttatgctcccgtcatcctgatgcataataaaaagtataacatcgggaacaattttagtaaagccggaaaaataatgatatcttaagaaatggaaaacagtgccagattgacaaacctgaaaggatcaactatcctaaataagagccctttttgacgagaagggtcagaaaaagaaagtaaaacagatcattgaatacaggagtaattatgagtgagatacaaaaaggaagaccgaccatttatggagaagtacagtctccaaggcggcgcaccggccgaccgggagtgcccgcttacggtgccgagagtcagaaaaggtatgcagggagaatgacggagcattatgacagtgcgcagatggaaggtgcaggccgtccggttctgggcaatcgtgcgcgcacagaacaggcgccacgcagaagagccagtgtgcctgcaccggaagcgtatacggctccttttgacagaccggcccgcgggtgggagaacatgccagagcaggagctgcggcggactgattttgcctcggacaggaagcttcgcgttctttggagcgtgttcggaatcctagcagtgttgctcgtggcagcgattatttatgaggtagtacttggaaacgggctgaaggagaccggagggcagcgcatggccgggcaggccggtacacagatgaccggacagacaactgcccagacaaatgctgcgtcatcgacgtcggcagcagatgctgcattgccgacacagacgactgctcagacatccgcagcagtaacgccggatgccgggacggcagatgtggatgccgggtcagacagtgcagccgcagatgactttgcggacgaggtgacagatgccgatgccgatgctacagtggatgatgatattcctacgattccgctggaaggggacggcgcgcaggcagatgaagcgaacggagcagaataaggtgctttcgaatgaaagctgaaaagcagatggaagaggaagagggagcgttatggacgagagagaaagagcgaggagaatgcagattcgcagggcaaagcgcagaagaaatgtactgatcatgaaatgcatcatttctctgcttacactgattgtagtgtttcttgcggtgatcctgattaaggatgcggtgattccgggacttaagaatcacaaaaacagcaaaaagccggaggcacagcagaccgttcagcaaaacggtgacggaacagagactcagacagaggcggcagactctgtggatgacatgattgcgcaggcagatcttttggcggcacagtatgattattccggagcgatcgaactgctcaagagctcttccttatatacaggaagccagaaaatgcaggatgcggccgcggggtatgagacgacacgacagtcctgtacggcctatccactggatcaggtgacgcatgtctttttccatacgatgattaaagatgatgcgaaggcattcgatggagactcgaaggaagccggatacaatcaggtcatgacgaccatgagtgaatttacgaaaatcatggagtccatgtatgaaaagggttacgtgatggtcagcctgcacgacatgtgtatcgtaaatcaggatggtacggtgtcacagggtgagatcctgctgccgccgggtaagattccgtttgtgctctcacaggatgatgtgagctactatcactacatggatggggacggattcgcacagaagctgattgtcgatgagaatggtgatgtgaagaatacgtatgtcgaggatgacggcagtatttctgttggcgattatgatatggtaccgtggattgatacctttgtaaaacagcatccggatttttcgtatcacggacacaaggggatcatagcccttaccggttacgagggtgtacttggctaccggacggatgaggtataccggacccgtgaggccgggcgtgtgacggagtatcagcagaaattttttgatgagcatccggattttgacgaggcggcctggcagaatgaagtggaccaggcgactgcggtagccaatgccatgaaggcagagggctgggaatttgcaagccatacctgggggcatatcgacccgcgcaaggttggtatcgatggcgtgatgaaagatacacagcgctggctggacaatgtggcgaccgttgtcggcagtacagatgtgattatctttgcatttggtgccgatatcggagactggcagccgtatacatccgacaatccgtattttacctatctgaaagaaaaaggcttcaatattttctgcaatgtagattcttcaaaatgctgggtgcagtttggcagcaactacatgcgtcagggccgccggaacctcgatggctaccgcatgtactacaacccggagctggtcagcgatctcttcgatgtgagctccgtctgggataacgcccgtcctaccccggtcccgcagatgtgatactaccagttcagggcagcagcactgccccaagacagaacgaggcaaatttatttgccgggaactgtcttggagcagtgggatgagcggagcgcccatcagccacagacaggagctgcgaaagcagcggatagttcgcgaagcggacggggctgtggcctgttgccctgaacgttcggaaaaaatgccccaagacagaacgaggcaaatttatttgccgggaactgtcttggagcagtgggatgagcggagcgcccatcagccacagacaggagctgcgaaagcagcggatagttcgcgaagcggacgggtgctgagtcccggtgggactcgtttagcaccgaccgaagcggagcggagacctgtggcctgttgccctgaacgttcggaaaaattgacccgcttgaatttccttcccggaaatgctatactgaaacgcaggctccaaaagagtcaatggaaggaaaaggagaaagagcgtgaagaaacagacatcgcttccggctgagattatcaaaggccggaaaatgatatacaagcttgcaaaaaatgattttcggacaaagtacgccggttcctatctggggatcatatgggcatttatccagccggtcgtgacagtgctcgtctactggtttgtcttcgaggtcggcttcagggccggggagaatacacttccggtaccgtttgtgctctaccttatcgccgggatcgtgccgtggttcttttttcaggatgggctgatcggcgggacgaattccatgctggaatacagctatctggtgaagaaggtcgtttttcagatcagtgtgcttccggtcgtgaagattatttcagcggtatttgtgcatctgttttttgtactttttattattatcttatactgcttttacggacattttccggatctgtattatctgcagctgttttattataccggaggactgtgtctgctcattttagggctttcctatatgaccagctctgttgtgatttttttccgggatctgtcccagatgatcagcattgctctgcagatcggagtctggctgactccgattatgtgggtggcagaggataagctcgtcagctatccgtggctgcacaggcttctgaagctgaatccggtctactatgtcgtgaccggattccgggatgcacttatttataagcactggttctgggagcgaccgctctggacgttatatttctggtgctttacaatcggggcattgctgcttggcagcacggtgttcagacgtctgcgtgtacattttgcagacgtgctgtgatgcaggactgctgcaagagagcgaccgcctgtttgcatcatggcagacggaatccggagagaatggagaaagaaaggacagacggcgtatcagcgccggatcaggataaaacatggaaaaagggattgcgatccgtgtagaacacgtaagcaaaatgtataaactgtacgacaagccgtcagaccggttaaaggagagccttgggctgaccagaaagaaatgttaccgggagcactatgcactgacggatgtgaattttgaggtgccgaagggtgagacaattgggatcatcggtacgaacggagccgggaagtcgacgatcctgaagattattaccggtgtgctgaatccgacgtccggagaggtgatcgtggatggtcggatttccgcgctgctcgagcttggcgcaggatttaacatggaatatacgggcgtagagaacgtctatctgcagggaacgatgatcggcttttccgaggaggagatcgacgcgcgactgcaggatattctggactttgccgatatcggtgactttgtgaaccagccggtcaagacatactccagcggtatgtttgtgcggctggcttttgctgtggcgatcaatatcgatccggagattctgattgtcgatgaggcactgtctgtcggagatgttttcttccaggcaaagtgttatcggaagttcgaagaattcaagcagcaggggaagacgattctgtttgtcagtcacgatctgaacagcatcagtaaatactgcgaccgggtattgctgctcgatcatggaaaggtcgttgcgagtggcgtaccaaaagagatggtcgatctctacaagcggctgctcgtcggtcaggggccggaagatgaggaagcagcgaagaagcaggcagccgcagagcaggcaatccgcaaggagggctggatcacaccgtttgagatgaatccgtcggctctggaatacggagataagcgggctgagatgctcggatttctgattcaggatgagaacggtcttccaacgaatacgatcgagaaaggcagcagctttacgatgaaggtgcgggtgcggtttcacgagcatatcgaggatccgatctttgcttttacgatcaaggacatgcgtggcacagagattaccgggacgaacacgatgtttgagcatatcacgacgccgaccggagagaatggcgataccgtagtggtctcttatacacagaaggcagatctgcagggcggtgagtatctgatttcctttgggctgacaggataccggggcggcgattttgtcgtctatcaccggctgtatgatgcgagcagtctggttgtcgtatctacgaaaaacacagtcggcttttatgatatgaattctaggattacaattgagcaggaagaaaagcagtgagggaacgcgatatggagaagatggaacagattggaaaggcggtgctggattaccgcttttatccggaggacgataagtataccgacggagccatcgaggatgagatgctggagatcgcccgaaattgtgcacctgagcaatatgaacgtgtgattgtggagaaaaagagctggccgattctctatcatttttcatatctgagggagaatatcatccgctggctgccgatgaacggaagtgaaaatgtactggagatcggggcaggaccgggtgcgatcaccggagctctgtgtgaaaaggcgcggcaggtgacggtcatcgatctttcgaaaaagcgatgcctgatcaatgcctatcgtcataaagactgtgataacctgcattttctggtcggaaattttcaggatattgagccgaagctgacggagcaatatgatctgatcactttgatcggtgtatttgaatatgcgcagttttcgattcagtcggaagatccgtttgtggactacctgaaaaggatccgcacgcatctggctccgggaggacggcttgtgatcgcgatcgagaaccggatcggcctgaaatactgggccggggcgacagaggatcatacaggaatttattttgaagggctggagggatatccgacgaccaactatgtacggacgttttcaaagccggagctggagcaggtgatccgaagggcaggtctttcttccatggagttttattatccatatccggactataaatttccggagcggatctactcagatgcgtatctgccaaagaaaggagagctgaacaggaaccggcagaattttgaccgggagcgaatccagcttttctcagaggagcgcgtctatgatacgctgatcgagagcgggctatttccgcagttttcaaattcctttttggtggttgtgagggcagaatgataatatatacgaagtattcgaatgagcggcgcagagaattctgtatccggacagatatccggatgaatgatgagaaggaaacatatgtctgtaagcttccggcattcccggaggccaaagaccatatccggggactgatggcggcctgccagggcttacaggcggatctggccgggagtggactgaccgtaaatacgtgtatgctggaaacagagccggatggcagcatcgctgcgcatttcccgttttgcaagggatggacgctggaggaaaagctggatacgatctggaaaagggaaggggaagaagcgctgatcaaggagattcagcgttatttttccatgtttgcaaatacaaaagaaccgtttgtagagacagaagcgttccggcaggtgttcggaacggtgcagtttacacgtccgcagtacagccggagtatctcggatattgatatgatttttgcaaatgcgctggagacggagatgggatacgagctgatcgattacgagtggaccttcgcttttccgataccggtgcgctatcttctgtaccgttgcctttactattatacgttgggcaatgcgaaccgggatgcactggtacagcgaaacctgtatgaagtgtttgatatcacagaagaggagtgcagacagtttgcggcgatggagcggcaatttcaggcatatatgctgggggattatattccggtctggcagctgtatgactgcatttccgaaggcgtgcttccgatccggccgatgatcgagcagggcggggcacgggaaagggcgatgcggatcatggatgtcttttttgacgacggacgcggctttggcacatggaatgcgacccgctatcaggtcgcgcctggcagccgggtgtccctccgtatttcattgccagacgggacaaaggcgcttcggattgacccgtgtgcagcaagatgtgttgtgcgtgtggaatcgctgacccagggaaaagagtcacttagcgtatcagcgaatgcggcgatggcaccgaacggagactatatttttgacacggaggatccgcagctgatcatttccggtctgccacatgggacagagccggtggagatcaccttctgggcagagccgatcgacggcctggcgcgggaagtgctgctgaaccagagtggtcagcttgcgtggatggaacagacaaaggtgtggaaggcgtaccgaaaactgaagggtgacggtgcacagcgtcaggaaaaataagacaggaaagcgattggcgggcatagaagataaagacaggaaaaaagaagggagctgcggagcatgagaaaattctgggaaggacagtcctgtgtgctgtatcacatagaccggattgagagccggtatggaaatatctgcatccgtggctgggtgtcagatcttgacccggaagaaaggacagagtgttctgtcgtggatgcggacggcgtgacgcttccggtatatatggagcggcttgtgcgcgaggatgtcaatgctgcggtacacaagcctgtcggctatgagagcgggattcacatcctgattgaccgtgcggtactgaatacgccgtatgtatggctgacctttacaaatggggcgaagcgacagagagtccggatcctggtgcagacatccggactgaagcgggcatggaagctcagaagggcaaaaaaagatgtgaagcagatgtgcgtacagccgacgcatccggaagagctggactatgacctgtggatccggatgaaaatgccggatgcgcgggtaaaaaaagcacagagagaggcggtcttttcccactcggtgcttttttcggttgtcattccgctctacaatacgccgcagcgttttttaagggaagtcattgattcggtgctgcagcagacctacggccgactggagcttgtgctggcggacggcagtaccgatccggcggtcggagcatttgtgaaaaagcagtatgcaaaggatcggcgtgtgcgctatgtgaagcttgcagaaaaccgtggtatttcccggaatacgaatgaagcgatccggaagacgaaaggagactttattgtctttacagatcatgatgatgtgctggcggtggatgcgctctatgagatggcaaaggccatcgaggcacagccggggctcgatgcgatctatacagatgaggacaagatcaaccggagcggcacagcttattttgggccgcatttcaagccggatttcagtatggcgttgctgcagtgcaacaattatatctgtcatctgtttgcggtgcgacgcgatttgctgaagaaggtcgggctgctgaatccggcctatgacggtgcgcaggactatgactttgtgctgcgctgtgcggaacaggcgaaggcgatcggccatattccgaaggtgctctaccactggcggacacatccggcatcgacggcaggcaaccccgagagcaaggagtatgcgtttaatgcagggagaagggcagtcgaagcacactatcagcggtgcgggatcgcagccaggacagaggagactgcgatgcgcggaagataccgcagtcggtttacggttcagggaatgccgcttgtctcgatcctgatcccgaataaggatcatgtggaagacctgcggcgctgtcttgcttcaatccgagagaagtcgacgtatgcgaattatgagattctcgtaattgaaaataacagtgtagaggcagagacggaggcgtattatcagaggttgctgcgggagcatccggatggcaggcttcggattttgcggtatccgggcagctttaactatgcggcgatccacaattttgcagtgccgcaggcaggcggtgagtacctgatcctgctgaacaatgatactgaagtgcgaagcgaaggctggatcgaggagctgctgggactttgtcagcaggacggcgttggtgcggtcggagcaaagctctattatccggatgggacgattcagcacgccggcgtcgtgctcgggctgtgcggtgtggcgagccatctttttatcggtgcggacggggagagagatggctatgcagggcggctcgtatccgtacaggactacagtgccgtgactgcggcctgcatgatgacccgaaaggcggtctatgagcaggtcgccggaatggaggagtcgctggcggtggcgtacaatgacatcgactactgtatgaagctgcagacggccggatggcatgtgctctttacgccatatgcggagctgacgcattacgaatcgcggtcgcgcgggctggaggacaccgaggaaaagcagcgccgcttccaagaagaggcgcgcagattcgtgcagcgctgggaggcacagcttgacgcgggtgatccgtactacaatccaaatctgtctgtgacaaagactgactgctcgctccggatgccatgggagcaggaagcgtggcggaagctgtgcacagactaagcggaggctgtggataaagatcgggtagcaaagccgaccggtggatgaatcaccggatttcgataaaatacagagaaatctaagatggataaagcagcgacagaaggcaagagaaaggacacgggttgcatgaatacaaaatttaaccgggagcggattcgatttgatgtaaagcagccggatacacttgtgattcagggatggtttgaggatgataccgagggggcggagcagttcgaggcagagcgaaacggcgcacccgcagccatcgacgtacaggtgcagcgcggcgtggaggtgacgaaaaaatatcttcgctataagacgaacgtcatggcggaatattttatccgtgtgccgttgacggatacggaaaagccgggagaagtattcgaagtatccaaaaaccgtaagaaaacagctgtgtttccggcagtgaaggtttatcacaagacggcggatggcagacgctgcatttatcatgcctctgcttctgagctgctgcgcatttccaggcatctcatgtcctgggtagaaaagttgacggtgctgccggacggacgctatcagctgcgtggctggtatatgggagtggaaaaggtgcagatggcgctgctggatcatgccggacatccggttgagacgaaatatacggaaggcaataggatcgatattctgggcgaatttccggaagcggtgctttccgatacacatgcgtttgaacttacatttgcaaagccgcaggacaactatctgcgccttgccatgaaaggcggcggaaagaaggcactctatccgctgaactgcaagaaaatgctttccgggaaggaaggcctctccgttatctgcaaaaagagcgtcaattatctgaagcggaagggctttcgacagtttgtgaagcgcgtggaggatgttgtgctcggcacagacgcaatcagctatgagcgctggcggagaaaatacggagtgaaggcttcggagctggagcggcagcggacggccgtgtttgcatggaatccgacaatcagcatcgtcgtgccgctctatcgcacgccggagcgttttttgcgcgcacttgtgcagtcggtacaggcgcagacttattcacactgggagctgattctttctgatggaagcggtgcggattccccactgaccgccctgctggaccggctcgtccgcgaacagaaggagagcgggcatccgggcgtgatccgggcactgcacaatgggcagcagcttcgcatctccgaaaatacgaatgcggcgctctgggcggcaaccggagattttatcgcatttggcgatcacgatgatctcttttcaccggatgccctctatgaatgtgtgcggcttttgaatgattatccggatacagagctgatctacagcgatgaggacaaggtagacggtgcgggaaagcgttattttgagccgcattttaaatcagattacaatccggatctgcttgaaagcatgaactatttttgccatctggtcgttgtaaaagacgatctgcagcagcgtgtcggctatctggatgcggactatgacggcgcacaggactatgactttgtactgcgctgtacggaacagacgacaccgggacagatccggcacattccgaagattctgtaccactggaggagtcatcaggactctacagcagagaatcccgagagcaagcgctatgcatttgaagcaggacgccgggcggttcaggcacattatgaccggctcgggatcgtggctgcggtgagggagggcgaatatccggggctgtacgagacggaattcgcgatcacagatgatccgatgatttccattctgattccgaataaggatcatcttgtggatctgcagacctgcatccgctcgattaccgaacagtcggattatgagaattatgaaatcctgattattgagaacaacagcacggagccggagacgtttgccggatatgaggagctggagcgacaggatgcgaggatccgtgtgctccgttacgagggcagcttcaatttttctgcgatcaataatttcggtgcggcacatgcaaagggggcttacctgctgcttttgaacaatgatacggaaatgattcacggggattgtctgcggcagctgctcggaccgtgtcagagaccggaggtcggaatcaccggcgcgctgctctattatggagatgatacgattcagcatgccggtgtcgtgctcggcttcggaggtatcgcggggcatgcgtttatcggagaaaaacgaggagataacggttatttctcacggatcatctgcagacaggattacagtgcggtcacagcggcctgcctgatggtaaagacgtccgtttatcgggaggttggcggtatgtcagaagatctgcgtgtggcatttaatgatattgatttctgcatgaaggtgcgcaaagcaggatatctcgtcgtctataatccaggggcggagctgtatcatttcgagtccaaatcacgtggactggaaaatacacaggaaaagatcgagcgctttaacggcgagattgcgcagttcctcgcacgctggggagaggatatcaaggcgggcgatccgtattacaatccgaacctgtcactggataaggcggatttttctctgagattgtagaaagcagaagcccgtctgtgctgcagggcaggtaaaaacagcagaaataaagaaacaaaaaacgaaaatctaaaatccaaaatccaaggagagactatgagcgcaacagcttcattgcaaaaaaagtggaatcagctctgcaatgtgatctgggatgatccggaggcaaagcaggtcgaaaggacagccggaaaggaagccggtgagcaggataagaaaaagacgaggcaggcatccaatgtgctgccgaaagatcagaatgcaggccacagattcataaatgcacatcgttttgatctggcctttgtttttgtgatgggtgcattactctttttccttgcatggatcctcccgctgaacggtgggccggatgaggaaatgcgctatctgattccgcagtatatttaccggcacgggacgctgccgcacggaggggatccggagatccgaaataaactgtgggggatttcctacggctttcatccgattctgccttatattttcggcggctatctgatgaagcttgtctctgtgtttaactcttcggagcatgcgcttttgatggcagcccggtttatcaatgtgctgctcgggatgggcttctactggtatgtgctgcagatttcgcgccggctgttcagacgcggcattttccgggtgtattttgtggcgcttctggcgctgctgccacagctgctctacttatttgtatatgtcaatacggatggtatcgcactattctccactgcaatgattttcaactactggttgatcgggatagagaaaagatgggatcggagaagctgtaccggacttgcaatcggcgtgtcgtgctgtgcattgtcttattttaatgcatatggctttgcactgatgtcggtcgtgctgtttgtcggctccatgattgtattttacggaaagcgcggcgcgaaggactgtgtggtcgtggttttgaagcgtggactgttcatcacaggaattgtctttttgctgtgcggctggtggttcatccgctgtgccatactctatgacggagattttctgggactgtccactccggcgaagtacggagagaaatatgcacaggaagaatacaagccttctgtgaagcagtccgtgaaggagcagggaaaatcgctggaggaaatgctgaaaaaagaggtcgacggcggtatggaatgggcgacgacgacctatcgcagtacgattggctatttcggtttttttgagtatccgctcggattggatatttacgggatccataaaaaattgttcgtgcttggaatacttgggattctggtgcataccatcctgactgcgctgtggggaatcggagtgtggctgaatcggaaaagggaatgtcctgtggtcgcaaaataccgcagagggcttgcagtgatcagcgggtctgagcatccggcatttacggtggaaaatcaggtgctttcgtctgcgaatttcttcatattgcagttttcgcttgtttgctgtatcataataccagtgttgctgtcgttagtgtattcgtacaccgacgattttcagccgcagggacggtatattatgacctttatcatccctgtgatgtattttaccgccgccgggacagagcgtgtcctgaccctgtgcttccggaagtggatggttccgcttctgatgctgccgcttttgtatgcggtcgtacatgtatgggccagtgcatttctttctgtatatattccggcctggtgtgagtcactttcatttctttccggcctgcgcttcccgtggctgtcaaacattggccccgttgtgaagcttttgcagctgctgattccgggatgatgagaaagtacatttgaggaggagataagatgattgattttaacagagctccgtaccttggtacagaggttgagtatatgcagcaggcgatcgccaatgcaaagctgtgtggcgacggaccgttcacgaaaaaatgctcacagctgatgaaggagcagttcgggacaaaacatgttcttttgacgacttcctgcacacatgccctggagatggcagcgtttctctgtgatctgaagcctggagatgaggtgatcatgccgtcctacacgtttgtatccacggcagatgcatttgtgctgcagggtgccaaaattgtatttgtagatgtgcatccagagacaatgaatattgatgagacgaagatcgaggcggcaatcacagagcgcacaaaggtcattgtgccggtgcattatgccggtgtcgcctgtgagatggatacgatcatggcgattgcaaaaaaatacaacctgaaggtcgtggaggatgcagcgcagggtgtcaatgcgtggtataaagggcgtgcgctcggcacgatcggagatttcggctgctacagcttccatgagacaaagaattatacaatgggagagggcggcgcgctgctgtttcaggatgatgcttatctggagcgtgcagagatcctgcgtgaaaagggtacgaatcggagtaaatttttccgtggacagatcgataagtatacgtgggtcggctacggctcctcgtacctgccaagcgatatgaacgcggcctatctgtatgcacagctgctcgagatggacaagatcaacgataagcggcgtcagatttttgactattattatgagcatctggcagttcttgaggagaagggctatctggcacgtccgtatgtcccggactatgccgtacataacgggcatatgttttacgttcgcgtgaaggatctggagacacggaccgatctcatccgttatatgaaggaaaaaggagtcctgtgtgtctttcattatattccgctgcacagcgcacctgccggaaagcagtacgggacgttccatggggaggatgtgtatacgacaaaggagagcgagtgcctgatgcgtctgccgatgtactacagcctgtcgatggatgatgtaaaatatgtgacagactgtctgctggaatattatggcgaataaagcaagcaattttctgaaaaaactgagtccctacaatatacaaaaggggctgcgctatctgaagcattttggtgtaaaggaattttttgtacgcctctcggaccggctggagccggaggaggtgccgtatggcccgtggtttgccggacatcgggcgaccgaagaggagcaaaagagacagcggacgcataaatttgccgatccggtcacgttcagcatcgcagttccgctctatcggacaccggagcgctatctgcgcgagatgatcgcgtcggttcaggcacagacatacccgcactgggagctctgccttgcaaatggcagcccggaagaggaacagctcagaaagctcctggaggagtatgcggcggaagatccgcgtatttgtgtgaagcagctgagtgaaaacgcaggcattgcggggaatacgaatgcggcgcttgcgatggcgaccggtgaatatgtcggactgctcgaccatgacgatctgcttgaaccggacgcgctgtttcaggtgatgagcacactggatgcggcacggcaaaggaagcagccgctgccggagctgctctacaccgatgaggacaagatttccggtgatgggagtgagtactttcagccgaacctgaagccggatttcaatccggatctgctgagaagcaataactacatctgccattttctggtcgtatccagaggacttcttgagaaggtcggaggatttgagcgtcagtatgacggtgcgcaggactatgattttattctgcgctgcacggagcaggcgaacgggatttgccacattccgaaggtactctatcactggcggacgcatgcacagtcgacggcagataatccaatcagcaagcagtatgcctatgatgctggagcaagggcaatcgaggcgcatttgaagcgtgtcggccttgcaggtacggttgaacggaagaaggatttcggcttttaccgggtgcgttatgcactggaagggcagccgcttgtctcgatcatcattccgaataaggatgaaaaagacaccttaaaaaagtgcattgagtcgattcagaaaaagagcacctaccggaattttgagatcatcatcgtggagaataacagcaaaacggtggaaatctttgattattataaagaaattgatggacgaaacagcgttcatgttgtatattgggacagagaatttaattactcggcgatcaacaacttcggcgtgtcgtatgcaaagggcgattatctggtatgtctgaacaatgatatggagatcatcagtgcggactggattgaggagctgctcggacattgtcagcgtgccggtaccgggattgtgggcgcaagactgtactatccggacgatacgattcagcatgcagggatcatcatcggaatcggcgggatcgccggcagcgtgtttgtcggtcagaagcgcacccataccggatatatgcaccgggaggcgctgcagcaggacttaagtgctgtgacggctgcgtgcatgatggttcgccggtcactttttgagcagcttggcggctttacagagcagcttgcggtagcgtttaatgacgtggatttctgtctgcgcgcacgggagatcgggtatctcgttgtgtacgatccgtacgtggagctgtatcactatgaatcaaagacacgcggtgcggaggacacgcaggagaaggtgcgcagatttcagacagaaatcgaatatatgcgtacccggtggatttctgtgctcaaaaatggagatccttattataacaggaatctctctctgaaaaagtggaattattctttgaagggataagaggtcatgcagatagcaacagtcgtcataccgaatctgaacggtatgaagtacctgaaggactgtctggattcgctgcggcggcagacccggacagatttttcggtgattctgatcgacaatgggtcgacggatggcagtgcggattatgtggcgcagaactatccgggggtgcgcgtagagcgcttttcggagaaccgcggtttttgcggtgcagttaacgcggggatccgtatgagtagtacgagatatgtgattcttctgaataatgatacaatctgtgatgcgcagtttgtagagcagcttgtggcagcgatggaagcacatccggactgttttgcgggaagctcgcgtatggtgcagatggcggatccgtccaggatggacaatggcggagacttttactgtgcgcttggctgggcctacacgccggcaaagggcaagccggtggagcgctatgaacgggcaagagctgtgttttccgcgtgcgcgggagcagcgatttatcgccgggctgtctttgatgaaatcggtatgttcgatgaggcgcattttgcgtatttggaggatgtggatgtatcatggcgggcgaggatttatggcctgtgcaatatgtatgtcccggctgcagtggtccggcatgtcgggagtgcgacaagcggttcggtgtacaacgaattcaaggtgcggcatgcatcgcggaacagcatttatctgatttataaaaatatgccggttctgcagatcttatggaacctgccgtttctgattccgggctttctgatcaagatgttgttttttgtgaagaagggatatggaaaagagtacatcacagggcttgcgaagggctttgcgctttgtcgaagagacaagaaggtgcagttttgctggaaacatcttggaagctacctgaagatacagtgggagctctgggtgaatgtcatccggcgtgctgtggacttttgaccgaggtgaacggctttgattaaggacaatcaaaaatattttaatcggctgcaggtcgttttggatggattgatgattattctttcctatctccttgcatggtttttgatgctgcgcagtgtcgaaggcaaggagattggcgtccttccgccggaattttatatgatggtactggttgtacttgtaccattttttttgctgctttactatgcctgcaatctctacacgcccaagcgcgtgcaggggcgaaggcttgagggcagcaacattgtaaaggcaaatatcatcggtggactgactctgatggcggcgtacttctttttacagctgccaaacgtatcccgtctgcagatcggattatttctgcttttgaatgtgatttttctgttcgtggagcggaatgttgtgcggatcattctgatgcgcttccgcaagagcgggctgaatctgaagcacattgtattggttggatacagccgggcggcggaggaatacatcgaccgtattgtgcagaatccgcagtggggctataaggtcatgggcattctcgatgaccgggtcgtagccggtacggagtacaggggcatcggggtgcttgggacgatcggctccttaagcgcgcttctggaggtcaatcatccggacgagatcgcgattacacttggcctgtcagagtattacaagctggaacgcatcgtcgcgatgtgcgaaaaggcaggggtgcacacgaaatttattccggattacagcaagatcattccgacaaagccatatacggaggatctgctcggtcttgcggtcatcaacatccgtcacgttccactttccaacacgtttaatatgatggtaaagcgtgctatggatattgtcggaagcctgatctgtatcgtcctgttttcaccggtgatgctgatcacagcagtgctgatcaagctgacgtctccgggaccgctgatctttacgcaggagcgggtgggactgcacaatgttccgttccgcatgtacaagttccggtctatggaggtgcagacgcagtccgaggaaaagaagggctggacggtcaaaaacgatccgcgtgtcacaccggtcggaaggttcatccgcaagacgagtattgatgagctgccacagcttttcaatgttttgaaaggggatatgagcctgatcggtccgcgtccggagcgtccacagttcgttgagaagttccgggaggagattccgcggtacatggtcaagcatcaggtgcgtccgggaatgaccggatgggcccaggtaaacggttatcggggcaatacatcgatccggaagcgtattgattgtgatctttactatattgagaactggacggttgggctggatatcaagatcctgtttctcacggtgttccggggatttgtaaataagaatgcgtattagagaatgagctgcaatagaagaaaggggagtatatatggaagagaagagaaaacgcacgtccagagataccgattgggcaggaacacgcgccggatcggaacagacacaccggcaaccgggcagcgcgcagcgggaaggagcgtaccggtaccgcaatccggaggaagaagggtactacggaaacggacagggacagcagcagtaccgtcagggacagggcggctactatcagaacggatcgcagcagggctactatcagaacggaccgcagcagggctattatcagaatgatccgcagcagggctactaccagaacgggccacagcagggctactatcagaatgatggacagagctactatcagagccagggaaatccaaatatgtatcagggccagggctactatcaggagccggatcagcgaaaccgcagtcataagaaaaagaagaaaaaacacagaaaactgatctttgcgctggagcttgttttgctgctcgttgtggcgctaggattgtttgcatttgcacagctgagtcgtgtcggccgtgtgaatctgaaggatatcgtgatcaacagcggcattgcaaagagtggataccgtaatatcgcactgttcggcgtggattcccgtgagggcgatcttgacagcggcacaaacagtgatacgatcatggtctgcagcatcaacaataagtccggcgaaatcaagctcgtatccgtctatcgtgatacctatctggatgtcaatgacggacattactccaaggcgaactccgcctatgcaggcggtggtccggagcgtgccatcaatatgctgaataagaatctggatctggatattacagactttgtgacggttgatttcaatgccgtcatcaaggcagtcgatctgctcggaggtatcgatatcgacctgacagatgaagaagtaaaatggttgaatgcctatctgattgagacatcgcaggtgaccggagtttcttatgaaaatgtcgcagcttccgggacacagcatctctccggtattcaggcgatggcttactgccggatccgttatacggagggctgggattacaagcgtaccgagaggcagcggctcgtactggagaaaatttttgcagcggcgcaggcacagggcgtgaccggtctggccggactgatcaatacgatgattccgtatatcaagacgagtctgagcaatacggagatgcttgcacttgcagccaatatcggaaaatacagcataacagatacacagggcttcccatatgacaagcaggcggcagatgtggatgcgggagattgcgttgttccggtcaatcttgcctccaatgtttcacagctgcacagctacctgtttagtgaatcaggctatacgccgtcggatacggttcagcaaatcagtaatcagatcatcaacaatacgggaatccagtaatcggaggcgcggatgaagcacgaagaaattgatgtgatcataccggtctaccgaccggatgaaaagctgcaccgtctgctgcttgccttagagcggcagacggtaaagccgtcccggattctgctggtgaatacggagcgggagctttttgatgatgcctgtctgaaaggcacggagcatgtggaggtcatccacatccagaaaagtgaatttgaccatggcggaacgcggcatatggcggcagaaatgctgcagggcgcgtttttgctgtttcttacgcaggatgccatcccggcagatgactgcctgatcgagcggctgtatgaggtctttgccacaggaagagagtcagatcgacagcagccggtagcggcggcgtatgccagacagcttccgatgccagactgccatgtgattgagcgctataccagaagctttaattatggaaaagagagccgcatcaagaccgcagacgacctggagacgcttgggatcaagacctttttttgttctaatgtgtgtgcgatgtaccggaggagcacctatgaggcgcttggcgggtttgagcggcatacgatttttaatgaggatatgatttttgcgggaaaactgattcagaacggttatgccgtcgcgtactgtgcggaggcaaaggtgtatcattcccacaattacagcggactgcagcagtttcaccgaaattttgatcttggagtatcgcaggcggagcacccggagatttttcagatggtgcgctccgaaagcgaagggatacggatggtgaagcagacagccgcctttctttgccacagcaaaaaggggtatcttctgccgaagcttatatggcagagcggctggaaatatctcggctatcagctggggaagcgctatgagaagcttccggaatggctgatacgccgctgcacgatgagtccgggatactgggagcatcaaaacgagtcaggcaggcagtaaagccggctttgcagcaatcctgcagtgaggtattattttagctacaaaacagaggataaggatatggatgaaaataaaaaagataacaccaacgtcgaagagacaaagaaggactatgagcgctactgctcactttgccgcaggccggagcgtgtggccgggcagctgatcgagataccgggtggctttcatgtatgcccggactgtatgcagaagagctttcatgctgtacaggggctgggattcccgattggccagaatatgagcatggatgatctgatgaagctgcttggcaatctggaaaatgcaggtatgtctgtggaggtacacccggtcgtggaaaacggtggaggagaaatcgcagatacagctgagaaaaagccggaggatgcagattcagaagaaacagaagaggagcagccgaaaaaatccggtggacgtatcccgaatatcagcatgatcaatctgggcgatctgtttggcggcatgatgccgtcccagcagcaggtcaagaagaaaaagcataaagagggcgagccgaaaaaagcatttgacatacgctcaattccggctccgcacaggatcaaggcgaaactggacgattatgtgattggacaggagcatgcgaagaaggtcatttcggtggctgtttacaatcattataagcgggtaggggcagatacctcagacggtgtggaaattgaaaagtccaatatgctgatgctcgggccgaccggaagcggaaagacgtatcttgttaagacacttgcaaggcttctggatgtgccgcttgcgatcgcggatgcgacctctttaacagaggcaggctatatcggcgatgatatcgagagcgtgatttccaggctgcttgcggcggcggacaatgatgtggaccgcgcagagacggggatcgtcttcatcgatgagattgacaagatcgcaaagaagaaaaatgcgagccagcgggatgtgagcggagaatcggtacaacagggaatgctcaagctgcttgagggcagcgaggtcgaggtgccggtcggagcgacgaataaaaatgcgatggtaccgatgacgacggtcaatacgaaaaatattctgtttatctgcggcggtgcatttccggggctggaggatatcatcaaggagcgactgaaccgtcaggcatccatcggcttccttgcagatctgaaggataaatatgataatgacccggagctgctctcaaaggtgacggtcgatgatatccgtgcttacggtatgattccggagtttatcggacgtctgccggttatctttactttaaaggggctgacgaaggagtcgctggtgaagattttgaaggagccgaaaaacgcgattatccggcagtatcagaagctgctcgcgatggacgaggttgagctgagctttgatgacgaagccctggaggcgatcgcggagcttgcactggagaaaaagaccggtgcccgtgctctgcgtgcgattatcgaagaatttatgcttgatattatgtatgaaatcccgaaggatgataacattggaaaggtgcggatcacgcgcgcgtacatcgagcacaccggagggccggagatttctttgcgcggagcggaggcacttctgccggaaggcattgacagtgtttgacaaaaatgttatgttagggtgtaaatgtgtaatgatagagaatgaggagagagtgcattcatgaatgaagtacaggagcagtttttaaaaactctggaaaatctgaaagcgttggcaaagacgaaaaagaacacattggaatacgatgagattctgaatgcgtttaacgggatggagctgacagatgcaaagatcgatatggttctggagtatctggaaaagaaccacgtagatattctgcagggtaaatcccctgaggacatgccggacgatatgcttctggaatccgaggaggatattctgctgtcggataatgaggaaatcgagctgatcaacgacgtagacatactggagggagtcagcaccgaggatccggtcagaatgtacctgaaagagattggtaatgtaccgctgttatctggtgatgaagaggttgagctggcaaagagagtagagcagggcgatgaagaagccaagaaaaagttgaccgaagcgaacctcagactggtggtcagtatcgccaagaagtatgtaggaagaggtatgccgtttctggatctgatccaggagggcaatatgggcctgatgaaggctgtggacaagtttgactatacaaagggttataagttcagtacatatgctacctggtggattcgtcaggcgatcacgcgcggtatcgcagatacgggccggacgatccgcgtaccggtgcatatggtagagacgatcaataagacgctgcggatgacgcgcacactgctgcaggagcttggccgcgaaccgaccccggaggaggtggctgcacggctgaacgttccggtgagccgcgtccgtgaggtactgaaaatctcccgtgatccggtgtccttagatacgccgatcggtgaggaggatgattcccatctgggcgatttcatcgaggatgataccgcattatccccgtcggattcggctgcgttttcgatgttgcgtgaggaattaagcgctgcattggagtcactgaccgaccgtgagcgtcaggtcatccagctgcgtttcgggctgatcgacggaagggcgcgcacactggaggaagtcggcaaggagttcaacgtcacgagagagcgtattcgccagatcgaggcgaaggcgctgcgcaagctccgccacccatcccgcagcaagcgcctgaaggatttcctgaattaacagcttcgggaagcgggtatcatcatatgaataaaggaggacacaagatgaatatcgaaagcttgagaaaagatatggtagcagctatgaaggcgaaggacaagccgagaaaggaagcgatttcctctctggtttccgcagtcaagaaagcagccattgatgcaggctgccgggaagacattccagaggatatggtagaccgtgtcatcttaaaggaactgaagactgcaaaggagcagatcgatacctgcccggagagccgcacggatctgaaggaggagtatcagttccgctatgacgtgatttccgagtatgcgccaaagcttctttcggcagaggaggtaaaggcgatcctcacagaaaaattcgccgatgtactggcgacgaagaataaaggaatgatcatgaaggctgttatgggcgagctcaagggcaaggctgatggcaaggtgatcaatcaggtcgtcgcagagctctgcaaataaatagaaaacctgctgatataagcattccacttacccccgcttgctgctctgtgcacctaaagcgggggaatgcttattctgcattcagagaagaggaaaaactgatgatagcagaaaaaatgaagccatacctgaaaaataattcagccattcgtatgatgttcgaagagggaaaacgtcttgcggcacagtacggtccggagaatgtctatgatttcagtctgggcaatccaaacgttccggcgccggcaaagctgaaggacgcgattgtggatattttaaatgaggtcgatccggttgttgtgcacggctatatgagtaatgccggatttccgcaggtgcgcaagacgatcgcggacaatctgaacatgcgctacggtactgcctttaccgagaacaatctgatcatgacagtcggtgcgggaagtgcattgaacgtatgcctgaagacactcgtgaatccgggtgaggaggtcatcgtatttgcaccgtattttctggagtatggagcatatgtccgaaattatgacggcgtgcttgttgaagtggctccggatacggatacctttcagctgaatctgtccgactttgagaaaaagctcagtgaaaagacaaaggctgtcatcatcaacaatccgcacaacccaaccggagtcgtataccgcgaggagacgatccgggcgctggcagagattttaaaggagaagcagaaggaatacggccatgcaatttacctgctctctgacgagccgtaccgggagctggcatttgacggagcggtcgttccgtttgtgacaaaatactatgacaatacgatggttgtctattcctacagcaagtctttgtctcttccgggagagaggatcggctatgttgtcattccggatgaggtggaggacagtgcagatacgattgctgctgcgacgatcgcgaatcgcatcagcggctgtgtcaatgcgccgtctttgattcagcttgctgtggcacgctgtgcagatgccgaagtcgatcttggatactatgaccgcaatcgccggacgttatacgaagggctgacgaagcttggctttacatgtgtgaagccggagggggccttctatctgtggctgaagtctccggaggaggatgagcggcagtttgtggagaaggcaaagaagtacaatatcctgatggtaccgggccgctcctttgcgtgtccgggatatgtgcgtctggcttactgtgtatcctatgaaaagatcgtaaaagcactgccggagtttgcaaagctcgcaaaagagtatgcgcaggctttatagtttttagtatgttccagaacaggatgaatcacggaggattttgagttatcatgaaaataattatcgtaggactcggtaaggtgggacagacactggcctttgagctgagtaaggaagataatgatattacggtcattgacaaccgggagggtgtggtgcaggattttgcgagccagtatgacattatgggtgtcatcggaaacggttcgagctattcgacacagatggaggccgggatcgaggcggcagatctgcttattgcggtgacaggctcggatgagctgaatctgctgtgctgtctgatcgcaaagaaggccggtaactgccatacgattgcgcgtgtacgcactccggagtacagctccgagctgaattttatcaaggaggagctcgggctggcgatggtgatcaatccggagatggcggcggccgatgaaattgcacgtgtattgaaattcccatcggcgatcgatgtggatacgttcagcaagagccgtgtggatctgctgaagttccgtgtgctggagcattccgtgctcgacgagatgaggatctcggatattacgtctaagacaaaaggaaatatcctgatctgtgcagtagagcgcggggagcagctgatcatcccgaacggtgatacggtgctgaaggcgcgcgaccgcatctcgatcgtgggcgcatctaaggaggcgaatgattttttccggcaggtcggcatcgtgacaaaccaggtaaaaaatatcatgattgcaggtggcggcacgattgcctactatctggcgaagatgctgatcgcatccgggatcagtgtcaagattatggagaaggatatgaagcgatgcgagacgctctgcgagcttttaccgcgtgcgacgatcgtttatggtgacgggacagaccgggatttgctcaaggaagagggactggagaagtacgagagctttgcggcgctgacaaacattgatgaagagaatgttcttctttctctttatgccaaaaaggtgagcaatgcaaaggtcatcacaaagatcaaccgtatcacatttgatgaagtcatttccgaactggatctggataccgtgattcatccaaaggatattacatccgagctgatcatccggtatgtacgctctatgaaaaattcactcggcagtaatgtggaaactctgcataaaattatcaataacaaggcggaagcgctggaatttatcatacgggaaaactccagggcgacggatattccgctgcaggagcttccgatcaaaaagggtattctggtggcaagcattaaccgtaaaggaaaaatcattattccgagaggctttgatatgatgaagaaagaggatacggttatcgttattacgcagctggcagggctgaatgatattgatgacattctcgcaaaataggtactgacatgaattatagcataatattatatgtgataggatgggtgctgaacttcgaggcagcttttatggttccggcctgtgtgaccggactgatctaccgggaacctgagacgtccgcccttgcggtcgtcgcgctgttctgcctggcagtcggccttctgattacgaaaaaaaagccgaggagcatgtcactgtatgcaaaggaaggttttgtgacggttgcattgtgctgggttgtcttaagtgcgcttggtgcgcttccatttgtgatttcccgtgtgattccgtcttatgttgatgcactgtttgaagtcgtctccggatttacgacgaccggttcgagtattttgcctgaggtcgagcatatgccgcactgcctgctgttctggcgcagctttacgcactggatcggaggtatgggagtgctggtatttgtaatggcggtacttccgcttgccggcggcacgaacatgtacatgatgaaagcagagagcccgggaccgtcggtaggcaagcttgtaccgcgcgtaaaaagcacggctgtgctgctctatggcatgtatattgggctgagtctgctgcagcttgtctttttgctgtttggtcggatgccgctttttgatgcgatcgcaacgatgttcggaacagcaggaacaggaggctttggtatccgaaacgacagcattgccagctattccccgtatctgcagtgggttattacgattttcatgattctgttcggcgtgaatttcaatgtgtattatctgattttaaggaagcgtctgaaatcggcagctgcatctacggaggtgcgtgtttactttgttattgttctgacggcgattcttttgattaccgtgaacatttccggcctgtttccggatatctggactgctctgcgccatgcggcttttcaggtcggttcgataatcacgacgaccggatttgccactgcggattttaatttgtggccatcattttcccagtcaattctggtactgctcatgttcatcggagcctgtgccggcagtacgggaggcggcatcaaggtatcccgtgtagtcgtactgttcaagtcggtgcagaaggagctggacgtcatcgtgcatccacacaatgtgaaaaagctgaaaatggacggaagggtggtcgagcacgcagtcgtgcgttccatcaatgtctttattgcatcatatctgatggtgtttgcactttctgttctgctgatctcgcttgacaactttgattttatgacgaactttacagcagtcgccgcgacgatcaacaatatcggtccgggacttggcatggtaggaccgaccggtaatttcagccagttttccgatttttccaagctggtactgacctttgatatgctggcggggcggctggagctgttcccgctcctgattgtattcgcaaagaatacatggtcaaaataattgaaaataaagagtaaaaggcttcagaggtgcagctctggagtctttgttttttcttgcaatgctttttttggtgtgataaaataaagggcatatgtgtgggatgaaaaatagggaaatgtaaatagggggaatttggcattatacgtcacacagagagtcaggggattgcatgtataagaaaaaattaatgacggttgttgtcagcatggcattgctcactgcatcctatacggtgggttcagcctatgaggagacgaccgtaaagtcagaacagacagaacaggtaacgacatcaaagaagagtgcagaagcacctcaggatacaaaggaggctgctccggcagcagagcagccaaagcaggagacaccggctgcgccgacgcagccgacgacatcggcaccggtgacagaagcgccgacgcagccgacggaagcaccttcacagccgacgacaccgacaccggcgacggaagcgccgacccagccgacggaagcgccgacgcagccatcgacaccgggtgagacgcagccatccacgcagggacagacagagcagtctacatcaggacagacagagccgtctacgccgggcgagacgcagccatccacaccggggcagacagagcagccatcgacctctgatgagacagagccgtctacaccgggtgagacgcagacagagagtggatcagaggcgacaagtgagtctgaatctgagaaggagagtgagacagatccgcccgaggaggagtctgagtcagagacatccgaatacggttccaatgaagagctgttagcacatcagaatatcgtcattccgccgaagcttgagctggagttccggtttaccaaggttgataagcgctatgcactcgtacgcagtgagaaaggtgcatccgtctatgagaaaaagtccgatgatgcacgcgaggtaggagagctggagtattacgggcttgcctatattctggatgatgcgggggacggctggtactatattgaatctggaaatgtccgtggctttatccgtgcagaggacgtcgtgtcagatgagacggcagagcggatcgtaaaggtcaaaggactggatgagcttccgctggcccgactgattgtggcgcgtacagaaaatgaagcgtttacttacacacatacgacagtacaggatgtcatggcttccagggtctatgcgatagctgcaaaggatcttgagatccgggagcagcgaaaggatggcgcgaggacgaccggtacgctggcaaaaggcgggctgtgctatatccttgcggacggagacaaggactggatctttgtagaatccggaaatgcacgtggatttgtaaaacgcacagagctgacgctgggggcaaaggcggattccattgtatcagagaaaggtgagaagaatctgacgcttgcagatgtgaaggtaaagccggaggagaataaagcctgctattacacgtttacgtccgtacaggaggcgtctcaggaggccaagacccgggagtctatggtaaactttgcattgcagtttcttggcaatccgtatgtctggggtggaaccagcctgacgaacggctgtgactgttccggatttgtacagagcatttacgcatattatggatattcactgccgcgtgtcgccgatgcgcagagtggatacggcatgcagatcccgatctcatctgcacagccgggcgatctgattttctatgcgaagaacggctatgtttatcatgtgagcatgtacatcggcaatggtcaggtcgtacacgcagccggaagaaagctcggaattatcacctccgggatcagcggtaacgcagtctgggcaacgcggatcattaccgggtagacgaatatacagaaagaaaagcaaatgaaaaaagcttcgatcatgttctcggaaggaggacagatcggagcttttatttctcattttgattttttatacttacaaaaagcccggaaaccgatcaaaagggggaatataacgatgccataattcacttcggtcattccctttacacggatgctcgctgtcaggtgtattgattatggattttacacagctttattctctgtcatgttcctcgccgggagcttctgcatcatctgctgcatccgctggcggctccggcagcaacagccgtaccgtctcgatccggttcttatccattttttcaaccgtgactttgatgccatcgtcagttgtcacagactcgttgaccgtcggaaggtgatcaagcttttcgatgatcaggccgccgatcgagtcgtattcctcggattccagtgacagccccagggcatcgttgatatcgtcgagcttgacggagccttcaatgcggtactcacggtccgagagcttccggatccagtctttttcgtcgtcatcatattcatcccggatttctccgacgatctcttcgagcagatcctcaagggagatcatgccgaccgaggcgccatactcatccagtacgatggcgatgctcacagagtccttctgcatttccagaagcagctcagaggtcttcttatattcataggtaaaataaggcttatacatgacgtgggaaacgtcaaaagcggcattgtcatcgcagaaaaagaaatccttgatatttaaaatgccgacaatattgtcgcggtcgttttggtagaccggaagacgggtatatttttccacacggaacacatcccggatctcctgataggatgcagtgtcgctgatcgtgaccatgtccgcgcgcggaaccatgacgtccttggcctgtgaatcaccgaaatctacaacgttgtagatcatttcccgttcttccttttcaatgactccgtccttgtggctgacatccacgatcgtgcgcagctccatttctgtcatcggattcatcgaactgtcggtgctgacatgcagcagcttcaggaagaagcgacagactgcattgatgacaaagatcaccggcgtcatgatttttatgagcaaatcaatgacagaggcgtaggtcagcgccattttttctgagttggcagcggcatatgtctttggtgtgatctcaccaaaaatcagaatgatgacagtcagtaccgcagtcacgataccgagggcaccctgtccgaacagcttgatggcaagcgcagtcgtcagggaagcggcaaagttgttcaccagattgttgccgatcagaattgcactgagcattttggaaggattctgcttcacctttaatgcgaccgcagcacgtcgattgccctcatccgcgagcgtttgcagacggatcgcatttgcggtggtcagggaagtctccgcagaagaaaagaatgcggagagaataacgagaattaacagcgccagtagttgtatggcgtcatcagaagccaaaagatcatctcctttttgaatgtatttgtacagtttaggagcatcatac
